United States Patent Application Publication US 2019/0348154 A1 - sequence listing, part 32

SEQ ID NO: 118766 - DNA, 567 bp, Enterobacter cloacae
atgttaaaatctaatcttatcgctaaaataagtaccctgcctgatggtaatgtcattgggcggattggtggaaatatccctgaattctttttagataaactagatattgtgcggggttataagttttatttgacagttcagaatcctgatgaggcacatgagtatattacgatacttactcctgaacgatatgatgatatgattgataaaaacatctaccctaattgttcagtaaaaatttttacgcacacgcattctgatgaaagcaataatgatgcatttacgataaaacacattaataaggcagttatcgttgggtatgataaggttgaaagtgaagagtttgactttatcactaaaaccgaagaggcaagattaatacaatcggaagattattattttgatgctttgcaaaaagatggttatgaatttttcatgcagatagatgaagattattatccagatgcattgcttgatggtgattacatctttggttacggtgctttgtatttgtataaaaacatatctggcgggaatatcatagctggtttttggcagtactcgtaa

SEQ ID NO: 118767 - DNA, 4239 bp, Enterobacter cloacae
atgtttgaagcagcacgcgttggtgatgatatcggccactccggtgcgctggccgggatgattgccggaacgattgtcggtggcctgattgccgcagccgggggcattctggcgggggccatgtttattgccggtctcggcgcatcctgtcttggcgtgggcgtcctgctcgtcggcgccagcctggccgtgggatattacaccggggagctggcgactgccgccagggacagcatcgccgacgccggggcatccagcatgacgaagaaaggcgtcatcacctccggctcgcccaacgtgtttatcaacggtaaacccgccgcgcttgccaccgatagcaccgtcgactgttctgacgacggctcgcagcagatggccgaaggctctaagcgtgtctccattaacagccagccagcgtcccgcatcggggatcgcaccacctgcgacgcgaaggtgatgaccggttcggacaacgtcattatcggcggcgatccgcagcaaaccctccccattcagtctgaagtgcccgagtggctctataaggtctccgatcttaccctgctgttcgccgggcttctcggcggctggggcggcgccgctggcaaagtcggggcgctctctaagctgctgggcaaaatccccggcatcaacaagctggcccgtatcgcctgtcgcgccggcacgctgatgaccggcgtggcggccgcggggatcatcgcccgcccggtggatatcgtcagcggacagaagtttctcagcggggatgatgagctggacttcgtcctgccttcccgtcttccggtgcgctggcagcgctactggcgcagcggcaatcccggcgacagcgtgctgggccgcggatggagcctgttctgggaaagccgcctggagccttatcaggacggcctggtgtggcgcgcaccgtccggcgattacgtcgccttcccgaaggtcccgaaagggatgcgctcctactgcgaaagcgaaaaaaactggcttgaacatcaccaggacgacagctggtcggtgtatgacgtcagcggcgagcgctggcactatgcgccgctgcgggatgatgccccgtcgctgctccagcgcctctccgaaccctgcggcaacgatatcctctttgagtggaatgcgaataataccctgcatgccctgaccgactgtgcgggccagcgcgtggtctgccgctacgaccgcgacaggctcgttggcgcctggctggatgacgagatctgcctggtcagttacgcttatgatgaacagcgccagctggtctccgtgaccggccggggcggtagcgtgcgccgacgcttcagctggcaggacgggctgatgagcgctcatgaggacgccaacggcctgctgagcgaataccgctggcgggagattgacggcctgccgcgcgtggtcggcttccgccatagcggcggcgaacggctgacgttcgaatacgattttgagaacggcacccgccgcgcgacccgcgaagacggcgcgcaggcgcactggctggtggatgacgacgacaacgtcgcgcgcttcacggattacgacggtcgccagacgacgtttgtctaccgcgacggcgagctctgccacgtcattctgccgggcggggcgatgcgccgcagcacgtgggacaaatacggccgcatgaccagcgagacggacccggcgggccgccgcacggagtatcactggcatcgcctgaccgaccgcatcacccgcacggtttacccggacggtacctcatcgcaggccatgtacgaccttcgcggtcgcctgctgtcggagacggatccggccggtagcaccaccgcgtatcgctatcccgatgatgaagaattcctcccggagagcatcaccgacgccatcggcggcgtggtgcgcctggtctggaaccaccaggggctgctgacgcagcgcaccgactgctccggcagcgtcacccgcttcacctacgaccgcttcgggcagctgattgccagcgaagatgcagaagggaatatcacgcggcgggagtggagccgtgccgggctgctcagcgccgtgatccatccggacggtagccgcgagtcgctggtgtggaacgaacgcggccagctcacgggctggcgcgacccgctggaaagcgaggtgagctgggcctataacgcgctcggcctcccggtcagcctcaccgaccgtattggccgcgtgcgccagtggcgctacgacccgcgcggtaacctgctgcgactcgataacggcaacggggcggaataccgcttcacctatgacgccgtgggccgcccgctcagcgaaacgcgcccggacgagaccgtgcgccatatggaatgggacgcgcgagggttcctctgcgcgctcgaagaaaacggccggcctgccgccgacggcggtatcgcccgtcgcgtccagcagttcagctatgacgacagcgggctgctgatcgggcgcactcagcgccacgcggagtaccgctacttccgcgacctgagcggccagattacccgcattcgccgcacgccgacggccgaaggcgttgccctgggtatcgaaagcgatgagatcgcttaccgccacgacgccgccgggcgcgtgctgagcgagtccggcattaacggcgcggtgggctacgaatgggatgccctgagcaacctgaccggcctgacgctgcccggcgggcaaaagctggcctggctgcactacggctccggccacgtcagcgccatccgcttcgggcagcagctggtgaccgagttcacccgcgaccgcctgcaccgggaagtgcgccgcacccagggcgcgcgcgagcagctccgccagtatgacagcctcggcagacgcaccctgcagcgcagcgagctaagcacggacgtgaccctgccggagcaggcgctactggaacgcctgtatcgttacaccgcacgcggcgagctttccggcgtcagcgacaccctgcgcggtgaggtggattacggctacgacgccgaagggcgtctgctgaagcactacgaggcccgacagggacacagccgcgcgcagttcagctacgacgccgcggataacctcgccgccagtgacgctgcggcaccggtcacggataaccgcctgcagcactggcaggcgctgtttatgaaatacgaccactggggcaacctggtcagccgccgcaacgggctgtatgaacagcattacgcgtatgacgccgagaaccggctggtatccgcccggggaaccgggccggaagggcggtttgaggcgcgctatcactacgacgcgctgggccgccgtacgcgcaaaatcgtcaccacgacgcacggcaccaccgacacccgcttcctgtggcagggctaccgcctgttgcaggagcagcaggagagcgggctgcgcagcacctatgtatacgacccgaatgaagcctggagcccgctggcgcgtgtggatcaccttcgtgaccagagcagcggtgagatttactggttcaataccgatctgaacggtgctccgctggaggtcacagacgagcgcggcgcggtgcgctggagcggccagtacggcagctttggcgaggtgcgccatcagagcgaagggttctcacggcttgtgaatcgctcggcgatggcacaccagccgcttcgctatgccgggcagtacgctgacggtgaaacggggctgcactataacctgttccgctactacgacccgcaggtcgggcggtttattgtgcaggatccgattgggctgaatggtgggtggaacctttatcagtatgcgccgaatccgttggggtggattgatccgctgggtttaataaacgaatttggaatcgcaggctatggaagccccgtccatgcaaaagacggtttaactgcacatgagttattacaaaatgcttggctaagaaataatggcataataaaaggtagaatgtctggtattgcatctaccaacccagcgatagctttgcaagaaaacgctatgcataaaaccatatccaaattacaggccaaatatggattgcataatcctaatgtactaaaaaaccagtccgccttgcagaatatcaacaggaatactgcaattactcgaagaggtatttacgaagacttggtgaataacagaggttgggaacgtcaaaacgctaaggaatttgccacagaaacggcaatgaaacttagagaagagtctattgggtttgccagaaaaaatgggttgacaaaatgttaa

SEQ ID NO: 118768 - DNA, 438 bp, Enterobacter cloacae
atgtcagaaccatcttcgcagtgcctgtttaatgaaggaatgattgcttttcctgagggctatcaggaccgtaccgtcaatgtcttcgcgccgcctgcagcggatgcgcccgcgttcaacatttcccgcgatgccctcaaccccggcgaagcgcttgccgcgtatatcgatcgccagctcgccctgatggcaaagcacatcaagggctggaagcagggtgagcgcagcgccgcgacgctgggcgacagccttttacagggggaaaccgtccatgccagctacctgcgcgacgggaaacgcatctggcagcagcaggccgtgtttaacgtcgacggcgataaaatcctggtgttcactatgacctgcacccgcgcgccgggcgatgccgacgtcgtgctgtttggcgatcttctcaggagcttccgcttccaccattaa

SEQ ID NO: 118769 - DNA, 3156 bp, Enterobacter cloacae
atgctgacgtttttcatcaaacgcccgcgctttgcgatggtgattgcgctggtcatcaccctgctgggggccatcgcgctgaggattattccggtggagcagtacccgcagatcacaccgccggtcgtgaatgtgtcagcgtcatggccgggcgccagctcggctgacgtggcggaggccatcgccacgccgctggagacgcagctgaacggggtggatcatatgctctatatggagtccaccagttcggatgagggctcttacagcctgaacatcacctttgcggcgggcaccgatccggatctcgccgccatcgacgtgcagaaccgcgtggcgcaggccgtggcgcagctgccgaccgaggcacagcaaaacggcgtgcaggtgcgcaagcgcgccaccaacctgatgatgggggtaagcctttactcaccaaataacactcacacgccgctgttcgtcagcaactacgccagcacccaggtgcgcgaggcgctgtcgcgactgccgggcgtcgggcaggtacagatgtttggcgcgcgcgactacagcatgcgcatctggctgcgtccggaccgcatgaatgccctgaacgtgaccagcgatgacgtggcgcaggcgctgcgcgagcagaacgtgcagggggcggcaggccaagtcggcacgccgccggtgtttaacggccagcagcagacgctaaccatcaacgggctagggcgcttaaaccaggccgacgactttgccaacatcattatccgcaccggggagatgggccagctggtgcgcctgaaggacgtcgccaccattgagcttggctcgcgcagctacagctcgggcgcgcagctgaacgggcatgactccgcctaccttggcatctacccgacgccgtccgctaacgccctgcgcgtggccgatgcggtgcgcgcggagctggaacggttatccacgcgcttcccggacgatctggtctatgaagtcaaattcgacaccacctcgtttgtggccgctaccatcaaagagattggcgtctcgctggtgctgacgatgctggcggtggtggtcgtggtgtccctgttcctgcaaagctggcgcgcgacgctgattatcgcccttgccattccggtgtcgctggtgggcacctttgcggtgctctacgcgctcggctactccgcgaacacgctcagtctgttcgccatcattctggcgctgaccatggtggtggatgacgccatcgtggtagtggagagtgtcgaaacgctgatggcggaagggcagagccgcacggcggcgaccgcgctggcgctgcgtcagattgccgggccggtgattgccaccacgctggtgctgctggcggtgtttgtaccggtggcgctcctgccggggatcgtgggcgagctgtaccgccagttcgcggtgacgctctcgaccgccgtcacgctctcaagcctcgtggcgctgaccctgacgcccgcgctctgcgcgatgctgctgcgcccgcgtccggcacagcccgccgccgttttccgtgggttcaaccgcgggctggacgccacgcgcacgctttacacccggatcgtgagcgtgttcaacctccgtccgtggctggcgctgctggccaccgcaggcgcggcggcggtggtggtattcagctttatgtcgatgccaaagggcttcctgccccaggaggatcagggctacttctttgccagcgtccagctgccggaggcagcctcgctggagcgcaccgaagcggtgatgaccaccgcgcgcgagctgatcgctaaaaacccggcggtggaagacgtgattcaggtctccgggtttaacatcctcaacggcaccagcgcatcgaacggcgggtttatctccatcatgctcaaagactggagcgagcgtccgccgctggatgaggtgatgggcacccttcagcgccagctgctggccctgccggaagccaccatcatgacctttgcaccgccgacgctgccggggctgggcaacgcctccggcttcgatctgcgcattcaggcacaggcggggcaaagcccggcggagctggagcgcgtaactcgcgaggtgctggcgaaagccaaccagcacccgcagctgagccgcgtgttcaccacctggagcagcaacgtgccgcagatgacgctcaccgttgaccgtgagcgcgcggcccgcctcgacgtgccggtgtcgcgcatcttcagcagcctgcaaaccgcctttggcggcacgcgcgccggggatttcagcgtcaacaaccgcgtctaccacgtggtgatgcagaacgagatgcagtggcgcgagcgcgcagagcaaatcagcgagctgttcgtgcgcagcaacagcggcgagcgggtgcgtctgagcaacctcgtcaccatcacgccgaccgtcggcgcgccatttattcagcagtacaaccagttcccgtcggtatcggtgagcggctcggcagcggaaggggtgagcagcagcaccgcaatggcggcgatgggcgagattctggcggaaaacctgccagccgggtacgactacgcctggagcggcatgtcgtatcaggagcagcagaccgggaatcaggcgatatggattgtgctggcggcggtggtgatggcgtggctgttcctcgtcgcccagtatgagagctggacgctgccggcgagcgtgatgctctcggtgctgttcgccatcggcggagcgctggtctggctgtggctggcaggctatgccaacgacgtgtacgtgcagattggtctggtgctattgatagccctcgccgccaagaacgcgatcctgatcgtggagtttgcccgcgcccggcgtatggacggaatggcgattgtcgatgccgcgcgggaaggggcatcgcgccgcttccgcgcggtaatgatgaccgccgtgtcgttcatcataggcgtcctgccgatgatgctggcgaccggggcgggtgcccagagccgccgtatcattggcaccacggtgttcagcggcatgctggtagccaccgtggtggggatagtgttcatcccggcgctgttcgtgctgttccagcgccttcgcgaatgggggcacggccttacggactcgtcgcccacagctcacagtgcttctgcaccagagaaatcagcgagccgccatcggcgataa

SEQ ID NO: 118770 - DNA, 1065 bp, Enterobacter cloacae
atgaaattcccgctcctgctcatactcctcgccgctaccctgccgcccgcattcgccgcagtcattcccgtgcgtgtcgccaccgtggagcaaaccgcccacgccgccgaacgtcagatcccgggtcgcatcgaagcgattcacaccgttgaactgcgcgcgcgtacggaaggcgtcatcaccagaatccactttcgagacggccagtacgtgaaaaaaggtgacgtgctgttcgagctggacgacgccgagccgcgcgccgccctgcgcctggcgcaggccgaagtgaaaagcgccgaagccacgctgcgtcaggcgcaacagcagctgtcccgcttcgaaagcctgggcagcagcaacgccatcagccgccacgacgtggacaacgcccgcatgcagcgcgacgtagcgagcgccgcgctggagcaggcgaaagcccgtctcgacacccgcagcgtcaccctcaactacacgcgcattacctcaccgattgacggacgcgtggggcacagcaactttcacgtcggcagcctggtggatcctgccagcggtgtgctggtggaggtggtccagctcgatccgatccgcatcgcctttgcgctggaagagggcgcgtttgccaccaaagccggacagcatgcggatatcagcgccatgaagcaggcctggcaggcgctgattgacagcaacggccagcgcgtcagcggggaactcacctccgtggacaaccgcatcgacccgcgtaccgccagcgtgatgctgcgcgccgagttcgccaacccgcgccatcagctgctgcccggcggcaatgtgaacgtctacctgcgtccggcaagcgagcagcctgtcctgaccctgcccgccgctgccgtacagcagaatagcgacgggttcttcgcctgggtggttaacgccgaggataaagccgaaatgcgtccgcttaaggtcgccgggcagatgggccagcagttccagattgcctccggcgttaagcccggtgagcgagcaattactgacggtgcgcagcgcgtgcagccaggcgctgccgttcatatactgaattaa

SEQ ID NO: 118771 - DNA, 1104 bp, Enterobacter cloacae
atgaaaaagcctctattcatctgcgtggtgttagtcatgattattgcttcagctgccagtttaccgtttgtactgaatgccggatttggccagccaccgcagggtgcgcagctctctgaagtggaggcctctccgcactatcgcgacgggcaattccataacacgctccctacgccgggctttaccgggcaacaaaatatgctggtggcgtggtggcagtttcttacccgtaaaaccgaaaacgcccgtcctgcgcagccgctgccgctggtgaaaaccgatctggcgagcctgtcgcctgagcaggacacgctggtgtggctcggccactcctcctggtatatgcagctggcggggcaacgaatcctgatcgatccggttctgagtaactacgccgcaccgttctccttcctcaataaagcctttgcgggggagtacccgtggcgtgcggagagcatgccggagatcgacctgctgattatctcccacgatcactatgaccatctggattacgccaccatcaaggcgctgctgccgaaggttaagcgcgtggtcaccccgctgggcgtgggttcgcatctgcgctactgggggatgaaccctgagattatcgacgagcgggactggaaccagtcggtacgtatcagcgatgcgctgacggttcacgtgttgccttcgcgccatttttccgggcgcggcattaagcgtaaccagaccctgtggggcagctttatgtttgtctctccggagcagaaggtctactacagcggagactccggttatggcccgcacttcaaagcgattggcgagcagtttggcggagttgacttagccattatggaaaacggccagtacgaccaggactggaagtacatccatatgcatccggcggaaacggcgcaggcctcggcagatctcaatgccagagcggtcgtaccgggacataacgggcgttttgtgctggcgaaacatacctggaacgatccactgatccagctggcgaaagccagcaaggataaaaactaccggctgctgacaccggagctgggcgagcccgtgcgggtgagtgataccacgcaacaatttcgcgagtggtgggaataa

SEQ ID NO: 118772 - DNA, 369 bp, Enterobacter cloacae
atggacagtaaagccttgcaggaacatgccagacgcgtcgcgctggaaatgccttttaccgaacattgctggccgtttggcccggagtatgacgtgtttaaggtgggcgggaaaatttttatgctgatggcgaccgctcacggtcgggcccacgtcagcctgaaatccgatccggaaaaatcactgctcaatcagcagatctaccgtggcgtggagcctggctaccatctgaataaaaaacactggatctccctttatggcacggacgacatcacgcctgaactggtcaccgacctgattacggattcgtggaatctggtcgttgataaactgccgaaaaaagatcagaagtggattcggccagcctga

SEQ ID NO: 118773 - DNA, 654 bp, Enterobacter cloacae
atggatattatttctgtcgccctgaaacgccactctaccaaggcgttcgacccagccaaaaaactgaccgtagaagaagcggaaaaaatcaaaacgctgctgcaatacagcccgtccagcaccaactcccagccgtggcactttattgttgccagcactgaagagggtaaagcgcgcgtggcaaaatccgcggcgggcacctatgtgtttaacgaacgcaaaatgctggatgcctctcacgtggtggtgttctgtgcgaaaaccgcgatggacgatgcctggcttgagcgcgtcgtcgatcaggaagaggctgacggccgtttcgccacgccagaagcaaaagccgcgaaccacaaaggccgctgctattttgccgacatgcaccgcgtggatctgaaagatgacgaccagtggatggcgaagcaggtttacctgaacgtcggcaacttcctgctgggcgtggccgcgatgggcctggacgcagtgccgattgaaggcttcgatgccgcaatcctcgacgaagagttcggcctgaaagagaaaggcttcaccagcctggtggtggtgcctgttgggcatcacagcgttgaggatttcaatgccacgctgccgaagtctcgcctgccgctgagcacgattgtgactgaatgctaa

SEQ ID NO: 118774 - DNA, 603 bp, Enterobacter cloacae
atgtcgccactgatgattgattccgcagacttcagccaaaaactcggccttatctcccgaaacgtcgaacacaccgaagcgttcctggcacgaggtacggcggaatttcatctgccggggtttctgctgcctgtgggataccggctcctgaaatcgcgttatggtgatgaatatcgtctcgtgaccaccgatgacggcaaaccttatacggcgtatgccgtaaagcttaaatttcataaagaaattacctttccccacggtgccgccacgcaggtgatggtgtggcgtacgccacgtgccgttcatcaacgcgtgataagcgggttgccacaactcttttttcagtgggtgctaagcgaatacgacatcgttgtctctgacagcgaacaaacgggagacgggcaacggttctggctgcgcatgatcgactgggcgtttaccatgaactatcgcattagcgtggcggacggtacggtgggagaagagtggacgttaacgcccgtaaattcctacgctgagctggaagagcgctggattgcttttgcctggggaaacgatcgtgaggtccatccgcatcgcaggcttgtcatcagtaaagcgtaa

SEQ ID NO: 118775 - DNA, 720 bp, Enterobacter cloacae
atgattacaaaaatgaaataccgtggttttcacgtctgttataaaaataacgatacacgatacctggaaatactgggcgatatattgtcctgtaatgtaaaacgactcagcgttcagatggtatttaaaagccttccgcatacccacgtctctttactgaataccccctacggacagtttgtattaaagatttactcccccaggaaaaaaaggatagaaaaatttttcaaatcgttttttacgcccaaccccaacgaaaatttgattgagcggatcgactatgccggcaggcaaggtcataccttcccgaatgatttttatctcctggctgaacgccggattttcagattcgcaaaaatctcgctcatgttgtttgagtatgtccccggtccggagttacgcgttcttcccgcgatcacgccggacataaagcgtgaaatccgacacagtatgcagacaatgcacaatctgaaaatcatttccggggatgcgcacggcgggaacttcatcctgagtgaaaaaggaataaggatcatcgatctgtccgggaagcgttgtaacgcgaaaaggattgttgaagacaacgtgacggccagcctgcgcattggtattcccattgaatcccaccggcgttgggaaaaacgcctgatcgcaaaaaaaatcagacgacaccataaaatcgtccagaggaagtatctggcgcgttcaaataccgcttaa

SEQ ID NO: 118776 - DNA, 429 bp, Enterobacter cloacae
atgaaaaaatatttactcatcgcgttgagctttctggctataaccagtccggcgagttacgctggcatccgatcgctggtggaggatggcacggttctgcagagccaaattattacgcatacccgagaagggtatcatccgctgcgtaccctaaccgcgggcacgattggtggcgtagtgggtcaccagttcggtaacggcaaagggaaaaccgccatgacggtggccggtgcaacagccggggcggcggcttctcataaccggcagtcttacgaattggcagcacaggaagtgaagttacttatcaagactcaatccgggcagactattcaggtggtgcagcacaataatggtttgacatttaaccctggcgacaaagttcgtatcatcacaacgggttctaataccaccgtggaaaaatcatactaa

SEQ ID NO: 118777 - DNA, 291 bp, Enterobacter cloacae
atgaaaaaagtcattctcgctctggctttcactgcggcatcattttctgcatttgcaaatcatccggtagcccgtgcgactgccgtcgcctccgccgatcatcctgttgccgttgcggcggccaccggtgaaggtaaccatcctgtcgcccgcaccacggcggtggtttctgccgatcaccctgtcgccgtcgcagccgcaacagacggtagttatcatcccgtcgcccgtgcaaccgtggtcgctaacgctgaccatccggtcgccgccgcggccgttacagggcactaa

SEQ ID NO: 118778 - DNA, 1461 bp, Enterobacter cloacae
atgaatataccgggtgatgagctatacaccctgctccatgctgcgctgaaaaaacgtggggaagaaacgctccagcgcgcgctctaccttgctttgcgggaggccatactgtgcggaaggcttcggtccggcagtcatttgcccggctcgcgaacgctggcgcagcagatctcggtgtcccgaaacactgttaatgcggcgctggaccaactcacgctcgaaggttatttgctgcgtagccgccagggtacgcgggtggggcaattcgctcatcgtacgattgcccggacattaccggacccggacgtcaggctgacaaaacgtgttgccctgctgcccgcgcctgtgccgcgcgacactccggtgatggcatttacgccaggaacgcctgccatcaactatttccccttgccgctgtggcggcggttatacgatcgcgtcctgcgcgaggaggggagcgccctgttagggtatggtgacccggccggcgagccgacgctacgggccgccattgcccgccatcttgcgctctcccgcggcattgactgcgatgccagccagattgtgataaccgaaggggcactggagggcgtcaatctgtgcacgatgctgttaagcgagccgggggatgtcgcctgggttgaaaatcccggctatagcggcgctaaaagcgctttcgtcaaaaccggcctggcgatgagcggcataccggttgatgacgaggggatgtgctgggaagggctgtgtgcgccttcacccacgctgatttttacctcgccatcgcatcagttcccttacggaagcgtgctcagcgcgcggcggcgtctggcgctgctggaactggcccggcagcacagcgcgtggatcattgaggacgattacgacagcgaattccgttatgccggtgagcccgtaccggcgatgctgggaatggtcaacaatgcgcccgttgtgtatctggggacgttcagcaaaacgctgtttccgtcgctcagaatggggttcatggtattaccgccagcgctggcgaaggcagcgcgtccggccatcggctcgctgctgcgcggcgggcatcgcgctgaacagcgcaccctggcgctatttattgaggaaggccactatgcgcgacatcttgccgccatgcgccgactttatcgtaagcgataccgccagctgcgggaggtgctaagtgcagagcttcatacgccgcaccgtgttcttgccggagaaggagggatgcacctggcgctggcgattgacggtatcgacgaccagcggctggtggagcaggcaagagcgtttcagctggcacccgctgcactgagcgggtactaccttgagacgacgcaggggcaaaccggtctggttttaggttacggcaatacctctgcttcgcagtttgcgccgggtattcgacgtcttcaggcgctcattacacagcagcggggcgggaaagggtaa

SEQ ID NO: 118779 - DNA, 1560 bp, Enterobacter cloacae
atgcgaacccgacatctggtcagcctggtgacaggcgtactgatcttctctgtgctggtccctgtgtgcctcagtatctggctggcgcatcgtcaggcagaggcgaaatttgtggatgcactggacagatatgcctcgcgcgtcctgatccgtaccgacagagtcgttgcgcaggcaaaacaggcgctcacgcacctacagttgttcaacgccccgccctgcactcctccgcacttacgcgaaatgcgtcgtgtcgcgttctcatggcgctatattcaggaagtgatgtatatcgataaccagaagccgctctgctcctctctggaacaatccagtaatacggcgatcttaccgcccccgatgcggatcaccgcagacggatatagcgcgtggctcacctcgcaaaacgacctcggcattcaccgttatatgtccgttctggggaaaggacattatctggtaatggtcgatccggcgtcgcttgtggatgttgtcccgttcggtgacatttcgatggatgccgccctggtgggaagcgaaacccatcggatatttgccagaagcaatattctcgacccgtatattctttctgtcgttaaggagcagcaggacgttaagcgcgtgcaatacaacggctcgatgtacgtgttgaaaccggtgccagaactggggcttacggttattgcctgggcatcgttaaaaccgctcgcggcatcctggcatcagcagctgatcatctggctaccggcaggcatactgataagcctggttgcagcccttattgtgcttcgcatcctccgccgtttgctttccccgcgtaaccggctgatcgacgcgatcaacaaccgggagatcgaggtttactatcagcccattgtggcgctatgcagtggaaaactggtgggtgcagaagcgctgatgcgctggccgcagccagatggcagtgacctgtcgcctaatctctttgttcccctggcggagcagacggggcttatttcaacgctgacacagctggtggtgaataaggtgtttgaggatttaggtgcctggctgcatcatcacccggaactgcacatttctgtcaaccttgcaccatccgatttaacgtcccccgagctgcctcgcctgctgagtcaattgctcaacaaatggggcgtccacccgcgccagatcgcccttgaattgaccgagcgcggctttgccgatcctgccgtcagcgcccctgccatcgctgcgtttcggcgctccgggcatgccatctacattgatgattttggtacgggttactccagcctgagctatttgcaggatcttgatgtcgataccctgaagattgataaatcctttgtggacgcgctggagtataagaacgtgactccccacatcatcgaaatggccaaatcgcttaagctggcgatggtcgcagaaggcattgaaactgaagggcagctcgaatggttgcatcgccacggcgtgcagtacggacagggctggtatttcagcaaggcgctgcctaaagaagatttcattcgctgggccgagcacaacctcaggaaataa

SEQ ID NO: 118780 - DNA, 381 bp, Enterobacter cloacae
atgaaatgtggaatcaaagcactgttaattacactggctattgccacttccgggatgagtgcgggcgcgctggcggcgtcgccctcggctaaagcgcaggctgcacagaccaaaacagactcagctgcgcaggcttatacgcaatcaaaagcgactgaggccggtaaaagtgcagaggatgacggtacgcgagtcagcatcaattcggcatcggcagaagagctcgcgcgcgtgatgaacggtgtgggacttaaaaaagcccaggccattgttagctaccgcgaggagtacggtccttttaaaacccttgacgatctcaagcaggtgccgggtatgggcagcgcgctggttgagcgcaatctcgcacacctgacgctgtaa

SEQ ID NO: 118781 - DNA, 1362 bp, Enterobacter cloacae
atgaacgattataaaatgacgccaggtgaactgcgtgcgacctggggtttagggactgttttctcgctgcggatgcttggcatgtttatggtcctgcccgttctgaccacatatggcatggcgttacagggtgccagcgaagcgctgattggtctggcgatcggtatctacggcctggcgcaggcgatattccagatcccctttggcctgctctccgaccgcgtgggtcgcaaaccgctgattgtcggcgggctgctggtgtttgtacttggcagcatcatcgctgccctctcccactccatctggggaattattcttggccgcgccctgcaaggttccggggcgattgccgccgccgtgatggcgctgctgtcagatttaacccgcgagcaaaaccgcaccaaagccatggcgtttattggcgtcagcttcggcgttacgtttgccattgccatggtgctggggccgattattacccattcactcggcctgcacgccctgttctggatgatagccgtgctggcaaccatcgggatcgcactcacgctgtgggttgtgccggacagtaaaaaccatgtcctgaaccgtgaatccgggatggtcaaaggctgcttcagcaaagtcatcgccgagccgcgcctgcttaagctgaacttcggcattatgtgcctgcacattctgctgatgtccacctttgtcgccctgcccggtcaacttgccgcagcaggtttcccggcggcagagcactggaaaatttatctggtcacaatgctgatctcgtttgtctccgttgtgcccttcattatttacgccgaagtgaagcgcaaaatgaaacgcgtcttcgtgggctgcgtggcgttactgttgattgccgagattgtgctgtggggcgccggcccacatttctgggagctgatcgcaggcgtacagctgttcttcctggcgtttaatctgatggaagccctgctgccgtcgcttatcagcaaagagtctccggcaggatacaaaggcaccgcgatgggcatttactccaccagccagtttctcggcgtggcgatcggcgggtccctcggcggctgggtggacggcctttttgattctcagaccgtgttcctcgccggtgcgctactggcgatgctctggctgtttgttgccagcaccatgaaagagccgcgctatgtgagtagcctgcgggtggaaattcccgatgacgtggcaatcggtgacgcgttacaacagcgtctggaagcgacagagggcgtgagcgaagtgctgattgtcccggaagagcgcagtgcgtatgtcaaaattgacagcaaagtgactaaccgctttgaggtagagcaggcgctgaaggcctga

SEQ ID NO: 118782 - DNA, 975 bp, Enterobacter cloacae
atgcaatacacgacattaggaaaaacagacctcaaggtgtcccggctttgcctgggctgcatgacgtttggcgagcctgaccggggaaatcacgcctggacgctgccggaagagagcagccgccctatcattaagcgcgccattgacggcggcatcaacttcttcgataccgccaacagctactccgacggcagcagcgaagagattgtgggccgcgccctgcgagattttgcccgtcgggatgagattgtggtcgccaccaaggtgtattacccgtcaggcgatctggcggaaggcctttctcgcacgcaaatcctgcgctccattgatgacagcctcagacgcctgaacatggattacgtcgacctgctgcaaattcaccgctgggattacaacacgccgatcgaagagacgcttgaagcgttgaacgatgtcgtgaaagccggtaaagcgcgctacatcggcgcatcgtccatgcatgcctcacagtttgctcaggcgctcgatctccaggcgcagcatggctgggcgcgctttgtcactatgcaggatcactacaacctgatctaccgggaagaagaacgcgagatgctgccgctctgctaccaggaaggcgtggcggtgatcccgtggagcccgctggcgcgcggaaggttaacccgtccgtggggtgaaactaccgcccggctggtatcggatgaagtaggtaaaaatctgtatgacgatacagaagccagcgatgcgttaattgccgaacgattagccgggatcgccgacgatatcggtgcaacgcgcgcgcaggtagcgctggcgtggctgctgagcaagcgcggtgtcgccgcgccgattgtgggcacatcgcgggaagaacagctggacgagttgttgagtgcggtggacttatcgttgacgccggagcagattgccgagctggagacgccgtatcagcaacatccggtggtagggtttaaataa

SEQ ID NO: 118783 - DNA, 540 bp, Enterobacter cloacae
atgacaagacgttacctgaaaatagtgctggttgggagcctgttcacgctcagcgcctgcgcacagcaaagtgaagttcgcgagatgaaacaaagcgtgaatacgctcaatgtggcgatggacaaacttaataaagaaaccgtgaagatcacccagcagaacgcgctgaatgccaaatccagcaatggcgtttatttattgccgggcgcaaacacgcccgcgcgtctgaacagccagattggcacgctaaggatgtctctggtgaatgttgcagcgaatgccgatggtacgcgcgcaacattacgcattcagggtgaatccaacgatccgcttcccgccttcagcggcaccgtagagtggggccagattcagggcaccacggagagctatcaggaggtgaatgtgaagaatcagctcttcaccgcccccgccagcacgctggcaccgagcgatgttgatatcccgctccagctgagcggactgacgccagaacagttgggctttatccgcattcacgacattcaacctgccgcgcaataa

SEQ ID NO: 118784 - DNA, 2610 bp, Enterobacter cloacae
atggacgagctttacatccttggctgtttgttcctggtttttgcgctggtcgtggcccccgtgcttgcggtgataggctttaatcgaagcacggcggcgcggcaggagatcgcccggcttcgccagcgcattgaggcgcttgagcagcacggtgtagctgagaaagcgccggagccggtgcagaccgccgcgccagtggagacaccagcgctggtgccagaggccgttaacgcacctgtcgatccctggcgtcccgaaccgcccgtcactgaagcagaacctgcgcctgtcccggcggcaaaacggccttccgcctttggcggcatcctgtcctcgctgacgcgctggtttatgcagggcaatccgctggcaaaactggggattgtactgctcttcctcggcctctctttcctgctgcgctataccgttgaacattcactgtttccgcttgagctgcgtcttgccgccacggcgctgtttgccatggttctgctggccgttggatggcggctgcggcacaggcagcggatctacgcgctgatcctccagggcggggcgaccggcgtgctttacctgaccgtctttggcgcattccggctgtggcagatgctgccgatgacgctggcgtttgcgctgctggtggtgatttgtgcggcgagcgtcgggctggccgtgctgcaaaaggcgctgagccttgccatgctggcgagcctgggcggatatcttgcgccgctgctcctgtctaccgggggcggtagctttgtggcgctgttctccttctatcttctgctctccatcggcattctcgtcatcagcatctggcagcactggcgcgagctcaacctgctcgggctgctcttcacgtttggcgttggcggagtgtgggggctgagcaactaccagcctgaaaactatgttatctgtcagctgttcctgattgccaatacgcttatttttggcgtgtttagcgtagcgctgtcgctgcgggcgcaggaaaaaggcaaacagattattgacggcgtactgctgtttgcaccgccgctgattggttttgggatgcagtacggcatgacgtcgcactggacgtacggcccggcgctcagcgcgctgggttatggtgcgttttatctctcactggcgttcctcgcgctgcgacgttacccctccattgggcgaccactgattatggcggcgctggcgattggcggcgggtttgccacgcttgccattccgctggcgctttcggcgcgctggacggcgatggcctgggcgctggaggggctgggtatcctctggctgggcgtgcaacagcagcagcggcgtatgagctatagcgggacggcgctgctggtgctggcgctcggcagcgcgatatgggcgcagatggacggcgtcacctccctgagcctgctgcttattttcgcagtgctcagtctttgctgggtggctgcggcctggctgtggcgaaaaatctctctgccgggtagttgggcgctgctggtcggtgggctgctgttctggttagtggcgcaactgggtgcgtcgcaactgatcctcaagacagaattatcggttctggcgggcgtgctggcgctgacggcggcgtcggcctggggatggcggcaggctgctgctcgtctggcatggcgggagctggatgccagcaaatggctgctgtggccggtgatgctgctgatggtgctttatcaggtctggcaacagcagatcctggcagccggctgggcaaatctggcctgggctattgcgctgcctgccgccctgatgctgttgcggcgcgacgaagataaacttcttccgcgcatcgcaatggggctgcatctgtcgctgttgtggatgattttactcgccatggccgccgagctttactggtttgcccgctccctgccatggggcatggcagcctggggaagcggcattgcgatggctgtcggcggtggggtgattatggcgctctccgcggccgtacggcgtcgcgggtggccgttccgggtatggcctgcgctctacgcctgccttgccgtgatccctgtggttgtggcgctggtggtattgctggtcgtgactaatttccaggacggggtagtctatcgacagacctggctgccgctggtgaacccgcttgaggaaggggcggcgttcgcgctgctggggctggtggtgttttatcgggcagtggatcgccactatccggcatcgcttgcgcagtcccgaccgtggtccgccgttgtgctgatggccctgggtttctggtggctcaacggcgcgctgctgcgcgcgctggcgtggtacggcgaggtggcctggaacatggagtcgctgtggcattcgcggcttatccagaccacctttgccctgttctggatgttctgcgcgctggtggtcatgatccgcgccacccgtcaggcctcccgtcagcagtggcttgccggtgcggtgctgctgggagtggtcatgctcaaactgatgctggtggacagcgcgggcggtggcggcctggcgcgtgctgtcgcgtttattggcgtggcgatcctggtcctgattgtgggctatttctcgccgctaccgcctaaagcaggagaagaaaaatga

SEQ ID NO: 118785 - DNA, 1332 bp, Enterobacter cloacae
atgaaatgcaataacaggatgctcagattatctgcttccctgaccttaatttcactggtggtgacagcggctcatgcaactaacggtgtggtaggaatatctcccgttgcggcagtgacgatgaaagaaagtattcttttcgctcttgaccgcgacccgtcggtgagtcagcaggctgcacagctggggattggccaggcacaaatagacgaagcgcgtagtggctggatgccacaaatagccttgaacgggagtacgggtcacagccagaccaccgattcgagcggctcgttgcgaaattccgcagcctgggggctgagcctgacgcagcttgtgtacgattttggcaagaccaataacagcatcagccagtcttcagctcagcgtgacagctatcgctaccagctgatgagcacgatgtctgccgtcgcggaaaaaacggccctcagctatgtggaagtgaaacgctacagcgatctgctacaggcggcaacagagaatgtgcaggcgcttaaaaacgttgagcagctggcaaaactccgcgccgatgcaggcgtaagctccacctctgatgagcttcagacccgcacccgtattgccggaatgcaggcgacggtagagcagtacaatgcgtcactgaacagcgcccgcgcgcggctggcggtattgactggcatacagactgaacgctattcaccggttccgggaggtctggccgtggagccggattctctcaatcgaattgattattcactgatcccaacggtgatggccgcgcagaacatggagcgttcagcccagtacggcgtagaaaccgcgaagtcacagcactggccaaccttaagcctgaaagggggccgcacccggtacgagtctgataatcgcgcgtactgggatgatcagatccagctcaatattgatgcaccgctttatcagggcggcgcggtctcggcgcgcgtccgtcaggccgagggcgcaagggcaatggcatcgtctcaggtcgatcaggcccgttttgatgtcctgcaaaaagcctccgtcgcacaggccgactggaccggggcgcaaggacgtatggaggccggaaaacgtcagctggaaaatgcgttgcgcgtccgcgacgtctacaaaaatgaatataccctgagcaagcgcagcattaacgatctgctcagcgtggagcaggatgtctggtctgccacctcagcgaaaataatggctgaatacgatggctggagcgcggcgattaattacgcctccgcggtggataatctcatgccgcttatcggaatagagaaaaacgctgccgcgaaattacctgatttgagttaa

SEQ ID NO: 118786 - DNA, 2166 bp, Enterobacter cloacae
atgaagacacatccacagtacgaaccctggttgcagggcatgctcatcatcgcgaaatattatcggctggatttttcggcggagcatgttcgggtcacgattaaacatgaaagccagtcttcgcgccagctggtgctggaggagatggcgcgccagcttgggctggggatgcgttgggtagcggcggaagccgtatcgctcgacccgtggcgcttaccgctgctggcggagttcaccggcgggcaaatcgcggtcatcaaccgtatggacaacgaagggaacatcagcgtgcagttcagcggcgacggcggcctggagacgacgctgacgcgtgacgaactcggttcgcggttaaaagggctgatggtgctgcgtcccctggagtccacgccggatgcgcgcgtggatgattacatcaaaccctatgagaaaaactggttctggcagttggcgctgaaagactggcgtcgctacagcgacattatgctggtggcgctggtcgccaacgtgctggcgctctccggcatggtcttttccatgcaggtgtatgacagggtggtgccgtcccagtcggaggccacgctgtgggtgctgtttgggggcgtgatgatcgctatcgtgtttgaattcatcatgcgcatgctgcgggtgcatatttcggatgtggtagggaaacgcgccgacctgcgtatttccgagcgcgtgtttgcccacgccctgcggattaaaaacggcgcacggtcgaaatcgaccgggtcgtttatcgcccagatccgcgagctggagtcggtgcgggagctgatcacctccaccaccattgcagccatctccgatctgccgttcttcctgctgttcgtcttcattctgtggatgattggcggcccgctggtgctggtggtgctgctggccgtgccgctgctgctcattcccggcctgctggtgcagcgcccgctgggaaaactctccagcgaagggatgcgtgaatcggcgattcgtaacgccacgctggtggaagcggtgcaggggcttgaggacatcaagctgatgcgcgccgagcagcggttccagaaccagtggaataacaccaatgacgttgccgccagcgtcggcatgaaacagcgctggctgacggggctgctgctgacctggacccaggaggtgcaatctatcgtctacgccgtggtgctgctggtgggctgttacctggtcatcagcggcgacatgaccaccggtgcgctggtgggcacctcgattctggcgtcccgcaccattgcgccgctgtcgcagatttccggcgtgctctcccgctggcagtcagcaaaggtggcccgcaagggactggatgacctgatgcagcgtccgattgacgatccccagcacggcaaaaaagtgcataaagcccacctgcgcggtgattatcagctggacgacgtcgggttttattacgacgaagaagagaagctcaccgtgctgaacgtcagcaaactgcgcattcgcgccggggagcgcgtggcggtgctcgggcggaatggctcggggaaaagcactttgctgcacctgctggcgggaatgcaggagccacagcagggcagcattttgctggacgatattgctctcaatcatcttgacccggctgacgtacgccgcgatatgcagctgctcagtcagcaggcgaggctgttcttcggctccgtacgcgacaacatcctgatgggtaatccgctggcgacagacgaggaaatccatcaggcgctggtcaatagcggcgcgctggagtttgtgcgcaagcagaaaatggggctgaacaccatcatcaacgagggcggaatggggctttccggcgggcaacgtcaggcgctgctgctggcccgcgcgctgatcacctcgccgaatattctgctgctggatgaacccaccgcctggctggatgaggtcagcgagaagcagtttatccagcatctgcaccagtggctcggtaagcgccggacgctggtggtggcgacgcatcgtctgccgattctggacctggttgaccgcatcatcgtgctggaaaacggcaaagtggtgatggatggccctcgtgatgccattttacgccagcacgggatggccccgcagcaggcgccgcagcgcacggttaaactgaaaacggagggcgtggcatga

SEQ ID NO: 118787 - DNA, 1458 bp, Enterobacter cloacae
atgtctcaaaatttaccttctgtgcaaggtacttgctacaagcaacggtttgttatttcagcctgcggtttcacctttgaagggtatagcctgcttctgaaatctcgaggcgtacacgccacgcgactccattttgaagaggatgaaatatgttccgttgacgttgaaaaaatgatggaaaatcaatcgcccgaggtttcggttttccttggtcgtgacgttgctacttttcttgaaagcctgaagcgcttggtatccgttctgaatgcactgccagttatttgcagggtcaccctgtatggtgcactacctgagcgatggcttaatgcaacgttgagaagtctcgttaataatacaaaaaagctttccacgatcagggtagagaatattacagaaataatgggctttgtaaaaaatgagacagatgagcgtgctggcccttcacgcttgttgcgtaacgtaccggacaaggagggtaaagaaaatttgcatgggttaacacatcgcgagttaaccgtgctactgaatttctatcggggtatttccataaaagagcagagtaagaggttagggctgtcagataaaactatttatacccatcgcaaggtgggtttgggtaaattatatattatcagagtatggtttagcgactctcgcgttttcagagatgaggtttgtgcagtaaaaaataaaacaaaagtgttttcggaaacggaaatagatatattacaagcgttacataaacgggaaatctttgcggtttatcaaattatcactgatagtgataaaaaaggagttggatttgaaatcctgctgcgctggcataaaaaaggtgagatcctgaagccagcctattttctgggagggataaaaaatagtgaaatatggctcaagctaacagcgttagtcatccatgcggccgtatcaggtatcaataaatacaatggaaaatattatttttcagttaacattcctcctcaacttgcttcgggaaacgcgctgccggggatggccaaaaaggccgtcgaaatgttactcaaaccgcagtgggccgggaaactagtctttgaactagctgaaacgattgacgtaacaaaggataaaaatattcccgaaacactccagcgtttacgcgccgagggatgtcggctttttctggatgactgtttttcaaaatatcatgctatgttgcccatcagactgattaatgttgatggactaaagcttgatcgcgatattgttgagcactttgtggctaacgacaaagactatagcattattaaagcgatacaggtttacagcgacatgacggggaccgaatgcgttgcggaaggcgtcgatagcgaagaaaaatttgaaaaacttgtcgcgttaggggttaagcgattccagggttattatctttcccacgcggttaaagaagaagagttggatcgaatggtacggctatttagttaa

SEQ ID NO: 118788 - DNA, 606 bp, Enterobacter cloacae
atgattgtactaaagagctttttattctttgttggcgcggcggtcgcatgcgcgcttattatactttgtctttgggttgatatgcggtttgtcggccatgatattccggaattatcactgaccgaaatcatgcaggaaacggtattagcgactatcgtgtttctccattttcgtctggcgaaaatggatgaatccatgcgttactgtaatatactggttggcggttttttcctgacgatgttaattcgtgaactggacgcgctttttgacctcatttctcatgggagttgggtgtggttcgcgctgattaccgctctgctggctataattcgccccgttatgcattttcgcactaccctggaacagctggcaaaatacacgcaatccccctggtacggtattctgttgagcggcctgctggctgtactggtcttctcccgtctctttggaatgcaagtgctgtggcacgccattctggagcatggctatatgcgtgtcgtgaaaaacgccgtggaggaaggttcggaatcgttcggctatatgctgtgcctggccgcatcccttggctattacattacctttcgcgctaacgcacgagagaaatag

SEQ ID NO: 118789 - DNA, 435 bp, Enterobacter cloacae
gtgaaaagcaccagtgatctctttaacgacataatcccactgggtcgtcttattcatatggttaaccagaaaaaagatcgcctgctcaatgactacctgtcaccgctggatatcaccgcaacacagttcaaagtgctgtgttccattcgctgcgaagtgtgtatcacgccggttgagctgaaaaaggtgctctctgtcgatctgggtgcgttaacccgcatgctggatcgtctcgtctgcaaaggatggatagaacgaagccctaacccgaatgacaaacgtggcgtactggtgaaactgaccagcgatggcgcggccatgtgtgagcaatgtcatcaattagtaggacaaacactgcaccaggaactgacaaaaaacttaacggcagatgaagtggcaacgcttgagcttttactcaagaaaatcctgccgtaa

SEQ ID NO: 118790 - DNA, 789 bp, Enterobacter cloacae
atgcaggagattgatttttatctggtagatgcgttcagcgagtcctcctttggcggcaacccggcggcggtgtgcccgctcgacgcgtggctaccggatgagacgttactgcggatggcacaacagcataaccagtcggaaaccgcgttttttgtgtgcaccaaaggggggattgagctgcgctggttcaccacgctcaccgaggttaatctgtgtggtcacgcgacgcttgccgcggcgtatgttctgtttaacgaactggattatccggactcacgccttcattttgacaccgcttctggtcgcctgaccgtcagccgtgaaggtgactggatgacgctggacttcccggcctgcccgacgcaggcacagacgccgccaccggagatgctcaccgcactcggtatcagccactacgtcgaggcgcgaaaaggccgcgcctgggtgctggtactggagagccgcgagcaggtggaagccattaatccggatttctccgccatgacgccgggggagcataaagtggccgtcaccgcccgggacgagggggaatacgactttgtcagtcgtttcttctcgccgggcgtggccgtgccggaagatcctgtcaccggctccgcgcacaccatgctgatcccttactggagtgaacagcttggcaaaacacagatgtttgcccgtcaggtttctgcccgtggtggcgacgtacgctgcgaactgaaaggcgaccgcgtgcggatgggcgggcaggcggcgctgtatctgaagggcacagtatttctgcgctga

SEQ ID NO: 118791 - DNA, 813 bp, Enterobacter cloacae
atgcaggaaattgatttttatctggtggatgccttcagcgacagggcgttcggcggcaatgcggcggcggtgtgtccgctggaagcgtggctgccggatgagacgctgctgaagatggcgaagcagcataatcagtcagagacggcgttctttgtccgaacggataacgggtttgaactgcgctggtttaccacgcaggatgaaattaacctctgcggccacgcaaccctcgcggcttctcacgttattttcgaatacctggattatccacatacggaaatcaccttcaccacgcgctttgtcggcgaacttacggtacaacgcagcggcgactggctgacgctgaatttcccggcgtggtcaaccgaggttgtcgatactccacccccagtgctgttcagctcgctgggcattaacgcggcaaaagaggtgcgtgtggggcgcgattacatggtggtgctcgacagccagcggcaggtggaggcgctgacgccggatatcacagccatgctcccgctggggaaaatggtctgcgttacggcgccgggggatgagtatgatttcgtcagccgcttcttctgcccgggggaaggggtaccggaggatccggtgacgggatcagcgcacagcatgctgatcccgtactggagcgaaaagcttggcaaaacgcagatgttggcccgccaggtctcctcccgtggcggggatctgcgctgtgagctgaaaggcgaccgtgtgctgattggcggccaggccacgctgtatatgaaggggaaaattttccttcgtctccaggattacggtcatcattaa

SEQ ID NO: 118792 - DNA, 513 bp, Enterobacter cloacae
atgttgaacgaaaacgacaaggagcctgccatgtattctattaccgctgaatccgcccatcatccagatattctcgccctgattacggcgctggaccgttatcaaagcgttctctatcccgcggaaagtaatcatctgctggatttaaccgaactgccggacgactcgctgatcctgatgattattcgtgacactcagcttaacgctgtcgggtgtggcgctgttgttttgaacggggacgggaccggggaaatgaaacgggtctatattgatccaacccatcgcgggcaacggctgggtgataaattactggcggcgctggaagatgaagccctcagccgctgctgccacaccgtccggctggagacggggatcaaacaacatgccgccattcgtctgtatcaacagtgtggatacgaacggcgccccgcgtttgccccctacaacgaggatccgctgagcctgtttatggagaagacactggtggctgacgttcgtttagcagccctataa

SEQ ID NO: 118793 - DNA, 1071 bp, Enterobacter cloacae
atgccctcatccgggctggtaaaaatcactcctcaatatgctggctacgtaaccaaattgaccgcctcagaaggtcaacacattattgccggtgagactctttatcatatcagcggtgaacatttcaacgaacagggggcaggtacactcgctgctataagactttccctacaaactcagtttacaatgctgacttctcaacagaccctggaattgcgtgacaacagtcagcagcagcatgccatacaacagcgaatagtttccctgaaacctcaggttaaaagtgcagaaaagcgtctgtcacttgccgtgcatcaggctgcgctggccgtgtctgttatggagcgctataagaaacttgctgatacgcattacgtatcagatatcgaataccagcagaagcagattgacgtttcaacgtcacagcaaaacgttgaggatcagcgtcaggggcttctgcaactgcacaccgcgatggaggctgctaaagacgaccttgaccatctcatcgttcagggtgaaagccggaaggctgaaatggacaggcagttgcaggttatcaggcaacagcaggacgaactggcaggtaaggaaaatttcacgctgacttcaccggtatccggaaccgttgctgccgtgctggtcagacagggacagtctgtcagggcatctgaacctgtcatgaccctcattcccgacaatgcccgtttgcagatagaactctatgctaccagtcagaatgctggctttattcaggcggggcagcgtgttgccctgcggttctctgccttcccctatcagaagtttggtgtgcagtacgggactatccgtgaaataagccatacaacgctgacatcttctgatttactctccgtatctcctgtgacctggaaggagaatgaaggtcattaccgcgtcatcgttgaacctgaaaatacttttattctggcttatgggaaacaggaagccctgcgccccggcatggttcttgagggggatgtcagcctggatacccgcaatttgtgggagtggctgactgagccgctctggagcctgaaaggaaagctgtga

SEQ ID NO: 118794 - DNA, 2208 bp, Enterobacter cloacae
atggatacactcaaatggaccgggagaaaacagcttcctctcacccgacagacagagtcagcggaatgtggtctggcatgcctggtcatgatggcctgctggcatggtctgcaaacagacttacccacactgcgcgaacgtttcagtatcagctcacaagggatgaccctgcagagactgactgaatgtgcggccggtatcggattatccagccgggcagttcggctggagcttgaggacctaagatccctttctctcccgtgtattctccactggaacatgaatcattttgttgtgctacataaagttcgcggaagcaggctggttattcatgatccggaaaagggaaaagtaacgctctccctacaggatgctggaaaacatttcaccggcgtcgcgctggagctgatgccagccagtgattttaccgctcgggatgaaaggaaaaaaatccatctgcgccaactgacaggtaaaacaccgggtctgttgtcggcaatgtcgcgaattatcgtttttgccgtggcactcgaaatcctgacactgggaagcccgcttctcaaccagctggtgattgatgaagtcctggtggctgccgaccagagtttgttgaccgtcattattattgcgcttctgctgatgtcactgacccagatgctgctgtcactggcccgccagtgggcgagtattacactgtccgtcaattttaacatgcagtggacagcacgggttttccatcatctggtccatcttcctctggcctggtttgatgcacgcagtaaggggagtattaatgctcgttttgaggcggtagataccatccagcaggcgctgactacgcaagtgctggaaggtattctggatgtgttgctcgtggtgactgcgctttgcatgatgctgctgtacagtcctgaaatgacattgatcgccgtacttgcagccattttctatggtgtgttgagggcactgtggtatccgtcccttcgacagtcggcagaagatgcctgggatgcaggtgccaaggagtccgggcattttcttgaaacactcaacgggatcctcagcctgagaattaacggtgtgacggcacatcgtgaggccgcctggctgaatctcaacgttgcccgcagaaatacgcagttgcgtcagagccgtctgctgatgtgctatgacattgctcacactcttaccggcagcgtggtatcagcaatcattttgtggaaaggcgccggggaggtattgaatggtaccttcaccgtcggcatgctggttgcttatttatcctatcagacgcgtttttcttccagtatcagtagcctgactgataagtttttttcctggcgtatgctcgatgtttacaacgaacgactggctgatattgtactgaccccgacagaaggccttcagcaacagccttttcgtgagcataacaacgcttcgcacattccttctgtatcccgcagggagatggatgaatatgctcatgctcctctagtacttgagcacatcatcttcagccacaagggaggggaaaatccgataatcggcggggtgtcgctgacactcaatcccggagaagtcgttgccattacaggtaaatccggatgcgggaaaacgacactggtgaagcttatccttgggatccacatccctgatgagggcaggatcagggcatttggcatattgcatacgcatccggattattttcaggttcgtcagcgtatcggtaccgtactgcaggatgaccatcttttcaaaggttctgtagcagataacattatttttttcagtgatgaccgaaattataaacgaatgatccagtgcgcaagactggcacttatcgacagcgatgttatggcaatgccgatggggtatcagacgctgattggtgaaaccggcggagggctttccggaggacaaaaacaacgcattctgctggcaagggcgttgtacaagaaaccgggattcctgttactggatgaagcgaccagccaccttgatgttgagagtgaaatccggataagccagaccttacgtcaactggggcttcctgttctgctgatagcccatcgcccggaaaccatagcctctgcagaccgggttttgtatctggcagacggctacttaacggagctgaatctccagcatacagtcaataatggcgagtctgtttgtgaatatactaatgacgtgatggcaaaaaattaa

SEQ ID NO: 118795 - DNA, 741 bp, Enterobacter cloacae
gtggagcatattgatcacatccttgtcgtcgatgacgacagggatattcgtgaactgattgtcgattacctcgtgaaatccggctatcacgcctctggtgcggcgaacggaaaagagatgcgcatggtgctcgacaaacagcatatcgacctggtggtgctggacgtgatgatgcccggtgatgatggcctgacggtgtgtcgacagctgcgcagcagcaggcataaggatctgccgatcctgatgctcaccgcgcgcaacgaggacatggaccggatcctggggctggagatgggcgccgacgattatgtggtaaaaccgtttgtggcccgcgaactgctggcgcgtatcaaaactatcctgcgccgttttcgtactatgccgcctaatcttcaggtgaccgaggcagggcgcctggtggtgttcggtgaatggcagctggataccgtggcgcgtcatctgattgataacgaggggatggttgtggcgctcagcggggcggaatatcgccttctgcgtgtatttctcgatcatcctcaacgggtgctgacccgcgatcaactgctgaacctgacgcagggacgtgatgccgagctgtttgagcgttcgattgatctcctggtgagccgcgtgcgacagcgcctgaatgaagatgcccgctcgccagcctacattaaaaccgttcgcagcgaaggctacgtttttactatgccggtgaccatcgtcgaggccaatgaatga

SEQ ID NO: 118796 - DNA, 231 bp, Enterobacter cloacae
atgtttctgataatcgcttttttaggcggcatgattagcctgctcagtccgtgcacgcttcccgttattcctctgctgttcgccggctttcaggggcagcgcaaacacattctggcgcttctggcgggaatgatagtgatgttcacgtttgtggcgatggtagtaacggttgccagtgactggatcgctgacgccaccgttatcgtcgctggattgcgctgctggtactga

SEQ ID NO: 118797 - DNA, 852 bp, Enterobacter cloacae
atgttttcggcttttctggcagggctggccgttggacttctgtggtccccctgtgcaggaccgattctcggggcgatcttcggcattaacattactggccactcggccatcgcaaccggagcgctgttagccgcttacggcagtgggtgcgcgttgatgctggggctgcttgtcgcgggtggccgtaagctgataacccctctgagagccaaatccgcattgatggagcgtctgcgtcagggcgcaggggtgatgatgttagccgccgtggctttcaacgcctcaggaatgacgtcggtcctgaaaggcgccagcggtattaccgaccagctggaaaacgctctcttgagccttgcgcaaccaacctccacgcaggtgaaactgcgaccgatcgctgacgcaatgccgagcagccagctaccgacattaagcggcggtacgggctgggtaaacggtgaccctgtcacgtctaaggccttgcgggggaaagttgtgcttatcgatttctggacctgggactgtatcaactgccagcatacccttccgcatgttcgagactgggcgaagaaatatgagtcacaaggtctggtggtgattggcgtccacacccctgaatacccctgggaaaagccgttatcatcggtgaaaaacgcggtcaacgaatggcagttgccgtaccgcgtagtgacggataataactacaaaatctggagcgcgttcggtaatcagtactggccagcacattactatttcgatgcgaaaggacaactgcgttacacctcgtttggcgaaggcaactacgacaagcaggaggctgtaattcagcatttgctcaaggaagcgcgttcctga

SEQ ID NO: 118798 - DNA, 1293 bp, Enterobacter cloacae
atgaaagcgatctccattctggcgtatggcgcggacccaaccgctcaacgcctggcaacgtccgccattcagcaggccataaaaagtgctcaacagaacgatgtcatcgttattccgcaaggccgttttctgaccggagcgttgtttctgaaaagcggtgtttcacttcgcctggacgctggcgcacagctcgttggaagccaggatctggctgattatcccctgataaatacccgggtagccggcattgatatgcgttggccggcaggcattattaatatcatcgattgtgaaaacgtcagcattaccggtacaggcacgatagacgggcagggtgcaatttggtggcaacgctactggggcgatgacgagcgcagcggcatggtcggcgattacagcgcaagaggattgcgctgggttgttgattatgactgtcagcgcccgcgcaatattctggtctttgaaagccagagcattctgctgcgtgattttaccagtcgggagtccggattctggaacatgcacctctgttattcgcgccatatcgcggttgagggcgtgcaaatcagcaattctgcggggccgagcaccgacgggattgacgtcgactcctgcgaacaggtgcggattgaacgctgcattgtgtcctgcaatgacgacaatatctgcatcaaatcaggacgaggacgcgaagcggcgcaaaaagctcgtgccgcgcgggatatagtgattcgaggatgtacgctgaataagggatccgggatcacactggggagtgaaacttcaggtggcattgaacgcgtcctgatagaagataacgcgtttaacggaacgggcgtcgggtttcgcattaaatctgctcgcaaccggggcggatttatccgtgatatcaccgtacaaaatctacggcttacggacgtgcgttttccggtgctgatccagctgaactggtttccgcagtatagctatggcgaccagagcaatttatctgataaaccagaacactggcgcaaactggctgaaggtgttgagggcgaagccggtcttactgcggtcagcggactgacgattaaaaatatgacggcgcgtcgatcagacagcaaatgcttttcgcgggcatttttcatcgagggatatccggagcgtcctgtggttgggttaacgctggaggggattttgattgacgcgtcagagttcgggaaaatttctggtgtggatgggctgcgctttaaggatgtacaggtgactgccgtggagatcacgcaagaccgtaacgactgttatgaacgttga

SEQ ID NO: 118799 - DNA, 750 bp, Enterobacter cloacae
atgtccgaacccgattttaatttgctgatagcactcgacatattgctgagcgaagcgagcgtggcaggcgcggcacgtcgtctgaacctcagcacctcggcaatgagccggacattaagcaggttacgcgacgtcactggcgatccgattctggtgcgcgccggacgtaacatggtactgaccccgtgggccgaagcgacccgggaccgtgccaggcgtgcagtgcacgaggccagggcggtattacagccctcaactgatacgttcagcgcgcgaagtctggcgcgactttttaccatcagggcaaacgatggttttgtggtggcgtttgggcctgcgcttatagcggctgtggccgacgccgcgccggacgtctgtatacgctttgcgcctaagccggaaaaaacgtcgcgctatcttcgggaagggctggttgatctggagattggcgtccagagtaatatggggcctgaaatacggctgcaacgactgtttgaggatcggtttgtgggcgtcgtgcgtaaggggcatccgctggctaagcaggcagaaataggggttaaggattatgtcgcctggggccatgtggtagcgtcacccgagggtgcactgcacggatccgttgacgatgcgctggccgaactcggaacaaaacgtaaaatcgcgagcgtcgtaccgggatttccgacggcgctgtccgtggcggtggcatcggatcttatcgccatgatacccgctctcaaagaataa

SEQ ID NO: 118800 - DNA, 1389 bp, Enterobacter cloacae
atgatgcttttttccagccaacccggggacgatggactgcctggcccgacgcgcgcacgggtgatggccgcgataatgaccaccacgttaatgggcgtgtttgatggcaccatgatcaacattgccctgccctccatggctcagaagatgcaggtgccagccagttatgccgtctggttcgccaacgggtatctgctggcggctgcaatgacgctggcgatattcgcggcgcttgcggcccgcctgggttatcgccccgtatttctggcaggcctgacgacctttaccctgacatcgctgggttgcgcgctggcgaaaacgcccgaagtgcttatcggtatgcgcgtgcttcaggggatcggcggcgcagcgacgctgagtattgctcccgcgatactgcggtccgtatttcccggacgattgcttggccgcattctgggtttgcacgccctgctcatcgcctccagctccgctatcggcccggtattgggcggtacgatccttcacaccctgagctggcaatggctttttgcgataaacgttcttcccggcaccctcgccttgctgctggcggtcaaagcgctgccgcgggatgcggttcgaaagcaagcgccctttgacaccctgggcgccatattgtcggcgctgctgttgggttcgacgatcgtggcggcgaacagcctccatgatgctacttatcacacaggtagtctttgctggacggttctcgctgcgctgagcggcatggcttttatctggcagatccgccgcacggataaccccttactgccgccagccatattcaaaaatgaacgttttaccctcgcggccctaacgtcgatgattgcttttgtcagccagggtatcacctttattgcgctacccttcctgtttcagagcgaatacggctacagtccggtgatttctgccctgctatttacgccgtggccgctcgggatcgtgctgattgcgccgcatgcaggccggtgggcggacacgatttccgccccggtgatttcaactctggggctgatgatttttgtcgtcggtttgattctgctggcaacattacccgccagcccttcgatgtgggatatctgcctgcgaagcctggtttgcgggatgggatttggctgctttcagagtcccaataaccgggaaatgctctcaaacgttagtcgtgactatgcgagctatgcatccggtgtgttatccattatgcgcacgttcgggcagtgtctgggggccgccgctgtgggcgtactgctggcgacaaatgagagagcaattcatgctgcactgtggatcgctgcggcggcttctgcggtagcggtcatcgtcagcgcgagccgactgcgtaaaatcactcatcctgcggaaacaggctga

SEQ ID NO: 118801 - DNA, 558 bp, Enterobacter cloacae
atgattactaaacggtctgagccacgcttttcagtcattctgttaatttttgtgtgtcttgtaggattatattcttttaacggtcaccttaagcctcacgccggacaaaaaggggttgcatgtatttcttacaagcggatcctgcgtgaatcaccgttactggcacaggaaaaaaagcagaacgaaatacttctcgcattagctaaaaaatccgcgcttgaagttgagaaaaaatattatgctctgccagaacccttgcgccgtgaaatgaaagcgatcgatgatatgagtaaaaacacgcaactgcgggcagagcagggtcgcctgcggcatataagccagcgagtcatttctgataccgttgaaaaatacagaatagatcatcactattcagtcgttttcaataaagatagcgcctctacagtggattatggtcacgacatcagtaatgaaatcattaatgaattacagcatgtaaaagtggtgtacgggccgcgccctaattttgaagatgcgacccgggagcttttgctcgctcagcctgtttccgcaggatga

SEQ ID NO: 118802 - DNA, 1137 bp, Enterobacter cloacae
atgtcaaaatatttatattatctggtgttattgctggggccagtcccactattaagtcatgcagcctgtaaccgggataacggcgatgatgttaccgttacgacgatcccattaccctcgaaactgttggtcagtgcgaaaaattatacctttggcgaagtgttatacgattctggatatatcagcgggacggatggggatgtcacgattaaaaactgtagcagggattattacgtaggatttcattataacccgactcatttagcgtcggcgtcgccggtgggagataatatctacccgaccacgataccgggtatcggcattaagacctacacgcttaaccaggccggtccgtatgattatgaacgtgcggttgataactcatggcagtccggcgatggcgagagcagccatacgctggcgggctcggcctatcgtgtgcagttgattgcgacggggggtacaatcccgggcggtaatctggccctcgagagcggcaaactggcgacggtggaatttcgtgaagggcaaagcagttcggataacggtgataatgcgtcagaagtctatttgtcaaatacacagatagaagtctatgcgatgggatgctcagcatccgtttcttccctgctgtttaatatgggcgatgtggatacctctgcgtttgataatcttaagatggtggaaggacccgaacaggatgttggtctgagctgtcagccaggcaccaacgtgaccttgaccatcaacgggccgcttgccgagggcgacaacgatgatggttcagtgattgctttagaccagtctgaatcgggtacgacggcgaccggtgtgggggtcgtgatatcagcctatcaaccggcgctacgcagttttacctactgggccattggtcaggaggtgcaagcttttaattcaagtcgtgtaaaagccgcatcacaaggcagtgggcttgctgccgatggtaccgcgattgctgatatcggctccgcaacaacctatagcgatccggcaaatgcaggcggggccggagagtctgaaaccttacgtttcaaagcgtggtattacaaaaccagtgacgttgtcacgccagggcaagcaaatgccaccgggacaatcacccttaaatataattga

SEQ ID NO: 118803 - DNA, 579 bp, Enterobacter cloacae
atgtcacgcttcattattctccgttccggccttaaatcgctcatcggcccgggaatggtattcatgctgagcgtgtcgccggcaatggcgtacaccgatcgcaatgatattgagttccatgtcaccggaaacattattgatggctcatgtaacgtcaccaaaccggaggcagtcgacctcgggaaatattactggaaagactttgccgtagcgggggggaacacaggaaatgtgccagtgaccatcgcgtttgacagctgcaccgcagggttaagccaggcaacggttacctttacaggcgcaccttacgctgaagatccggcttatgcttctgtcatttacgccaatcaggtggcggcagatgcaggcggcgcgaccgatgtcggccttcagttgtttatccgtgatcacgaacatcccatcagcggtgtcgcgctggccaacggcgtgagctacccggttgcgctcgaaaaccaaaccggcgcgatgacttttactgcccgaatgtataccccacatgggaccccaacaccgggtgcattcagcagtgcgattacattgaatgttgtttataactga

SEQ ID NO: 118804 - DNA, 2583 bp, Enterobacter cloacae
atggaaaaagtgaaacaaacctacgtcctttctttagggctcgggctcagtgttgtctttagttctttcagcgcacgtgcgcaggaacatttcaaccctcatcttttggaaacagacagcgcagaagtgccagcaatggatctcagtctgtttgccaaagatgaggtaccgcccggggactataacgtcgacatttttatcaacggcaatctggtagacagtaaaaccctctcttttcgaaggttgaaaagtgcccctacgtcagaccgcacaggggcatgcttaaacgtcactcagctgaaagcctggaacgttcgtgtcgataactattttggcgaacaggaaaaagccagcgaatgtgtggatctgtatgccatccccggcgcggacgaaaaaatcgatctggcgcagcagcgtttcgacctgatcctgccgcaggttgctttatttaacaccgcaaggggttatgtttcaccggagcgctgggatgaagggatcacggcgggtttacttaattacagcgtctcgggtcaacaggatctgcatcagcgcaacggcaccgacagcagtaatcagtttcttagcctgcaaccggggctgaacgtaggcgcctggcgctttcgcaactattccacctatacccattccgaatccgaaaatgactgggattccgtgtatacctacgcctcacgggatattaaatctcttaaaagccagctggtgctgggacaaggaaccacgcgcggcggcatttttgatagcgtcggtttcaccggggtgcagatgtactcggataacgatatgaagccggacagcatgcaaggcttcgccccggtaatacgcggtatagcccgcagcaatgccgaagtgacggtataccagaacggtcacagcatttataaggctaccgtgccgccgggaccgtttgaattcagcgatatgtatccgaccggcagctccggcgatctgcaggtggtgatcaaagagtccgacggtacgcaaagtagctttattgtgccttacgccacgctgccggtattgcaacgtgaaggtcaggtgcagtatggcctggtggcgggcaaaacccgtcaggacgggtcgggttcacgtgcagaggattttaactttattcagggatcagcggcctggggcgtcggaaaagggatcacgctttacggcggctatattcaggcggaagacaattattccaacctgattgccggaactggttttaatatgggcagcgccggagcgctctcatttgatatttcccagtcgtgggcggatatcccgcagccggacaacatgcgacaacaggaacaccatagcggccagtcgtatcgcgtgcgctacagtaagacgcttcagcaaaccagcaccgatatttccgtcgccggttataaattttcaacccggggttatctttcgtttcaggacttcctcaatgactgggatccgggcaatagcactattgataatggccgggagcgaaaccgttttgatgtgacaatctcacagacgttgcctttcggcaccctgtcactgagcatgtacgacgcctcttactggaacagtgaacatgcggactccatgaacctgggcttcagcagcacgcttggaccggtgtcgtactcgctgaactatgcccactctaaaaacgtcaatggcggttacaataacgattccgataactacgacgacgataacgtcttctcgcttaacctgagcgtaccgttcagcgccttcagccacagtgaagcggcccggtctgtttcggctaactattcgatgaacagtagtaaaaacggcgataccacgcacaacatcggaatttccggtaccgcgatgcaggaaaaccagctgaactggcaggtttcagaaggctataacgccgattctgaagctactaacggcaatgtcactgtgggttatcaaagtacttatgccgatatgtccgcaggctatagctacgacgattacagccgacgagtgaattacagcctgcgcgggggcatggtgctgcatcgcgacggtatcaccctggcgcgtcagctgaacgatagcgtagcgctggttgaaacaccgggtgtttccggtatgccgatcaacgggcagacgaacgttcataccgattatttcggtaacgccattgtgccgtacgttcgtccgtatcacagcaattcgatctcactcaacacagtggatgccagcgatacttctgcggccattgataacatcgccaaaaccgtggtgccgaccaaaggggcggtagtacgcgtgaagtacaacacctggattggacaaaaggcgatgatgacgctgacctacaacggtaaaccggtgccgtttggcgcagtagtaacacaaaccagcggcgagtcggatgacacgcgcagcagtattgttggcgacggcggggaagtgtatctcgtcgggctcgccgggaaagggcggttaattgttaagtggggggaggcggcgaacaagcagtgcgccgttgattacacacttgccggcgcaaaaacagaggccgatattttattcatcaacggggtttgccatcccgtatcgggagcaaattaa

SEQ ID NO: 118805 - DNA, 684 bp, Enterobacter cloacae
atgaaacccatcgccgctgttattttttgcgtggccagcgccgccagcctgaacgcgtccgccagtattgttaccgggagtacgcgggttatttttgatggctcccgccaggccgcctctttgtccgttgaaaactctgacaaggttaccaacctggtacagtcgtggattagcccggctaaaggcagcccgttaaaaaaagaaaatatgattattacgccaccgctattccgtctggaagccgggaaaaaagcgtcaattcgtattgtgcgttcaggtttacctgttccggaagatcgtgaatcgctgttatggctgaacgtgaaagggatccccgctaccgacggtagtgaaggtaaaaatacgatgcaaattgccatcaactcaaagattaagctgatctaccgtccggcagcattacaggggcagacgccagaatccagtgcggaaaagcttaagtggaacctgaccgcgaagggtttacaggtcaataacccgacacctttttatatgaacttctcacgaattgaaattaatcaccaggcgttaagcggacagtattttgtcgcgccattctccacgttgagtatttctgaaggtgttatgtcacctcacggcaaagtaacctggtcgcttattaatgattatggcgtgaaaggtccggacaaagtcacctcatattaa

SEQ ID NO: 118806 - DNA, 528 bp, Enterobacter cloacae
atgaaactgactaaaattggtgcgacgcttattctgactttctgtggcgcgagcgcggcgacggcttctaacactatcacatttaatggaacggtgctcgatcagggttgtgatattgccgttgatggcggcacggcaaatgcgaccgttgatctgggctcaacggcggcaaccgacctcgctacaaaaggcgaccttggcgcgccaaaacagtttgtgttcgacctgaataactgcccaaccagcacgactgcaaatattgtcttctcaggccctgttgatgctgttgcagccgatccatcctattttgcaaacactgctacgctgggtgcggcaaccaacgtggccgttcagctcaagcagggcggctcaaatggtaccatcgtcaaaaataatgcagataacgatcctattactttcaccgatggcacagcgagtcaaacctataccgcgcagatgattgccaccgggcaggccgttgccggcgatgttaacgctgttattacctataacgtccgttataactga

SEQ ID NO: 118807 - DNA, 612 bp, Enterobacter cloacae
atgatcaacaaaaaaaacatgatcgcattaaccctttgtggcctgatgatggcaagtggcagtgcgctggcgggccttccttctggtgacagcgacaataatattaataccaacccagagaacgatgcggggactcagggcacgggcggcgtagtccattttaccggtaagattaccgatgcatcctgtaatatcaccaccgactcagcagggcaaaccgttgaattaggcacctgggctgcaagctactttgccacccaaaaagagaccacgcgcacgcctttccagatctcagttgaaggttgcccggattccgttaaaaccgttgccgtgttgtttgatggtaacaaagatgcgaatgataataccctgctgggtttaaattcttccgtggacagcgatggcaatacggcgactggcgttgccgttaaactctatgaaagcgatcgtaacacgcagattaaaattggtgatatttctcagagtatcgaccttgccgaaggggaagattcaaaaacactcaatttctacgccaattataatgccaccaccgatgtcgtcagcaccggagaagccgacgcagatgccaatttcctgatggtttataactga

SEQ ID NO: 118808 - DNA, 669 bp, Enterobacter cloacae
atgaagaaactcaccgcggccctgttcttttattcgctcggcatgagtctgtcagcacacgcgggggtcgtgatgggcggtacgcgtgttgtttaccttgaggggcaaagagaagtggcattttccattaccaatatggaaaaagaaaccccttatcttattcagtcgtggattgaaaatattgacagtaaaaataaaaccgctccgccctttatcgtgacgcctacgttatttcgtttagatgcggaacagaaaaactcgctgcgcatcaattatcttggaacgccattacccactgaccgggaatctgttttttggcttaacatcaaaaatattgccccgagcaaaaaagcaaacagcaacaaattgcagattaacgtgaagtcaaaattcaagttatttttccgtcccgcagggttgaaaggcaatgccgaacttgcctacaaaaaattaaaatttacctgtcgtaataatacgcttagcgcacacaacccctcgccctggtttgtatcgttttacaaggtcagcgttgtgaacaccgacgttgaaatgccgggaatgattgaccccttttccgatcgtcaatggcacattccctgctcggggaccattcgctggcaggcgatcaacgattacggcgggctgacgagagtcgccacgcaatcctga

SEQ ID NO: 118809 - DNA, 2505 bp, Enterobacter cloacae
atgcattctctcggcccacgcaatttaccccgcatttatacgctcgcgatgcttgcgggtgcggtcacgtctggcattcatgtgcgccgggcacaggccgatgagtacttcgatcctcaggcgctggagatcacagcagatcagcagcaggctagcgacttaagctatttttcccgacaaggcggtcagcagccgggacgttatcgtgtcgcggttgttgttaaccagacgcagcgggatgagcgcgaaattgcattcgttgataccgggggaacgctctcaccggtcctcaacctggcgtacctcaagagacttggggtaaacatcgcggccttctcttcgttcgatgcgctgcatgacgaggagacatttacggacatcggcaaatatattcccgatgcgtcgacgcattttgacttcacccatcatcggctggttttcagcattccgcaggcagccatgttgcaaaaaagtgccgattatattcctcccgtacagtgggacgacggcatccccgctgcttttgtcgattacaatcttacgggctcgacaaccaacatcgacaatattcatgacaacagcagctatctgagcctgcgatccggtatcaacctgggggcgtggcgtttacgcaattacgccacgtttgaatatggtaatacccatcactggcagtctcagggaacatccctccagcgggccattacgccgctgaagagcgcgttaacaatagggaatgcctacacgtctggcgaggtttttgacagttttcagtttacggggcttcagcttgcctcggatgagaatatgctgccggacagccagcgcggtttcgcgcccacgatccgcggggtcgctcacagcaatgcccgcgtcagcgttcgccagcacggttacaccatctatgaaacctatgttgcgcctggcgcatttgtcattagcgatctcttccccacttcgcaaagcggcgatcttgagatcacggtccatgaaagtgatggcagcgaacgcacgttcactcaaccctactcctcggtggccttcatgctacgggagaaacgactgaaattcagcgccagcgccggacggtataacagccctgacgccgagggcgacaccccgccgtttgttcaggcctccgccttttacggattgtcttcaagcctgacgctgtacggcggagcggagctttccggccactatcaggctctcgcgctgggattaggtaaagattttggccggtttggggcactgggtgtggacaccgttgcggcgaaagcacacctcagtgatgacaggctggccctcgggcagcaaatacgcgctcagtaccaaaaaaatctcgctgagacgaacacgtcgctcaccctttcgaccagccattatacgacgcatgacttttacagtttcagtgaagcaaatgatgacagcgatccagaccagcacgtgcataaccggcgtaaccgcacacagttcagtttgacgcaggatctcggtgcgatgggcaatatcagcgcatctttttaccgtcaggattactggaacgcctcggcggtcgatcaaaccgtccatcttggctattacgctaactacaaaggggtgtcgttaagtgttgggtattatctcacccgctcaagcgctgatgatagcgacaacgaacgggcgataaaccttagcatcagcgtcccactcagccgctggttacccggcgcaacaaccagctacagcctcaacaataaccttgatggccatactacccggcaggtttcgctgtatggtacggcgctggcccacgatcgcctgaactataacctccagcagggcttcgacaaccaggccaataccgcgaacagcaaccttgcgctggcttatcacggcggttatggcagcgccagtctcgggtacagccacgatcgctatagcaaccgcgtgaactacggcgcggcaggcggcattgtggcaacacagtatggggtgacgttgagccaaagccttggggataccctggcgctgatccgcgctgacgaggcgtcggacgttcaggttgaaggggcgaccaatgttcacaccgactcccgaggttatgccgtgatgccaaccttatcggcgtatcacaaaaacaccatttcgctggataccgaaacgctggcagaaaatgtcgatctggaccagaacagcagaacgattgtgccgaccagcggcgcggtcgtcctggcgaattaccatacccacgtgggcatcagaacgctcatcacccttacggcacacgggcgcccgcttccatttggcgccagcgcgtatgtctcgaacgggacatctgcgaaatcaagcgtcggcatcgttggcgaagcaggacaggtctatctcagcggcgtgccgctacgcggaaccttgcatgccagctggcggcagaaaggccaggatatgcgctgtagcgccccattacgccttccggataccgctggccgcactccggtcacgcttatgaaccttcagtgccaataa

SEQ ID NO: 118810 - DNA, 1074 bp, Enterobacter cloacae
gtgaacaatatcaaccgtttaatcaatctcctgatgctcgcttttttgctgattcacgctacggcaagggcgtctcagacctgcccgccgaccatgggcgatgcggtcattaactttcaaaactactcgatcactgataacccatcgatccctccggggtcgatgctttcaggcgctatcctgggccaggaaaaccgctcgttttataactgtcctgagggaaccggcccggtaacgatgcgctttgtggccaataacgccttaaccgtagcgcccgtcagcggcgtggcgccgaacggtacgggcgccccggcctccgtttatgacgtgccagatattcccggcgttgggtttgcggtgggcattcgcgaaaccacgcactgtgcagctgaacccgtgcattacatcgcctcgggggatgacagcgttgcgatttgcagcacaaacgatccctcgcaaatggcgacccagttcttcgtcgtgttttataaaaccgcgcaggagattgtctatgaacagccgaacagcgggcaaattcgcgcaggaacgcttattctggaggatgctaacggcgcggtgatatctgaagctggcgtgacggtggaagtcgctgccgccgacctgaaagtgcataaatcgagctgttatatctcggataacaacatcaccgttaatatgggacaaagtagcgtaagcgatctcaacaaaggaatggatggggataaacaccgcttcatcatccctctggtctgtgacgcatcccaaacggcagcggtgaagatcgggttctttggtccgactgaaaaagacgcgcagaatcacgatgtgctggcgctaagtcaacaggagagcgccgctaccggcgtggggatccgcattctgtatggcgataactacggtgccgccagaggcacaaccgttcctctcaacagcaccggtgtcgaaccttttgccaatgctgcccggcagaccgcgttttccctggattacgacgcacaatatgtgcgcaccgaaacccaggccaccgcggggctggcagacagcctggcaacatttagtctgatatacaactaa

SEQ ID NO: 118811 - DNA, 429 bp, Enterobacter cloacae
atgacgattcataagcacggttcagcacactggtctggcgacatcaaacgcggcaaagggacggtatcgaccgaaagtggcgtccttaaccagcaaccttacggctttaacacccgcttcgagggcgagaaagggactaacccggaagagctgattggcgcagcgcacgcggcctgtttctctatggccctgtcgctaatgctgggcgaagcgggttataccgccgattccatcgataccacggcggatgtctcgctggataaaaccgacagcggttttgccatcagcaaagtcgcgctgcaaagcaaggtgacggtaccgggtatcgatccgcagcagttcgacggcattatccagaaagccaaggccggttgcccggtctcgcagctgttgaaagcggaaatcacgctggattacaaactgaactga

SEQ ID NO: 118812 - DNA, 852 bp, Enterobacter cloacae
atgactatcgcccgccttgctttgctgacaacccttttcactccggccgtctttgccgctccgttgaccgttgatacgtataacccgcaggaaaaaggcatttttgccgtttcttccacgctggtatctggtccgaaagaggcggtactgtttgacgcccagttcagcgtgaaagatggcgaagcgctggtagaaaaaattcgccacagcggtaaaacgctgaacaaaatcgtgatcacttccggcgatccggatttctatttcggcctgcaaccgctgatgaaagccttccctaatgccaaagttgtcgccacgcaacaggtggtggaccatatcagggccacaaaagacgcgaagctcgccttctgggggccacagatgaaagatggcgcgccgacgcagctctacgtgccgcaagtgcttgcctcaaccacctttatgattgacggtgagagagtaagcattgaagagcctgaaagctatgcggcgtacgtctggatcccatccgccaaaaccatcctcggcggcacgggcgtctcatggggcattcacgtctggacggcggatacccaaacgccggaaagccgtaaacagtggcagcagacgctggatagaatggctgcccttaagcccgaacgcgttattccgggccactaccttgggacaccgccagcgggtaccggcgctatcgactttacccgtcgctatctacagcagtttgaacaggccctcacgacacataaagcgtctaccgacgtcatcatcgcgatgaaaaaacagtggccgaaccttgcggaagaaagttcgctggaactgagtgccaaagtgaataccggcgaaatgaagtggtaa

SEQ ID NO: 118813 - DNA, 486 bp, Enterobacter cloacae
atggcaatcccagcatatctatggctgaaagatgacggcggcgcagatatcaaaggcgcggttgatgtgcaatatcgcgggggcagtattgaagtattaggattcggtcatggactgcatctaccgacagataatatgacaggaaaaatcacgggtacgcgcatgcatagcgctctggtttttgaaaaggagttcgacagttccagcccttacttatacaaggctgtagcaaaaggccaaacgctaaaaagtgccgagtttaagtggtacaaaatcaatgatgctggtcaagaggtcgaatacttcaacatgttccttgagaacgttaaagtggtctcaatatgcccggtgatgcatgacgtaaaaaatccagcaatggaaaaacataatcatttagaaaatatttccctccgttacgagaagatcacatggcgacactgtgacggtaatatcatctttgctgattcctggaatgacagatcatga

SEQ ID NO: 118814 - DNA, 483 bp, Enterobacter cloacae
atgaatctcctacagtgctttttccacctcaacggaggtacgtacgctactttgtctgtgcccggagttggcttttttcctgcattttcagggaatggtgacgcgacgaaccgtgcagaaagcgcaaatatacctgatatcggcccgctcccacctggtcgctattacatacttttacgtggattagggggttggtatactcaaactaaggatagtgttaacgcatttttcaccggttcgaatcggaacgaatggtttgcattatatcgcgatgacggattgataaatgatgagacttttgtgaaaggcgtaaggcgaggtgaattccggttacaccctatcgggccatctggcataagtaagggttgtattacactttatagtcagagcgattttaagattctggcatcagccttacttcgaactggagggcagcaattgggaaactacatcattgcacatggcgttgtgcaggtctattaa

SEQ ID NO: 118815 - DNA, 228 bp, Enterobacter cloacae
atgaaggcggcattccttgtgttgttgtggtgtatagccgtgtttctatcaatgttcacactctacaagattgttccaccagaaacgcagtacgattttgtggagctttttggaatatatggcgacgaaaggataatggattttgttttgtatgttttcttcggcatggccatattcattgcgtctgtaatcacgctatccctgtatttgcttatacgaaaaagatga

SEQ ID NO: 118816 - DNA, 1377 bp, Enterobacter cloacae
atgggctttacaccgcaggacatggccttaacgtcggcaacgctgagcggcgggcagcacacgcgtctcctgctggcgcgggcgctgatcggcgatccagatctgttactgctggacgaaccgagtaaccacctcgatttgccgaccctgctctggctggaacagtttttacagaactggtccggcagctttgtgctggtctcacacgacaggcaactattggatgccgtcaccaacggcagctggatcctgcgcgataagatgttgcactacttcgcccttccctgcaccgccgcgcgtcaggcgctggtagccaaagacgaaagtgatgcgctgcggcataaggcggagcaaaaggagattgaccgcgtaaccgccagtgccagacggctggccacctggggcaaggtctacgataacgaagatctggcccgcaaagccaaacagatggaaaagcaggtcgaacggcttaaggagagtcagacagagctcaccgcaggcagtccgtggacattaaccctgcgcggtgacgccctgcgggcagaccggctactggagatggaaaacctaagcgtagcgcctgagcctggcctgtctgagctgtttcacgtcgacattgcgcggcttagaagtggcgatcgcgtggctatcgtcgggcgtaatggctgcggcaaatcatcactgatgaagcttatctggcggcatttctcaggtgtaccttcagagactggcctgaaacttcatcctcgcgtgtcgccaggctattacgatcagacgctgaatcagctttcggaggaggcaacaatctttgacgcgctggagcctttcgcgccagatccgcagacccgtaaaatggccctcatcagtgccgggttcccgtgggcgcgacacggacaaaaagtcagtacgctgagcggtggggaacgttcgcgcctgctgttcatcggcctgacgcttgctcgctatagccttctgatgctggatgagccaaccaaccacctggacatggaaggcaaagaggcgctggcggaaacactgcaacagtttgaaggcggagtgctgctggtgagccacgatcgtcagttaattagccagagttgtaaccgctactggctgattgaggacggcaggcttagcgaatggcacgatgcggaggcggtgtttgagcgcctgcgtgcgggcaccggtccggtggtgcctgaggcgtcgaagactgcatcgaaggcaccaccttcagcgtctgacgatctgctcgaacgcctggttgccctggaaatgctgctggaagaggatttggcgcgcaagccaaaacaccaaaaaccgcagttgcaggcgcaatggcgaagagagattgaggagatagaagcccaactataa

SEQ ID NO: 118817 - DNA, 1011 bp, Enterobacter cloacae
atgaaggctgctgttgtcactcaggatcatcaggttaacgttacagagaaaaccttacgcgcgctcaaacatggtgaagcgctgctgaagatggagtgctgtggcgtttgccataccgatctccatgttaaaaatggcgattttggcgacaaaaccggggtgatcctcggccatgaagggattggtattgtcaaagagattggtccgggcgtcacgtcactgaaagttggcgatcgtgcaagcgtggcgtggttcttcgaaggctgtggccactgtgaatattgtaataccggcaacgaaactctgtgccgtgacgtaaaaaacgcgggttactccgtcgacggcggcatggcggaagagtgcatcgtgaccgcggattacgcggttaaagtcccggagggtctggactctgcggcggccagcagcatcacctgcgccggtgtcaccacctacaaagcggtaaaagtctctgagatcaaacccggccagtggattgcgatctatggcctgggcggtctgggcaacctcgcactgcaatacgccaaaaatgtctttaatgcgaaagttatcgccattgacgtgaatgacgagcagttgaagctcgctgccagcatgggcgcagacttaaccgtgaactcccgcagtgaagatgcggcaaaagtgattcaggagaaaaccggcggcgcacatgcggcagtggtgacggcggtagcgaaagcggccttcaactctgccgttgacgcggttcgcgccggaggccgcgtggtggctgttggcctgccgccggaagcgatgagcctggatattccacgtctggtcctggatgggattcaggtggtgggctctctggtgggtactcgtcaggatctgctcgaagccttccagtttgcggctgaaggtaaggtggttccgaaagtcacgatgcgcccactggaagatatcaacgccatctttaaagagatggaacagggccagatccgtggccgtatggtgattgatttacgttcttaa

SEQ ID NO: 118818 - DNA, 2103 bp, Enterobacter cloacae
atgccccgacccattccactcgaacgttatcgcaacatcggtatctccgcgcatatcgatgccggcaaaacaaccaccactgagcgtatcctgttttacaccgggatgagccacaagctgggtgaagtacacgatggcgcggcaaccaccgactggatggcgcaggagcaggagcgcgggatcaccattacgtcggcggcggtgagctgtttttggcccggtatggacagaggctttgaaccgcaccgcatcaatattatcgacacccccgggcatgtggatttcaccattgaggtggaacgttccatgcgtgtgctcgacggcgcggtgatggtttatgactccgtcggcggcgtgcagccgcagtcggaaaccgtctggcgtcaggcgaataaatatcacgtcccgcgtctggcattcgtcaacaaaatggaccgcccgggtgcggatttcttccgcgtggtgcggatgatgcaggagcggctgaaagctaatccggtcccgattgtgatccccgtgggcgcagaggaacacttcaccggcgtggttgatctcatcaagatgcgcaccattctttgggatgatgcgacccagggcatggcgttcacctacgcgccggtgcccgacgatctgctgagcaccgcgcagacgtggcgagaaaaaatggtctcgtctgcggcagaagccagcgatgagcttatggataagtaccttgagacgggtgaactggatgaagcggaaatcatcaaagggttacggatccggacgatctccggtgaaatacagcccatgctgtgcggcagcgctttcaagaacaagggggtgcagcgcatgctcgacgcggtgattgaattgatgccgtctccactggacgtgcccgctattgatggggtagacgaagatggacagcacgccgagcgccacccaagcgatgatgaaccattctctgcgctggccttcaagctgatgagcgatccgtacgtcggacagttgacctttattcgcgtctattccggcatactgcgcaaaggcgacgcggtttataacccggtaaagggcaaaaaagagcgaatcgggcgcatcgtgctgatgcatgccaacgaccgccatgaggtggacgagctgcgcacaggggatattgcagcctgtgtcgggctgaaagacgtcaccaccggtgacacgctgaccgacccgaatgcggtgatcacccttgaacggatggagttcccggacccggttatttcgctggcgattgagccgaaaaccaaggccgatcaggagaaaatggggatcgccctacagcgcctggcggcggaggatccgtctttccgcctgcacacggacgaagagtccggtcagaccattatctccgggatgggcgaactgcatctcgaaatcatcgttgaccgcatgaaacgtgagtttggcgttgaggcaaacattggtcgtccacaggtcacctaccgtgaaaccctgcgtaaagcggtgaaggatattgaaggtaaatttgtccgacagtccggcgggaaagggcagtacggtcatgtggtcctgagtctggagccgttagcagccggaagtggttttgtgtttgaagatgccaccaaaggcggggtagtgccgcgggagtatatcccgtcggtggaaaaaggcttgcgagaagccatgaatacgggtgtgctggcgggctatccggttgtcgatgtgaaagcgaccctgacgtttggttcctaccatgacgttgactcctcggagatggccttccgcatggcggcgatcctcggtttcaaagagggcgcgcggcgggcggatccggttattcttgagccggtgatgcacgttgaagtggaaacgccggaagagtatgccgggaacattatgggcgatctctcctcccgccgcggcatggtgcaggggatggcagagcagtacggcagccagattattcgcgctgacgtcccgctggctgaaatgtttggctacgccaccacgctgcgctcgatgtcccaggggcgcgcgatgtatacgatggagttccatcattttgcggaagctccgcggaatgtggcggatgagattattgcgaagcgcgtgaagagctaa

SEQ ID NO: 118819 - DNA, 936 bp, Enterobacter cloacae
atgatgaatattatgcatccagccttaaggcgccttgatttaaaccttctgccggtttttgacgcgatttatcgccacagttccgttcgacttgcggcagatgagctggcgatgagcacctcggcgctcagccatgccctgtcacggctgcgtatttcgctcaacgacccgctgttctaccgggaaggacatcgaatgtgtcccagcgtctatgccacccagcttgcgccagttattgcatcggccctgaaatatctcgaccaggagctgtcgccgcagccggaatttgatcctgctgtcagtacagcgtgtttgcagatcgcgataacggactttaccgcgttctgcatattccctgcgctcatgaatacgcttcaacatgcggcgcctggcttgcgtctggaattacgatatttgccgcacagcccggcattgacggaattactggcaggagaggtggatctggccctgggattcagcaccattgaggatcgccggtacccggagctggaagagatcagctggttcgaagatgaatatgtggtgattagcaatgcgagccggagcgcgctcacgctggaggattatctcgccgcccggcatcttgtggttacgccgtggaatgagaagcagggggtgctggatttgcagctggaacgcatgggttatacccgacacattgcgatcaaaaccccgtctatgctcagcgccccgtttgttattgcagaaagcgatctgctgatggcgttacctcgattcgccgctgaaaagctgctgccagctacccgtattaaaatttttgatttaccgttccacatcagtccgtttgaagtaaaaatttattcgcacaagcgcagcgggaaacgaggcgtcacgaactggctcaaagctacgctgcgcgcgctggccgaagggcaacagtcagagcgcttatga

SEQ ID NO: 118820 - DNA, 477 bp, Enterobacter cloacae
atgagcattacgattcgtcaggcgcgacctgaagatgcagcggcaatatacgatatgatttacgaactcgcagtctatgaaaaagcgccagaagaagtggtcaccacgccggacgaaatccgtaaaacgctgtttggtgcagacagtaaaaccgaagcgctggttgccgaatatgcaggccatgctgtggggtatgccgtttttttcaccagctattccacctggcttggtcgcaacggcatctatatggaagatttgtatgtctccccggaataccgcagcaagggtgcgggaaaagcactgcttaaaaatatcgcgcaatgcgcagtggaacgtcactgcggccggctggaatggagcgtgcttgactggaaccagtctgcaattgatttttatctgagcatcggcgcggtaccgcagtccgaatgggtacgctatcgtcttgatggcgaggcattgcgggcatttgctgagtag

SEQ ID NO: 118821 - DNA, 933 bp, Enterobacter cloacae
atgcagaaatcatcgcttattctggcgcttgcgctggcttttacccctgccgtctgggcagagaacgtcaatattaacggcaccggcgtgagcattgaggccaataaaacgccgatcaataccgccaaaaacagcgatgcgatcgcgcaactgccgaaagactatcgctttgccgtgccggggaaatttaccgtggcggtggcgggactgaatcaaccgccgctgacggtcttttccgacgacaacaagaccctgctgggaagtgaggtcgacattgcgcgtctggtggcggacagccttgggctggagctgaacgtggttcccacctcctgggaggactggccgctgggggtggcctccgggaaatacgatgcggctatcagcaacatcaccgtcaccaaagcgcgcaaagagaagttcgacttcgccacctatcgcaaggattcacttggcttctacgtgaaatccaccagtcccatcaactcgcttgtgaaggcagaggatatcgccgggctgcgtatcatcgtgggttccggcaccaaccaggaagccattctgctggcatggaacgaagagaacctcaaaaaagggcttaaaccctttacgccgatctacaccaaagacgacgcggcccaaacgctggcgcttcagtccggacgcgcggacgcctactttggcccgaacgtgatcggcgcctggaaagcggcgctcaacggtaaaaccaaacttgtcggcagcgtcgacggcggctggccgaaggcggcgcatatcgcggtgacgctgaaaaaaggcagcggcctggtcgaaccggtacaaaccgcgctgaacggcgcgatcaagaacggagattacgaaaaggtgctgaaccgctggggggaaggcgtggagcgtatctccagttccgaagttaacccggcgggtctgggcgattaa

SEQ ID NO: 118822 - DNA, 2118 bp, Enterobacter cloacae
atgaaaattattactgcccataaggcctcactacccctgttgttcgttcccgtcatttttggcccgctgagtgcgatggccgcggatgaacagaccctgatcgtcagcgccacgccgcaaaccgtctcagaactggacaccccggccgcagtcagcgtggtgagcggcgaggatatgcgacatgccacaccgcgcatcaacctttctgaatcccttgggagcgtacctggcctgcaaatccagaaccgccagaactatgctcaggatctgcaactttccgttcgcggattcggcgcgcgctcaaccttcggcgtacgcgggatccgtatgtacgtggacggcattccggcaaccatgcccgacggccaggggcagacatcaaacattgacctcaacagcatagagagcgtcgacgtgctgcgcggccccttctctgccctgtacggtaatgcctccggcggcgtgatcaacatcaacacccagaccggacaacagccagccaccattgaagccagcagctattacggcagctacggcacctggcgttacggtatgaaggccaccggggcggtgggtgatggtactcaggcgggcgatgtggattacgccgtatccactacccgtttcaccacccatggctatcgcgaccacagcggcgcgcgcaaaaacctcgccaacgcgaaactgggcgtgcgtattgatgatgtcagcaagctgacgctgatttttaacagcgtggacatgaaagccaacgatccgggcggactgagctatcaggagtggcagaacaacccgcgccagtcaccacgtggcgatcagtacaacacgcgtaagaccattaagcagacccaggccgggatccgctacgaccgtcagctgagcgaacaggacgacctcagcgtgatgatgtatgccggtgagcgtgaaatgactcagtaccagtccattccggcgtccactcagcgcgagaatcctgcgcattcgggcggtgtgattgatatgcagcgtcactatcagggtattgatacgcgctggacccaccgcggtgagctgctggttccggtgacattcaccaccgggctgaactacgaaaatatgagtgaaaatcgtcgcgggtatgagaacttcgtgatggacaacggcgtgccggattatggcgtgaagggtaataaacgccgtgacgaacgcaatctgatgtggaacctggatccctacctgcaaacccagtggcagctaacgcaaaaactgtccttagaggcgggcgtacgttatagctccgtctggtttgactccaacgatcgttacattaccccgcaaaacggtgatgacagcggcgacgccagctaccacaaatggctcccggcaggtgcggtgaaatacgccgtgaccgacgcatggaacctgtatgctgcggcaggacggggatttgagacgccgaccatcaacgaactttcctaccgttctgatggcaaaggtggcctcaatatgaacctgcaaccgtccaccaacaacacctatgagattggcagcaaaacccgcatcggcaatggcatcctgacggcggcgctgttccgcacggataccgacaatgagatcgtggtggacgaaagcaaggatggtcgcacgacttataaaaacgcggggaaaacgcgccgtcagggtgtggaaattgcgctcgaccagcagtttgccgagaactggaagctgaagatggcgtggacctatcttgatgccacctaccgcaccaacgtctgtagcaatgcagactgtagcggcaaccggatgccggggatcgcccgtaacatgggatatgtgtcgtttggctgggagcctgaggaaggctggtacgcgggggcagatgcccgctacatgagcgatgtcatggccaacgataccaacaccgctaaagcgccctcttataccgttgtgggcctgaataccggctataaactcaactacggcaaatggggaatggacgtctttggtcgcgtcgataacctgttcgataaagagtacgccggttcagagattgttaacgctggctacaaccgctattacgaacctgcccctggtcgtaactatggcgtgggcctgtcggtctcttatcgttttgagtaa

SEQ ID NO: 118823 - DNA, 1425 bp, Enterobacter cloacae
atgcaaaatcaactgctgattaatggtgaactggtgaccggcgagggtgagaagcaggcggtttacaatcctgccacgggtgaagtattgctggagattgctgaagcgtcggcagcacaggtggacgctgccgtccaggctgccgatcgggcgttcactgagtgggggcaaacgacgcccaaaacgcgcgccgaaagtttgttgaaactggctgatgtgatagaagccaacgctgacgcgttcgcacaactggagtcgctaaattgcgggaaaccgctgcactgtgtccagggagatgagatcccggccgtggtcgatgtgtttcgcttctttgccggggccgcccgctgcctgaatgggctggctgccggagaatacctcgaaggacatacctcaatgatccgccgcgacccggttggcgttgtcgcctctatcgcgccctggaactatcctctgatgatggcggcgtggaagctggcgcccgcgctggcggcgggaaactgtgtcgtcatcaagccgtctgaaatcaccccgttgacggcgctgaagctggcggaactggcgaaagatatcttcccgccaggcgtgctcaacgtgctgtttggtcgcggcaaaaccgtaggagatccgctgaccgggcacgaaaaagtccgtatggtttctctcaccggctctattgctaccggagaacatattatcgggcataccgcatcttcagttaaacgtacccatatggaattgggtggaaaagccccggtcattgtctttgacgatgcagatttggatgccgtggttgaaggcgtgcgtacgtttggtttctacaatgctggtcaggattgtaccgcagcctgtcgtatctatgcccagaaggggatttactccgcgctggtcgaaaagctgggcgcagctgttgccagcctgaaaatgggcgcgccggacgatgcgtcaaccgagctgggaccgctcagctccgccgcgcatctttcccgcgtttgcgctgccgtggatgaagccaaagcccttggacatatccgcgtcgtcaccggtggcagtaaaagagagggggcaggatattacttccagccaacgctgctggccggggcgaagcaggaagatgcgatcgtccagcgagaagtgtttggcccggtggtcagcgtgacggaatttgaggatgaagcgcaggtgctgagctgggctaacgattcgcaatacggcctggcctcgtccgtctggacaaaagacgtcggacgcgcccatcgactcagcgcacggttgcagtatggctgcacctgggtcaatacccattttatgctggtgagcgaaatgccgcacggcggaatgaaattatccggttacggcaaagatatgtcggtctacggacttgaggattacacggtagtccgacatgtgatgatcaaacactaa

SEQ ID NO: 118824 - DNA, 489 bp, Enterobacter cloacae
atgtcagcaagagagcgtttttttaagaaagtgcagcagaataacgtaaataaaccgattcatattaatacggctgaagccgaagtcagggctttttgtcagcggatggatgatcttgcacagcaaattattgtttggtttgagggttctggtattgaagtcttgttatcccataagcatatcaccgatttgagtacggtcggctacagcctcagtagcagtatatgtcgttatgtcatcacgactgtcattctgcgaaatggagatcgcagcgtcagcattatgccagaacagatcatcaggggatcagagaaggggtgtatgacaatgtgcattaatgcccccggcagtatatcgggggagaggatataccatttaagcatggcgcctgaaacaggctggtatattcgtcgcggacatcaaagtgttaaagagaatgttctcatgacggaggactattttttccagtcagtcgactgtctggcctga

SEQ ID NO: 118825 - DNA, 456 bp, Enterobacter cloacae
atgccacagggacacaacacgccatcgctttatgaaatgctgagcggcaatttctcaggtggcctgaacctcaaccaggtcagcgaacagaatcaggtgattttatcagtactcgataacatgcagcgcatcctcaactgccgcgctggtacgctggctcacctgccagactacggcatgccggatatgacaaaaatcctccaggggatgcccggaaccgcccatcagctgatcaccacactgtcggccgtgttgctgaaatatgagccgcgcctgaatcgaattaacgtggtgatgcaggaacagattcaggccggtgagcttcgctacgccattgacgcggagctgaagggggtcgggttagttcgatatggtacggaatttatgccggagggcagggtattaatccgtcatctgaaacaacagcaatacctcgatgcacgtgccgccatctag

SEQ ID NO: 118826 - DNA, 546 bp, Enterobacter cloacae
gtgttacgtacaagttcaattaaacatgcgagcttgctgcctgctctgctggcattcagcctgacggggtgcggggtgacgcagggcatcaccgatggcaccaaatcggcatttaacgccgtgttctacaaaaaaattaagatgctgcacctggatttcacggcgcgtgaagcgctaaacaccgattcccgcgaaagtaactcactctccgagccggtggtagttcgtgtctatcagctgaaagaccgtaaaatcttcgataaaacggtttaccagcaactgctgaaagatggcgaaactatcctgaaaaccgacctgatggcgacccgcgatgtggtcgtaaaaccgggcggtgatacaaatcttgatatgccaatggaagaagaaacgcagtttgtcgcggtagtcggcctgtttcgtcacccggacctggtcaacaatacctggaagcaggttctaaaacgtgaagatctcgatccggataagccgcgcattctggaggctgggaataaccaccttacgttacagccattgaaggatgactga

SEQ ID NO: 118827 - DNA, 1086 bp, Enterobacter cloacae
atgggaagagaagcacaatcgccgtattcccggctgagcccacggctggaagccgacctgcatcgcattaacttttaccgtttatgccagttactggagaagcgtaacccgggcaggccgctgatgggctcgaccagtcacccgggggatgatccggtacgctttgccccacatccggggatgggatttccggccagtgagatgaaagccgtggaatatgatgaggaggatgacagccggccaccactcatccgcacgacctttatgggaatgtacggtgtcgactcacccttgccgacggcgtatctcgatgacatcgctcagcgtcgggaagggcattatgcactacagggttttctggatatctttagccatcgcattctgacgcagttttaccgtatctggcgtaaatactcttatcctgccacctttgaacccggtggtacagacagcatctcgcagtcactgctgggcctggtggggctgggtattcccggcacagcagaccacattgccacaccggtatcccgttttctggctttgctgggtgtcctacagcaaccgggcaaaacgcaggaggggatgcaggcgctggtgactttgctggccccgggaaccaccgttaaggttagcccgtactgcctgcggccggtggaaattggtcagccactgggcttttacggtgatgacgattttctgttggacggcaacacaccactgggtgacgaagcgatggatgcgggtagccaactgctggttgcgcttaggacggataatgaacaggaggcacagggctggaagccggacggtctgctgtatcaggactttatggtgatgattcgtgtctggctcggttggcgttttaaggcaaaactcaccctgaccacccggacccgacttcttgccgttccgccgcttggtgaaggccctttctggctcgggatgaacggcgtgctgggggctgatgagggggagtttacagacgatatcccaccgacctttacgacggaactgggctattacaccggcctgaagccggcaatatcacaacaaggaaaccgacgtgttacgtacaagttcaattaa

SEQ ID NO: 118828 - DNA, 1755 bp, Enterobacter cloacae
atggatgatttaaccctgcgttattacgacgctgaaatgcgctacctacttgaagccggcgaggaattcgcccgtgctcatcccgagcaggcggcaatgctcaatctcgataaagcgggcgcgcgcgacccatacgtggagcgcctgttcgaaggttttgccttcctgatgggccgtctgcgcgagaagcttgacgacgacctgccggaactgaccgaagggctggtcagcctgttgtggccgcattacctgcgcaccattccctcgatgtcggtggtggagttcactcctgtctggcgtgagatgaaagaaccgatgcgtatcgccagaggtttcgaggtcaattcgcggccgatcggtgaaaaaggcacgcgttgtcgctacaccacaactaaagagataacccttcagccactggcgttggagcatgcccgcctgtcgactgatcctgacgggcgctctgtcatcagcctgcgcttcagttgtagccatcttgctgactggagccgtgtcgatctcagccagatcccgttctatttcaatgctgacgcaccgctggcctgcgctatgcatgaagcttttaccatgaatacggcgcgtctgtggctgcgcatgccaggtgacgtagacagaaggccgatggacgggtatttcaccgcactggggtttggtgatgatgacaggctgtggccgaagggggacagcagttttagcggttaccagttgctgctggagtacttcaccttccgcgagaaatttatgttcatggggctgcgcgggctggaggccgtgatctttccttctgagcttccttggtttgaaatcgacgtggtgctggcggaacgctgggagcatgacttcagctttaccgaaaagcacctgcgcctgaattgcgtgccggtcattaacctgtttccgctggaatccgatccgctgacgctcaattctctgcaaaccgaatacatgctgcgcccgatgcgcgtgcaggatggccataccgagatatataccgtggattcggtgatgtcgtcgagtcagcatacctacgtgccgttttcgagcttccgtcataagggaggaatgatgcgtcatgaagcaccggaatattactaccacacccgcgtgcgccgcggtccgtccggcctgcataacacctggctcattcttggcggcgaagcatttgataatcataccgtcccggaagacgaaagcctgtcgctgacgctcaccggcacaaacggtcaactgccacgacgtgcgctgcaaagcaccgtgcttgatacggtgatgaaaaccacttcggtcagcattgccgtgcgcaacctgtgcgcgccgacgctaccttgttacccaccggcgcaggaccgtttccactggcgcgtgctgagtcaccttggcagcggatttctgtcgatgatggataatgccgacgtgctgcgcggtaccctggcgctgtatgaatggaccgacagcgagatgaaccgtcgccgcctggaagccatcattgacgtgaagcacagtgaaaccgaacgctttgaacagggctacctggtgcgcggcgtgcagattgaggtgaccctggacagccatggctttgccgggcgcggtgacatctgcctgtttggcgagatgctgagtcgtttctttgcgctctacaccgacatttatctgtttaaccgactgattatcatcctgcaacctaccggagagcgcctggaatgggaagagaagcacaatcgccgtattcccggctga

SEQ ID NO: 118829 - DNA, 1602 bp, Enterobacter cloacae
atggacgctttgcagaatctggttgttgcctgccaggcggatgaaaccttgctgcgacagcaggcgcagtcacgtatggaaagctggcagagctggcttacccctatcagtgagatcaatcctacaggagaagacccgggttatgacgatgatttccagcgtatccgggaggaggtcaataaactttccggcattgataccgggctgatttgccagctggctgaaaaggtgctgatcactgtggccaaagatgtccgggttgctacttactattgttgggcgcgcttgcaccaggacggtgaaaccgggtttgctgaagggcttgagttactggcgggattactaacccagtatggaacacagctccatcctcagcgcgagcgaagccgtaaaccggcgctggagtggctcgcaggctctcgtctacttgacagcctgttgctctggccagaagtggtacgcgacgatgcccagcgtacgaccggtgcgttgctgctcatccgtgacagtcttgaaactgagccggaagcgtcacgtccagatctgaatgctctgtacagcgcgctgggatcccgcctgatgaaagccggtggcgtggatgcggtaataccccagaacgccagcagtcagacacgcgcgcagtggacatctcacgcggcagagcaggacgcgccagtactgagccgcatcacgtccggtcaggatttgctggctcaggcccgaaccctgacgggatatctgcgtgagcaacctgatggctggcttgccgcgcaccggctgatgaaaagtctgcgtcacgacacgctgcgatcgatcccggcaccggatgccgaagggaaaacgcgcatcgaaccgccgcgggctgaccagcgggcaatgctcaaacggctgtatttgcaacagagctggctggagatacttgaacaagcggacagcactttctcgcgtggcgccaatcatctctggctggatttgcagtggtacatccatcaggccctgattaaatcaggccaggatgtgctggccgatatcattatcgctgacctgaaagggctgctgcggcgccttcccggacttgaaacgctggccttcaatgacggcacaccctttgctgatgaggtcacgctgaactggataaaccagagcgtgcaggacgagatgtccaactggcgggatgagcctgtcaatgccttgagtgaaactggcaacgatattctggcccttgaaccggaagctttggagaaagctgacacggatggtctggatgccacactccactggctgcaaacgcgcccgggcaccgacaccacaaaagacaaatggttgttgcgtctgctgatggcacgtgtggcggagcagaagggtaagaatgagctggctctgcatctgctgggtgagcttgacggtgcagcacaggccatcaccctcacgcaatggacgccagcattgttgtttgaagtgaaatcgcgccgcctcaggctgctgcgcatgaaagccgcccgcagcgaaaccgataagtcacggcttcagccagagatggaccagcttctggcgggcctgattgcgcttgacccggcaggctgtgcggtgctttgcgggtaa

SEQ ID NO: 118830 - DNA, 3417 bp, Enterobacter cloacae
ttgaacacctcggcaaaatggagagtgattggccttgtatcctgtctcattatctttggtgtgctgacttttataggatgttactactatggggatatctttggatgggtatcctcaaaagaaaaagtgagcctttggttcttatgcatgtttttaatttctgtgttcctgatgttgatgaacttcggtgtgtggttccatcaaaaagagtatcgctttcagcatatcgcgggagggaagtccgtcacagctaatgttcttaataactataaaaagtccagtaaaaaggatcctgtaaaagctcatttacgccgacgctatagcttcttgtggcaaaacaagatccgcctgctgttgatcaccggcgatgaagccgcgattgagcaactggtacctggcctgcaacagcagcagtggcttgaaggcaaccgcaccgtgctgatttacggcggcaacctggcatcggagcctgaccgcgaaaaatacaccgcgctgcgtaaactacgccgcgggcgcccgctggacgggattatccgtgtactgcctgagtcgcctaagctgaccccacatatcagcgacagcgatttacgcggcctggaaaaaatcagcgaactgctgcgttattccgctccggtctggctgtggcaactgtgcagcagtcactggtcgcagggtacgcgtcctgagcaggcggtaggtgcaagctttccaccacgcgcaaaagaagacgatgtaatccgccagctggaactgatgctgccagccctgcgggcgcaggggatgagtcaggtcgcggaaaacagcagccacgacttcctgctgcgcctgagccagcacctgaacgacggtgctattgcccgctgggctcagcagttgcagccatggctctttgtttctcagcagcgcgtcccgctgcgtggtctgatgttcagcctgtcggagaagaaacctgccgaaatgtcagcgggaacagccgacgctgagaattatggatcacagcgtcatgccctgactctgccagcaacctggcagggtattgtcgacgactgcacccgcgtacgtggccgtcgtgtcggtatgccgtgggaacgagcgctggcctgggcactgatggccatcatcagtgtctggggggcagggacgctgctgtcgtttgcggtcaaccggtcacaaatagtttctgttgcacagcaggctcatgctctggtggagcacccttctgtatcggattaccaactgacggccctgcatgctctgcgtaatgatgccggtcgcctgctgcaccatattcaggacggcgcgccatggtatcagcgctttggtctggaccatgatcagcagttgcttgacgcaatgctgccctggtacggagtggcgaacaaccgtctgatacgtgacccggcaaatgaagcgcttaagcagaagctcattgcgctggtcaattcggcacccaacagcgaccagcggacacagatggcgaaaccgggttatgaccagctgaaagcctggctgatgatgtcccgtccggataaagctgatggtgcattctacgcgcaaaccatgaaaaccgtgcagccgacgcgtttaggcatctcagctggcctgtggcaaagcctgtcaccggatttgtgggctttctacatcaccgaactgccagcgcagccacagtggaaaaccacaccggatgcgcaactggtcagccagagccgccaggtgctgttgcagcaaattggacggcgcaacgcggaaagtacgctttacgagaacatgctcaaatccgtacgtcgtaactttgccgatgtgtctctggaggacatgactggcggtaccgatgcccgtcgcctgtttaccaccgatgaggtggtgccgggcatgttcacccgtcaggcctgggagggagggattcagcaggccattgagaaagcggcaaactcccgccgcgatgaaatcgactgggtactgagcgacagccggaaaaccgtttcctcagacctgtcgccggaagcactgaaagcacgtctgacggaacgctacttcaccgactttgccggtagctggctgagcttcctcaacagcctgcaacttaatccggcaaacaatattgcagacgtcaccgaccagctgacgctgatgagtgatgttcgtcagtcaccgctgattgccctgatgaacaccctcgcctggcaggggcagaccggccagaagagtgaaggcctgtcggactccatcatcaaatcggctaaagacctggtaggcgggaaggacaaaccggtaattgaccagtcagcctcaggcccgcagggcccactggatgaaacctttggaccgttgctgacacttatgggtaaaaacaaaggcagcaacgttatgtcggctgacaattcactgagcctgcaaacgtatcttacccgtatcacccgtgtgcgtctgcgtctgcaacaggtcgccagcgcctctgaccctcaggaaatgatgcagagcctggcgcagaccgtattccagggtaaaagcgtggacctgaccgacacccagcagtacggcagcctgattgctgcaagcctgggcgaagagtggagtggttttggcagcaccatgtttgttcaaccactgacccaggcctgggaaactgtgcttcagccatcggcagcgagcctgaatgacaaatggagtcgttccgtggtggcgaactggcatacggcatttgacggacgtttcccattcgcgatcagcaagagtgattcctctctgccaatgctggctgagtttgtgcgtaaggacagcggacgcattgagcgcttcctgaccacggaactcggcggcgtgctgcataaggagggcagccagtgggtgccagataaggttaatagccaggggctgagctttaacccagccttcctgcgggcgattaatcagctcagccagctatcggatatcttatttaccgacggcagtcagggcatcagctttgaactacaggcgcgtccggtaccgcaggtggtagaaacgcaactgactattgatggacaaaagctgcactacttcaaccagatggcagactggcagagcttccgctggcctggtgacacctacaagcccggaaccatgctgacatggaccaccgtcaatgcgggtgcacgtctgtttggtgattacagcggaacctggggctttattcgctggctggatgaaagtaagagagagcagcttgaccgcagtcaatggatgatgagttttaccgccccggatggtcgtaccctacagtgggtactgcgttcacaactgggcagtgggccgctggcgttactggcactccggggttttacgctgccagatcaaatattcagcgtcgacagcgcggctatggcgcaggcgctgatgaccaacacagaaaacagtgacatggacggagtcgaataa

SEQ ID NO: 118831 - DNA, 1176 bp, Enterobacter cloacae
atgaattggcctgtgcaaataatccctccagtcgataagattcctggaattaaatggagtaaatggtttttttctttcataagtattttgttgattgtggtggttagttgggttggggctaaaattattttgcctgctgaagatgatgagcttttgaaattgcttaccctgttgtttttttcggtgcccctagctttttctgtcataatttccgttagaatctattaccatggtttgtgtttgtcggcattcgaagcaagagagcgcgaagcagcattggtcaggaaagactggactgaatgggcaagtaaaaagttttatgtttccgcttataaactatttctcccttctgcaatatcgcaaaccgatatagcaatgtctcattcggttgaaatatataataaccagcgattgaaactacggggccataacgatgatttatatactgaagaacaactgatttacgaactgttgtcgtctgtcagaacaaggctgttacggttgagtgaatcatgtatatttgatattatatttacctatgatagtaattatattactttctcaatatttcaagagtgttgggctgcgatcgggtttgatgaaaattgcttgcgtaattattactgttggagtaaagcattaggacagggatttgatacattatccaacatctcaaaaaatcgggtgtcaataataatatctgcaaacattgaaacttttgtaaaatacccccctgactcaacagagttcgcttcaatattgctggtgactcatcgagaacaactccctgaaaaaaacaataatggtgtggctttgcgaccaatggtatgcaacaaaaatctcaccaaacaagaggtcatccacatgatgacttaccagtcagatattcttaaaacgacaagagtactttttagcaatatgagtgcagaggaagcttcagaagtttcggagatattaagactctcatctttatctatgaatgttgaatgggagtgtgagataatgcatttaaatttgatgctgggtaatttaaatgagcaccatttttggttggtgtttactctggcccttttcatatcagaaaaaaataatgagccggttttaatggtcactggcgttggtgatgaataccttttaaatgtcattaagccatttgataatcgcaaggagcattaa

SEQ ID NO: 118832 - DNA, 906 bp, Enterobacter cloacae
atggatgataaattttttaacgatatacatgaagaatttaccaatgctgcttttgggaaaaatgggaaatgttttctgctgatagatgcatctttagaacagtatcattcagaactttttttgcccggtattcttagagaatataaatcttatcctgttacattccgccaggaagaacttcagggggctttaccactttaccttttccctcttagtgcctccagcgagagagatggtcaattgtttaagaatagtatttaccattcattgaatgagttgaaaatagaaaaacttgagtccggggaagggcgcagcgtctgtgcgtggatttcgacggatttaactggggagcagcttgctgaacaggtcgctttgtccgccgtacagtcgattcaatcagttggtaatatattacttcgctattacgacccatcagtatttggtttgttaatgtatacgctagataaatggcaaaaacaacagctattaagcaatattaatacatggtcttatattgatggaggcggaatagctcaggtggtgaatggtgatggtaaatgcaaaaaaaaattaaactactcacttggattaacagagcaaaatgcattagaaatgggccgaattttagttgttaattatattttgcgagcatatcggaaaatgagaatgccgcataaatttagtgagcgtgatgttatgggattattgcatcctgcgctggattattattattcaactttctcaacatccgataaggatgttattgattttgggcttgatgtgttgagcgcgcagcggctattttatcaggatgaggtatttaagaagatcttatttagtaatcgcagtaaagaccttcagtcatactcagatattaaatccataattgacagtatggcatgttaa

SEQ ID NO: 118833 - DNA, 963 bp, Enterobacter cloacae
atgaattcagaagagcaatatcagatatgttcccgttttgttaagccaggaaaattagcagacctgcgtacaaagcgagagattgaggtgatgaacggcaggccgtggacacgtgagcttccgccgccgccggtattgccgccttatggtcctctggagaaaatatcagggaaactgcagtctttccgtagcgattattttcgggagtattttgatgcagatgcctaccggaccagcacgttgccggagatatcagatggccagcgcggagctgccgccgccgccgcgatagtcgcagggagtcctggcgtcggggctgccattatggctgagagcgaatcatcaaatgattcggcggaatatgtgcagggagatattaatggcagaccatttcgcggctgggtgggcatcacccgacttcagactggcgataatgtggacatgattgttgagtggcagcatgatcattatgaagtctatgccattgcgttaccggaagagcggatagtgtctgtatgtccgaaatgtgatatggggcatattgcgcatatgctgtggcggattaaaaacatgtttattctcacgggggtttttttcttctcggtgctttttgcgggagttctgagtgaagtgattgaagatacctggaagggccttgagtcatttatcaccacatacttttggttgtatgttatagcattgttggggggagtgggtctttcaggattaattgcattctttgcttataaagcctgtgctccaacacgctgcaaactggcggaggagatatttcatctgctgggtgtgaaaaatattagaacagtaaacctcaataaggtgacaaaaaaacgtgagcaacaactaaaagacaatgggaagtggcatgagccgggtgataaaagtaagcctgcctgtcccagtgggaaattcatttattcagatgaaggctggttttactactag

SEQ ID NO: 118834 - DNA, 960 bp, Enterobacter cloacae
atgaattcaaaagagcagcatcagatatgctcccgttttgttgagccagaaaaattagcagacctgcgtacaaagcgagagattgagatgatgaacggcaggccgtggacacgtgagcttccgccgccgccggtattgccgccttatggtcctctggagaaaatatcagggaaactgcagtctttccgtagcgaatattttcgggagtattttgatgcagttgcctaccggaccagcacgttgccggagatatcagatggccagcgcggagctgccgccgctgcagcgatagttgcagggagcccgggtgtcggggctgtaatgatggctgaaagcgagtcttcgaatgattcggcggaatatgtgcaggggatgattaatggccagccgtttcgcggctgggtgggtgtcacccggcttcagactggcgatgatgtggacatgattgttgagtgggagcatgaccattatgaggtctatgccattgcgttaccggaagagcggatagtgtcagtatgtccgaaatgtgatatggggcatattgcgcatatgctgtggcgcattaaaaatatgttcattctaatcaccatattgatggtggcttttgtttctgtatgtgtatttatctctatctcaaaaggaaatccaaatggtgtctctttatttgagaggttttatcttttcctggtaatggcttttgtggtgtcctctgtaatttcggggttgattgcattctttgcatataaagcctgtgcgccaacacgctgcaaactggcggaggagatatttcagttgctgcggatgaggcgtgttgcaacaatcaatctcaataaaataacaaaaaaacgtgagcaacaactaaaagataatgggaagtggtatgagccgggtgataaaagcaaacctgcctgtcccagcgggagattcatttattcagatgaaggctggttttactactaa

SEQ ID NO: 118835 - DNA, 2769 bp, Enterobacter cloacae
atggcatgccaggggttatgcacaacgaaaggcctgacagtactgcccgtgcgctatgctgttgtgccagaaaatattaatgccagtttaccgggatgggcgaatgatccgcacatcacaggggtaacgctcgccagtaatgaaaagtacacactccgcgcgcttcgccagggctacctttacgttttttacgaaaaaggaaaacagggcatcaattactggcagtgctacagcgttgcgccagacggctcactgtggctgcaacaggtggcgtctaatcctgtaccggtggataaagcgctgtgcgaaacgggcgagcatatcgcgcaaaacgtcgagttcatgagcattgaatccccggataagtgcggcaatgtgtggtttgcgttcagtcagtatccgtgggagcaggaaacgctcgatcggtatcgcaccaggccagaagatcgcactgagagaatgcagaaagtgatgccttcggtggcgggagctcagcgcacaaaaacagggaccgacgttaccggggcaagcctgaatcaggtactggactatcaggtgccttctgtttctggtcttctgcctggtccggatgaggcgaaagtggtaaacatcagccgtgcatcgtcactctgggatccgacagtggatgatccctggcgggtcaataatgatgtggtgaaactgcagtccagtctgtatccgtgggcaaaaaaccgcagtggcatggcagccgcgacggtcacggccatggaaaaccgaagtgaggggatgacgccgttgctgcttccactctgggatccggtggggattgttcatgagcttaacggctggagccaggatgtgctggggcgccaggcgcagttcctgcaggagcgtgagcttgagttcgccaccaaaacaaacctcgatgcagtcagaacgctgctggaaagcaatgccgaatatctggaggacgcgatgcggagacgaagaactgatggtcccatgctgacagacgaatatctggattcgcgtctgcaggcgcttgagaaaaggtatcagggtaagcctgatgtgctggcacaaatcagggctgatgacaggttagtgagaaattggcatgcgcagaacgtgacggcattatacccggagagtgtgctgatgagtccacccgaaccgctggctgctcaccagcgacgggttgccgcgatacaggctcaggtcgataaggaactggcgttaaatctgcctgaaccctcgcaggatttcagtggagtccgggcccggagctgggctccctatcagaaaaagctcaacgcaacccgacaggcgaactttgatacctgctacacgagcctggttgattcggttaatgctatcttccagaagcgtatcgtcagcgtggtgaactggctcagtgcaccggtactgctggcaacgctggatgatttccaatgcgaggcacagcgggcagggctgttctaccagtcagcggtggggatggccatgcacgggattaacagctgtccggcaggggcggcaaagatagacggctggtggaatgagtacagcactaaaaatcgcgggaatctgctgtggcggcatgtggcggccaataacccgcagctaatcagtgaactggagccgtatctggcgacggtgaaagggaaaaaggacgaggacgtgacgcctctgacggcgaccgccatgacggcagccctgatgcagcaggtcagcaatatgaaaaagctggaggggtattaccagaaatcgatgaacactgtcgtgaaggggctgcgggaaaatgccagcaaactggaagtacagctcttcaacacggatgcgtttatcgtcacggtgggagacagggtaagccgcattctgcgggtggataaggcaggcgagaagcttgcgaccacggcgttcaggctgatatttatgataagggcgggaataccttcagaaaaagttcactcgttagtgaatgcgtatctgaaagatgccccggagttacgtcagacggtgctggaaggtatacggcgcagcggacgttttatggcgagcgggaatgaagtcgccgagcttaaacagagaatgagcagcaggctggaagagcactttgcatcagaaaagggcaaggccgaatatcggctggcgggaataaacagtctgttgctggtgctgaatgcgatggattttatctacctgtgcggacaggtaagggatgagaagaagccgctggcgagcctgctggccagcgggctggcgatggtgagtcaggggacgtcggttattttgccggcaatagaaaaaggtctggaagcgcgtgagcttacggtggcctgggtcaagggggttggggcggcagcgggtggaactgcgtctttaatttcggtgtttgctgatggtgcaagtacttacgaagagttgcaaagcaatcgttttttactttcctctgtattgcttattaaaacaacagttgatgtcctggcagtcacaaaatcagtcggtcttctgctggaacagtttagtcaaccgatagttaaaaaagtagctgggaaaattacaggttttttggcttgggaaattttagggatccgaatacttgcagtactgatgacctgggaagtgatggtagcgataactttgttacaggtggttgtgacctggatatcggacgatgagcttcagatatggtgcaggaaatgtgtatttggaacagcaccgttcaaccgcagtgtggcagaccagaataaagccttggaaggggcgataaaggatatttcatga

SEQ ID NO: 118836 - DNA, 267 bp, Enterobacter cloacae
atgactacaaaattagccgttttaggtgacaggacgagtaatgggaaaataatttctgcaactgcgaattattttagtgatggaaaacaggtggcacaaaataatgacaaagccatctgtactgtctgtaagggaacatttcccatcctggccactgcagttggtatcgtcagtaatggcatacttctggtacaggatcaggaccgtgtgctttgtctatgtcccggccataaagtgatcgcaggctctaattttttcactggctaa

SEQ ID NO: 118837 - DNA, 2373 bp, Enterobacter cloacae
atgagcagtaatcttcccttacgattcagccacagccatcacctgctttcggtgaagggctgcgatgcagggcttgatgtgctggcatttgagggcgatgaagccctgagcacgccgttcagctaccgtactgaattcaccagcgcggatcatgccatcagcaaagagatgatgctgatgaaagcggcttccctgacgcttcaggccccggtagaccagggttacggtatcaaaatacagcagccggtacgggtgattcagggcgtggtgaccggttttgaacgcctcagcacgtcaaaagatgaaacccgctacgccctgacgcttgagccgcgtctggcgctgctcgaccgctcgcaccagaacgcgatttaccaggacatgtcggttccgcaaatcgtggaaaaaatcctgcgcgaacgtcacggcatgcgcggtcaggattttctgttctcactctcaaaagaatacccgcgtcgtgaacaggtgatgcagtacgctgaggacgacctgcactttatcacccgcctgctgggcgaggtcggtatatggttccgcttcaccaccgacacgcgcctcagcattgacgtggtggagttttacgacagccagcaggggtatgagaaaggcctgacgctgccgtctgtaccgccatcgggccagcattcaaaaggcgtggattcagtctggggaatgggatgccatcacaatgtggtgcagaagcaggtcagcacccgggactacaactaccgtcaggccacgcaggacatgaacacccgggttgacgcgaccggcggggatgtcaccacgtacggtgatgcctaccactgggcggataactacctgacgccgggcagcgcgtatgaccgcaacccggcagcggagtccggggcgttttacgcccgcatccgtcacgaacgctacctgaatggccagacgcagaccgttgccttcaccagctgcccggccctttcaccgggtatgcggctgaaagtcaccggcgggtacgaagtggcggaggtgtttacccagggcgtggtggtcacggcgatgcacagccatgcccggcgtgatgcagacttttgcgtcaggtttgacggcatcccggacagcgcggacttttgctttcgcccggaacccggcagccgcccggtaatggccggcaccttaccggcccgcgtcaccagcaccaccgaaaatgacacctacgggcatatcgacaaggacggtcgctaccgcgtcaatatgctgtttgaccgtgagaactgggaaaccgggttcgagagcctgtgggtccgtcagtcccgcccgtatgcgggggacacctacggcctgcacctgccgctgctggcaggcaccgaggtggcgattggttttgaggacggcaacccggaccggccgtacattgccggtgtgctgcacgactcggcgcacggcgaccacgttaccatccggaactacaaacgcaacgtcctgcggaccccggcgaacaacaaaatccgcctcgacgacgagcgcggaaaagagcacatcaaggtcagcacagagtacggcggcaagagccagctgaatctcggccatctggtcgacagcgagaaacagcagcgcggtgaggggtttgaactcagaaccgacagctggggtgccatccgggcgcagaaaggactattcatctcggcggacgggcaggcgaaagcgcaaggactgcagcgtgaaatgcaagctgcgctcaaagaacttgacgctgccagagaggtgacttctggattacgtcacgctgctcaagcagcccaggcggaattagccgatcttgagaaacaaacaacatttatgaatcagacgcttagcgatcttaagcagcaagcattacttctgtctgccccttcaggaattgcgcaggtcacccccgcgagcgtacaagtttcggcgggggaaaatctaattgttactgctggtcaacatgcagacattagcattgccaaaaaattaactctggcggtgggcgatattctgagcttatttgcacacaaactgggaataaaaatgtatgcctcggagggcaaagtagatattcaggcacagtcggacgcgctgaatttatttgctaaagaaaagctttcggtcgccagttcagacaacagcgttgtcatatcagccaaaaaagaaatccttttggtttgtggggggacatttatacggttaagtgatgcgggggttgaagttggtactggcaaaaacgtcacgttgaaatgtattgcggttcaacagcagtctgcggcgacgttaaattcaacgctttcgctaccttctggctgcaaacctggggtaatttctgcagcccaacagcaaggggctgtggtgatgcttagctaa

SEQ ID NO: 118838 - DNA, 492 bp, Enterobacter cloacae
atggcaataccagtctatctgtggctgaaggacgacggcggcgcggacatcaaagggtctgtggacgttcaggatcgtgaaggcagcatcgaggtggtggcccaggagcataacctgtacatcccgaccgacaataacaccggcaagctgaccggtacccgtatccacaccccgttcctgttcaccaaggaaatcgactcctccagcccgtacctgtacaaggcggtgaccaccggccagaccctgaaatctgcggaatttaagtggtacagaatcaacgacgcgggccaggaagtggagtacttcaacacgaagcttgagaacgtgaagctggtgaaagtgaatccgaagatgcacgacatcaaggatccggcgttcgagaagcacaaccacctcgagcagattgaactgcgctacgaaaaaatcacctggacctacaaggacggcaacatcattcattccgattcctggaacgaacgcgccaccgcgtaa

SEQ ID NO: 118839 - DNA, 1707 bp, Enterobacter cloacae
atgagccctgcacaacagcgcgggcttgcgctctgggctgccctgctgagtgcagtggtctgcctgtggtttctgccagcatcccggctggtttccgttctcgtcctgctggcggtactggggctaatcatggcgttctgggctgtcgcctgccgtcgcgtgcagcacgatttcaccctgtgtctggaggacctgcctgaaaccagttattgccagcccgtggtactggtctgtggcgatctgccgcttgcctggccgcatcagtcaccggtacttactgtcacgcagggctgctggatccgtgtggaggatcatctggaactggagcaggccgcccgtcaggtactgtggttgcgccccgactggggacgtcagctgtcagtgatggtcagtgtttgtccgcagcagcaccctgacagtgaacgccttaccagtcgtttgcttgccctgcgctggcagattagtcggttgcgtaaagcaaccggccattctgtgccactggttctgaatggacaggtcggcagtgcgatgatgaatgacatgctctggcagacggcgatcctgggggaaggggtaaaggtctggagtgggacttcagcgcctggctcagttgctgaatgggttaatactggcggaacgcctgcgatgcatcaacaggtgcttatgaacagcctgatgagctggttccaacagcacgtccacgctgtccttatggatgaaaaccccgatattcctgtcattgaacctgttgcggttctgtggggattgggcccgatcctggccggaagcatggccacctctgtctggacagcgtggttgtcccgccatactgcgatgcagcaggtgtctggctggcagccggcgggaacggacagtacggttatttccctgttcccgaattttgtcctccctttactgccagaaggacgaggcctgacaccgcatggacgaacctggcgcggtgcgctcggaatcttcacgctggcgaccattgctgcactgctcagcagtggctggaacaaccgccagctgctgcaacgcgttagcttcgatattgtccgttacaacagcatcgccatggatgattacggtcctaaagccagcgccgtacaggtgctgcgcgaggatgcggcgctgctggatgagcatgcacgcaatggtgtaccggcccggctgggtctggggctttatcggggggaacgtctgcgaataccggtgctggaagcgatccgctcatatgtgccaccacctcctccaccaaagcctgtggaaaaggtcgcgccgaaaatcatccgcctcgacagcatgtcgctgttcgataccggaaagtgggcgcttaaacccgcctcaacaaagctgctggtgaactcactggtggggatcaaggcgaagcccggctggctgattgtggtcgcgggccataccgacagcaccggggatgaccagtcaaaccaggtgctgtccctgaagcgtgcggagtcggtgcgcgactggatgcgggacaccggcgatgtgccggagagctgttttgcggtgcagggctacggtgaaagccgacctgtcgccaccaacgacacggcggaaggccgggcgctgaaccgccgtgtcgaaatcagtctggtgccgcaggcgaacgcctgccagctgccgggcaacacccccgcgtcatcgcaggatgatggcgctgataacaacttaacggagtaa

SEQ ID NO: 118840 - DNA, 1341 bp, Enterobacter cloacae
atgaaaacggaacaaccgttatggggcaggggccagatggtctctccccagcacttccagcaacaggccgcgtatgcggcctggtctgcggaatgcatcgcccggttaggtctctcccatccctggggagtgattgaagccactttcgaaccggatgcactgaaactgggccgcctgcaggcccgccatctgcacatccgtttccccgacgggacgcttatcgacacggataatgctgacgatctgccaccggttctcgcgctggagagtgaatcaaatgaggtggtagtgatgctcgcgcttccgctgctgcgcgcgaatggtggcaactgtcttaagcctgatgaggtagccgggcgtcctgttcgctatcgccagcgctggcaggatatccgcaataccttcggggacgatacccgccagattgcggtaatgcgtcctgagctgacgctgcggtttgcacatcagaacaacagcgattacctgacctgtccggttgcccgcctgcagcaggatctgcagggggcgtggcagcctgatgagacgtttctccccccgctcctggccatcgagggcagccgctggctgttaacccagctcgaacagctgatgatccagctacgtgtacgcctgagccgactgatggccatgcgacgggaaagtaatgagcgcatggcagactttgccgtggccgacgtgtcgctgttctggttgctgaatgccctcaacagcgctgagcccgtgctggggcagtttcagcgccatccgcaaagtccgcctgaacgcctgtatccggagctggcccgcctggcgggcagcctgctgaccttctcgctggagcaccaggtgagtgcgatcccggtctggcagcacgagcaactgaataacgtatttccgccgctgtttgatttactgggggaccttctggaagccagtctgccatcgcgggtggtggcgattgagcttgagcacgatgcccggctgcacttctggcaggcccgtctgcatgatccgcgtctgcgtgaaggggcggattactacctctccgtgcgttcaatggtgccggtggctcagctgcaggagcagttcccgcgccagtgcaaggttggcagccccgatcatgtcagaagtatcgtcaattcatcgcgggtgggcgtgccgctgaccccgctgcgccatgtgccggcagccattccgttacgtctggaaaatcagtatttcagtcttgatgtctctcatcctcaggccactgaaatgctccagggcggcacctgcatgttttacgttccgggcatgctcggcgagcctgaacttgaactctttgcggtgctgagaacatga

SEQ ID NO: 118841 - DNA, 870 bp, Enterobacter cloacae
atgacagttatcaaccagacaacctgcacattgtttactgatgccgaacgattcactcaactggcggcttattatgaggccgaacggcgcacggtgtggatgatgttacgtgccacgccacggccttgcttcaatcatgcgctgatcgaggagatcatgaatctctcctggctggttcgccagtccggatatgtcgttgatttttgggtcaccggatcgctggtccctgacatctacaataccggcggtgatttacaattcttcgttgagtgcatcaaaaacaaccgacgcgaagcgttacgcgcctatgcccgggcctgtgtggactgcgttcatgccgcctcacgagggttcgataccggtgctgtcacgctggcgatggtggaaggaagcgcgttagggggcgggtttgaagccgcgctcgcgcatcatttcattctggcccagcgcgatgcccgattaggctttccggaaatcgcgttcaatctgttcccgggcatgggcggttattcactggtggcgcgtcgtgccggcatgaaaatggcagaggcgctgatctataaaggtgagtcgcatacggcggaatggtatgaacagcacggtcttgtggatctcttattcgagccgttacagagctatgtttcggtacggacgtttatcgacacgctacagccgaagctgaacggcgtaagggccatgctgcgcgcgcgtacgcgtgttctgccacttccgcgaagcgagttgatggacattaccgaggattgggtggatgccgccttctgtcttgaaccgaaggatatcgcctacatggagcggctggttatgctgcaaaatcgccatcaggcgacgggcttacgcaaagccagctaa

SEQ ID NO: 118842 - DNA, 300 bp, Enterobacter cloacae
atgcgatcctggcgctgggatgaactggacaatggtagcaaggtattgcgtatcacccacgacaagaccaaagaagcggtagaagtggagatgacggagacagcaagggaggtgctcaaggctcgttataacgagcgcggggataacgtgtatgtattccagaatgacagcaaccggaccaagggtaagccgattagccgttccaaaatccatgctgagattgagtatgcagtggacaagctcaaaatgcgggggcttgcttccacaggaagcagtgatcagtatgcactcgtcacgtaa

SEQ ID NO: 118843 - DNA, 501 bp, Enterobacter cloacae
atgattgagttggcatcagaggttgttaacttcattgtaaataaaattggattgattttttccttagctgcattggtgttatctttcttgagctataggaacagtaaattagtaaaaaagaagagcgacaaagatgttctttataaatttaagacggaaaccttactcaaggcgcgggaatttgaaattgcttttcaagattcatatgataagataaatggctttgtaaaagagttgcaaggaaataacacgctctttgcagagccaaagaatgtaattttgaatgagttgatttcacagcgtgactctttctataagcagtgcgtgcttgacgccaaagcaacttgtttaaaattaattgataactttgatacattaagtgaagatgaaattgcggagtatcataaggtttttaactctgaattggagagattaaaagcaaataataaaagattggattcaaaatttacgtctttaatccagagtattgcagtgaaataa

SEQ ID NO: 118844 - DNA, 465 bp, Enterobacter cloacae
gtggatacagtcgaggaactcaacggaacatacttctatgcggggcgttcaaacctcaccgcctccgagctttttttcatggtcttctgtgaaaatgttgttgatcaacttggtttaggtcttgttgatttcggtgctgtagttgccattgtatctgggcgtaatactctccctacaagggcgaaaccaaacggcgctgaaaagggaacatcctatgcgtctaaagcctcgcgaaaagtgttcaaaaaagcgcagttccctttcggtatcaaactaccttccgttattggtggttatccaccttctacaatcagaatcagggcggtagctaacattggaacctttacgggcagggctattcctgtcgtggggtgggttatcttagcttctgatatctctcaaatcacctatcgcactatccgagactacaacgctatagcgcggggtaacgataagttatggtaa

SEQ ID NO: 118845 - DNA, 261 bp, Enterobacter cloacae
atgagcatttacttcactgaacatggtagtgccattggataccaggtagaagggcgttggacagtcaagggcgattatttgcaggtcaaccatggtcccaacattctaggcggtttatacaaaatcaacgacaataaagtgaaattcccattcgactacaaagaagttgagggagtgatcgacactgagaaactcactttcaccgtgtgtggcatcgaatacaaaatgagaaaaattaaaacaaatccgtgggatgtataa

SEQ ID NO: 118846 - DNA, 672 bp, Enterobacter cloacae
atgtgtggacgttttgcacaagcccaaacccgtgaagaatatctggcttacctggccgatgaaggcgatcgcgacattgcatatgacccggaaccaattggccggtacaacgtggcgcccggcaccaaagtgctgctgctgagcgaacgcgatgagcagttacatctcgatccggtgttctggggctacgcgcccgggtggtgggataaagcacccctgataaacgcgcgcgtcgaaaccgcagccaccagcagaatgtttaagtctctctggcagcatggtcgggcgatctgttttgcggatggatggttcgaatggaagaaagaaggcgacaagaaacaaccctacttcattcaccgtgccgacggccagcccatattcatggcggcgatcggcagcacgccgttcgagcgcggtgatgaagcggaaggatttctgatagtgacgtcagccgcagataaaggcctggtcgatattcatgaccgtcggccactggttctgtcgccggaagcggcgcgcgagtggatgcgccaggacgtaggcgggaatgaagcggaagagataatagccgacgggacagtgcccgccgacaagtttatatggcatgccgtttcgcgcgccgtgggcaatgtgaagaaccaggggccggatctggtcgagccgctttcttga

SEQ ID NO: 118847 - DNA, 318 bp, Enterobacter cloacae
atggggtttgcatcacctgcaagcgattatgtcgagcgccaactttcacccgaggtgatttgcaacatcggcgcagaaagtagggtgcttgaaactgattcaggatttgcagtcattgagccagcagccaagtgcgcgcccggggatgtgctgcttatactttgcgatggtcatacgcagtttgccaagttgatgggaaagtcgctcattacagatgatggagaggcaatagaaggaaacgcactgcaagaggtcgaagttcttggccgagtgacgttcttcatcaaccgcgcaatagacgacggattgccgatatga

SEQ ID NO: 118848 - DNA, 240 bp, Enterobacter cloacae
atgccacgcacagcagacattcatgccgcgtttgttgcggccatagagttaaaccccaaggggtatcgttacctgagcacagacgcattcatagagaaattgcggcagttcaactggcactacacgcgcgaagaagcgaatgcctggatagagcgataccaaaaagactttgctgacaagacgacagacggtagcgataacaggtactggatcctgcgtaacatggggagggtccagtaa

SEQ ID NO: 118849 - DNA, 363 bp, Enterobacter cloacae
atgttaaagctctttgctaagtacacatctataggtgttatcaacacgctcattcattgggttgtgttcgccgtttgcatctacgcattccatacaggtcaggcacttggcaacttcgcaggattcgtcgtggcagtgtcattcagtttctttgcaaacgccaggttcacgtttaagtcctcgactaccactctacgctacatgctctacgtaggattcatgggctcacttagcgcgattgttggatggtgcgctgataagtctggcatggctcctatcatcacgttaattgtgttctccgccatcagtctggtgtgcggatttatctattcaaagttcattgtctttagggatgcgaaatga

SEQ ID NO: 118850 - DNA, 1482 bp, Enterobacter cloacae
atgattagtcagactttgggaaaagagattcacataaagtggttgttattcacatttgtattcgcagttgtggctgtgttttttacggttattcatccggtaactattacttctggcgatgagtggatcaacctttcttccggtaggcaagcatatccgcaatggggcggttttaaccctatcaaggtagttcctgaggtatctttcccactatttggtaacattgcctcatctgtcgttatgcctcttgggtttacattccttgaagctattgcttatttgacagcggttttagttgcagttcttgttgtgttattcctttatcaattctatcttttgatgaggaagaccgcagggttatcaacttacacaagttcagttttagtgatcttctacttactgtgcctgttcggcctattcagaactctaaataataataacagtccatacctgttgtgggagcaaaatcttacctgttattatcactatattgttccagccctaataaacggcacgctggcactttacgttttaagaatgtcgtcaaccttaaagccattcttttacgaaagagcgatcttttctggtgctctgatattcgccatttacctatgtgtattttcgaacatttttgccagtgttgtgctagcagtaatgtgcggtgtggtacttcttcagaacctcattagcaaaagatttaaaattgttgagacgattaaggataaccctttccactgcattactctggcgatgtgggtaatttctgctctctttgaaatgaacggaggaagagcggaccgaatggcaaaagatcatctggatatttcaggtacagtcaatgcattttactcactgcttaaattaacagatcgcacatttttcgttgtgctgactgttggatttgtttgcggtgcagtgttcttgctaagaagaaattcagatgaaagtactgaaggtaaaagatacgctttctgggtatcggttatctctggtgccatcactacattggctcttattctggtgtgcgcaaaggctagtgctaactatgctactcgacctgtggcaatgtggggttcttttatgtacttgatagttgctgccagtttgggcttggggtacttcattgagcgctttaaggctgttcactatttcgctccaatagttatgctgttcttaattaacaagaccacggaccaatctcattctttgcgagagtcaaatagtgggaacgttcctttttcagttgcttacgcgataggtcaagatatgattgagcaggtgcaaaacgcagttaatggaaaccaacgcacaatgaccctacatgtgcccaagggtgataacaatgacaactggccgttcccggtaacaagaggaaaagctatttcagaaactcttaagtccaatgggttgatacctcgtaacattgagataaaaatccagccggacagagaaatgaatgccaaatatggtatgccaatctga

SEQ ID NO: 118851 - DNA, 2025 bp, Enterobacter cloacae
atggctactacacctactaacctgccagtaccgagcgaatctccgttcgatttcaaattcaacataggaaaaatcgacgaggttgttacctctatggggtggacctataccgatcgctttggtcagaagcactacaccattgagggcatcaactatctttcccagcaggcaatggccgccttcggttacgttatccttaccgggaaaacattcaccaccggcgcgactatcaacaaccctaatgaggtgctgctgaacaccgccgacggcgaatattacaaatggactggtacgtttgcgtccggcccgaaagttgttccggaaaactctacccctgccagcactggtggtattgcgcctgggtcctggcttggcgttggtgatgcctctcttcgtgcagcactggccgcgatggatggcgagaagttaattggtgagtgtccagacattgctacgcttcgaactatagagccatcctatgacaagcaacgcatcaccctacgggagcacaccgcaaataccggctatggtggtggtcagttccgggccgtaatgtcaggatcgtcgtacgctgacaacaacgggacaatcatcaaaactagcggtggcgctgcatgggtgcgggtaaacgtcggttatatatcaccgtatatgttcggagcgctaccgagggttgatgccactacccctacagcacatacagccattaatgcggcggcggcagccgctgtgtcacaaaacgccatatttgatggtctcggagctacatttaatgtaaccggggaatgcacaatcaacaacagcaactccataatttttcagaatatggttcttgtcgttactgatgtcgctgcgtctttcaatgttgtgcgcgtgcgcaacgcagaccacactatacgacgaatacgtattgaggggggcaactctaaagttcttggtattaatgtagaatctaccgcaacaggtactattgttgagagctgtaaagtaaccaatactgggctaaccgcgatatacagcaccgcctcgcgcgttgttgccaggaataaccagacagactcttgcggtcttttaggaacaggcaactaccgttgcagtatctggttcaacgagaacgaacatgctgttatggaggggaacatttgcaccaattgcgcttggggaatcctaatgagaaataccataggaacatctcaaggttactttaataccatgcgtaacaacattgttgtttccgcttcaggtacgacagcagactgccaggggatatcagcatctgcccagatccacctgagcaccactgataatattgtgcgcggtttcccgaataacgcaattgaccaccagaactgcttcggcatgattataaccggaaatcagattcaccaatgtaacgatggagtgtttatcggagacaggtcttgtggccgcatcatcatttcaaataacaatattgaggcctgctttacaggcatccggtattacaacccgtcaaactcaacccctgagtatcagaatcagacttttgccgatgttcagataacaaataatgtcatctatacgtctacatcacgagctatctgggtgattatgactggaacaacttcggctaatttcatgacaaatgtcaacggtaatatagttgacgggaacggctccgcgggtcttggtattgttatggatactgtgacatacggaagtgttagccagaaccaagtacgaagagtcaggggccatggtattgacttagcatcctgtgaggggctgcgggttatgggtaatagcattgcggatgccgggtttaccacaaccggcacgtacaacggcattaatctaagcaattgcaaccgctgcaatgcatctgataactacgcagtagggccttctatgatttattctgtggtacttggtggcggggcttataacatggcgtataccaatcacgcgcgatcaacctcaggagcgacggcagttagcatttccggtggtactgggaacgtagaatcattgaatattaagtcataa

SEQ ID NO: 118852 - DNA, 2478 bp, Enterobacter cloacae
atggcgctggttgagatatcgaactttccaggaacgcctaagctgcgttgcagggtgccaaacggcacccttttttatgactggctggcggccaatgacgctacctttcaccgcgatctgcttatcgtccgcaacggcgtaaagctgggtgacgatgatgagctggcgtttgaactgagtgagctggaccacatccagatattcgaccaaccaaaaggcattgtcggcgatatcctgagcccgatctttaaagtggtgggtcaggtgttttcgttcctggcaccgaagcccgctatcgcaaacaacggcggtaataccgtcgactcgcccaacaatagcctgaccggtcagacaaataccgcccgcgtttacaaggccaagccggatatctatggccagattcgttcgttcccggatctgattcaggagtctgtattcgaatacgttcaccagacgtctaccgacggcggcctgaagtacgttacagagtggatgtgcatcggaatcggtaaatacgattacgagtcggtgcgctactcagaatccagcctgggctctctggctggggccgaattccagttcttccagcctggagaggtcattcctcagatcgtcgaaggttacgggttcgatgacgtcgacgggcaggaggttcccgggcagaacgaagccagcgacttcccgattgaaacagcaacggcaaacacagtggtcagcggaacgtattccggcggacagatagcgatgaaaatcgtcaagcaggctgagtttgactatttcatggggctggtgctgccgcacgcggtgactttcaccatcaacgtgacgtacagcacggcctccggcaccgtgactaccgatgcgacattctccggcactctgatctccgccgttgaaacaaacgatggcgcagtggtgaacccggtgcgctggtacacgtttacgatgaaccagcttgagggtccgcaggacatcccggcgaatgccacgatcaacaccacgaagttcgtcctcaacgataacgaggcgctggtggttgggccgttcttttccccggtcgagtcaacgcagctgtggcttcatacccagtccagcctgggcgggaagaaagagacgaactggaaggtggtcatctggaaaattgacgacgactacaaccaggtaccgggaacgcaacagaccttcacgtaccgacagacgacgccgcaccagtcgacgagtgaggtgttttatcgcactgacaagatcactccgaccggaggattcgggaaatacgcggtaagtttccagcgcaccgataattccagcgacgcttctctgctgaaggttgaggagatccacagcatcaacatccgtacgaacgtcgttcaccctaccgacacactggtgcgggtgaaggtgagggcgaccgagaatgcgctgggaagtcgtgagcgcaaatataatgcgctggtgacgcggcacaccatcacgtacgacctggacacgcagacggtggattacacgctgcgtccgtcgcgctcgttcgctgatgcggtgacgcatacctggttgattatgggtgaacagccggtaagcagcattgacctgtatggtctgtactctattgctgagagcctgcctgacgagcgtcttggctacttcgattacacgttcgatgatgagaatgactcgcttggcgatcgcgtacaggcgatctgtaatgctgcgtcggttgtggcgtactgggacgacggcgtgatgacgtttacccgtgatcagaaggttgactacccggcggcagtattcaaccgggccaacatgaagactgacgagtacaaaatgacgtacgaagctactcttccaggcggttatgacggcgtgcaggtgtcctatgttcacccgaccacgaacaacaagacgtacatcaactaccgcgtgctgaacggcgccatcgtcgagcaggaagctgagaaccctaacaagctggagatagtcggtttccgtaatgagtaccaggcgcgggaacgcgcactacgtgaaacgaaacgcctgatctactcccgggtgaagatgaacgccaaagtgttcgaagatggcattatccaggtcggaagcgtcattcagatgccggacatttacgacagcaaccagcagggtggttacgtcaccggccgatccgtgaatgacttcgataccagcgagccgatcaccttcacaggttcgatgtacgtgctggtgaccgacagcctgggtaatccgactctgcgctatccggcgacggcccgcggtgacacgaagtacggcttcactgcagcaatacccgatattcagctcaacatatggaacggagacactgtacagctcccatcgcgctatctcattgcgacggttgaggagctggacagtcagctatggacggttaacagcatcaaaccgaacaccgataacacggtatctcttaccgtcgcggaatacagcgacgccatctaccaataa

SEQ ID NO: 118853 - DNA, 393 bp, Enterobacter cloacae
atgactaaagatgaatttattcggctggtcattggtgtgccgtgggctaaccgggcctgctcgtttgagaaagtcgactgctggggattgtgcgtgttgttttacaggcatgtgctcggcattgagctgcaccagacgccggactacgaagccggggccgacttcttcacctgctatcagggcgacgtcgtcttttggcgccaggtcgataaaccggtagagggcgggatattcgtggggtatcgcggcgcgcaaccggcgcatgttggtctggtactgaacaggcaggcgctgcactcccgcggcgagaatggaagcgtgcgcatggactcgttgctggtcattcagcgggcattcaccaaagtggagtacttttcgtatggcgctggttga

SEQ ID NO: 118854 - DNA, 471 bp, Enterobacter cloacae
atgccatcttttcgtcaatataagcagcagcgcccgacgcgcggtctgtacgacaccatcacgttctaccatccatcctttggctatgtgcgcctggtagacaagcagttcttcccgaagacgcttggcggcaagacgtacacgccagcgcgttttgaaatcgaagagagccagcagagcggtacgccggtaatcgacgcgacggtgaaattagggcggctgtcgtctgacatcaaagcgctgacgaagcattggaagggggcggcccggctaacagctatcacggccacgcggcagatcttcgacagcggagatgtgtctgtgccgattaaatcctggcagctttatgtcaagacggtggatatcgatgccgacgccgcatcggtcactctgtctgtgaccaacccgctcaataataatattggaaaattatacgatccccgcgaatacactggactccagtacctataa

SEQ ID NO: 118855 - DNA, 498 bp, Enterobacter cloacae
atgccaattatcgactatcccgactggctgccgctggcgcagaaggccagcaaaaacatgacgcttgataccgggttccagaccgatcagccagcggtcggcccggcaatcttcgagaatcaaaccgacgacctgaaagtgacctggtcactgacgtggatcttcactctggcgcaggagcgcgctttccagcagtggctgcgcagcccgaactatctcaaccggggcctgaactggttccggatgaatatcaatctgggcggcagtggcctgcaattgcaggagcttcacttcacgcagatgccggtgcaaaccagtatcgacggcggggtggtgacctggacaggaaccgtaattgccaaccatctgtataacgccgacgatgagttcgacgacatcattgttgagcttccgccgccttgggattcgtggctggatatcgtggttacgggttatccggacgggcgtgatccggaaagtctcccgaggatcccctga

SEQ ID NO: 118856 - DNA, 228 bp, Enterobacter cloacae
gtggtaattgagccgggcgaagtgcagtcaataccaactgagataggtaaaccacacaggatacgcccgaacagggcggtagagtttgtgtttactctaagtgatggatcaactatcaagggcataacgcctgctggggaagagctggaatttaccaataatggcgatatcgttgacataaaaatcaatatttacgaggcaccatccgggccccggcttgttgattaa

SEQ ID NO: 118857 - DNA, 3450 bp, Enterobacter cloacae
atggctggcaccgttagcgcaggaacaatcgtttacgaagtggatatggacaccgccgggatccttcagggacgccgggatattgatgccgcgttgaatgggcttaacggtagcatgggtcgtcttgaggcgggattaaaccgcactgagcgatccctgtcttcgattgaaggcactatgtccagcttaactggcgtcgcgaaagcgctcatagcagctctttctgtccagcaggttggcgcatatgcccaggcatggcaggacctgagtaataaactggcaaacgcagtcagggattccgtaccgccgtttgaaacactggctgatgtcacagagcgtgttttcgacatctcgcaaaagacccgctctggtcttgatgccaccgccacgctatatgcacgactggagcgctcaacgaggagctacggcgtaagtgtagaggacatcaccaggctgacaaccattattaaccaaggttttgtggtgtcaggggcaacagccgaggaggcgagcaacgcaatcattcagcttgctcaggggctggcgtccggcgctttaagaggtgatgaatttaactctgtgaacgagcagggtaaccggctcatgattgctcttgctgactctctgaatgtcagcattggtgctctcagaaacatggctgcagagggtaagttaaccactgatgtgatcgtgaatggattgctctcccagggcgataaaattggacaggagttcgctaaaactactgcaacgatcagccagtctcttgaaattgccaacaacaacataacgaagttctttggtgagaatgccactgtaaaaactggcgtcaaaatattcagtgactcagtcatttccctgagtgaaaacctggacgttctcagcactacgctcacaattgttgccggcgtaatgggtgcgaggtatgtcggtgcgctaaccatggctacctcagcgaaaatcgctgatatcgccgcatcccgtcagcaggttgtagcagacaatcagacggcacaggctgctttggtggccgctaattctgttcagcgtaaggctcttgctgataaggaggctgcactttcgtcactcgccctggcacaggctgaatataacgtggcaaaaggtagcgctgcagagatgctggcaatggatgcccttgtagccgcaaaaaccagggctactaccgcatctattgctcttgccgaggctgaaactgcccaggctgctgcgtcggcccgtgcagcgacagctgctcgtgcagcgtccattggtatcggaatggctcgtggtgcgcttgctcttataggtggtccagcgggggcggctatgcttgctgccggagcgatcttctatttctggcagaaagcccagcaggcaaaagatgaggctatcgccttcgccgatggcctggataagctcaacgccgccatgagtgcaatgtccaacacgcagctgcgtggggctattgcagatgccaataattctattcgagctcagaaagaggctgtcgctgatctgcagagtgaagttgactcgttgagagatcggtatcagaactttaccccggcagcgcagaaggttgccgagtccatggggcaaggtgcagatttcgcccgccaacaagctgaggtttctgacgaactggctcgcaagacgcgtgaccttgaggcagcaaaggataaattatcccgaacagaagagaccgcgtcagaggcgacccgcacactcacgaacaatatgcttacggcgatgggcgttcatgatcagcttatcgaaaaatcatggtcgctcgagcaggttcagggcgcggtagcgaaagcctttggagagacagctgatgaaataaaccgagccaatcaggccggaaaaagtttcgaccccaaagcgctgcagatatctcccgcgaccaaggagggcgataaagttatcgctactctggaagagcagaatgaattacttaaaattcaggacgagagagagcgggcgatagccaaagccaggatgcagactgccaaggtcactgacaatcagaatcaaatctctgcagctggcaggctggctgctgaaaattatgatttagagaagtcagaagaagccagaaaaaaagctcaacaagagagtgagcagcaggggaaaaaatcagcgtcttctgctgaatctgttgctcagaagctggcaaacctgaagcagcaagcagaactggcggctgggtcaactcaagaactcagcagagagcaggccatgcttaatgccgagcaatctcttgggaagggcgcgactctggcccagatcgcagaggcccgccagtacgccgctacaaaatgggatacggccaacgcactcaaagcgcaggccgcagccgagaaactcctgccagaagcgcgtgaaaacgccagctataagcaggatgttcaggatctgaaaaccgcactggctgcgaagaaaataagccaggagcagttcaatcagacatctgaacgactggaagcaacacaccaggcaaacctcgcaaaaatccgcgcgcagcaggcggtgacgccacagcaagaggcagttgcacaggttgatccagtgcagcaattagctaatcagcacgcacagcaactggcccttatccaacagttcgagcagcaggggttattagctcaccagaatgcattagcccttaaaaatgctgccgatacgcagtatgagcagcaaagaaccgctgcacaatgggagcttcttagccagcagagcctggggtacagcatgctgacaagcgcggtggatgcgttttcaggtaatgcatccaatgcgttaaccgggctgatcaccggaacgatgtcagcgcaggatgctatgcgctcactcggtaacacgatgctgaatagcgtggtaaatgcgctagtccaggttggggtagaggctctcaaaaacttcattatcggtcagaccctgggagcagcagcaacggcagctggcgtgtctcaagctggaattctcgcttcggcctgggctcccgccgccgcttttgcgagcctggcgtctttcggatctaactccatacctgcaatggcaggtatagcttccactgtaggattgtcgaagacacttgctgttgccggggcaaggaagaacggagggccagtgacatcaggctcaatgtatcaggtcggtgaaggtggtatgcctgagatttaccaggccagcaccggtaagcagtacatgataccgggcgacaacggtcgggtgatcagcaataaggatatgcagagcggaagtggtgtaataatcaacaatatcgtgcagaattacacctctgctaccgttgattctcagggtacagtgaattcagatggtagtattaccctcactacgattatcgcggatttgaacaatggtggcccgataagtcagggtataaccagtaatttcaacgtgaaaagaaccccgaacggtcagggataa

SEQ ID NO: 118858 - DNA, 321 bp, Enterobacter cloacae
atgtggaaaaaaacaatatcagtgatcgttgtcatccttatcgctttttcaatttttgtatacacaagcatttcgttttttgctgtgcagccaattggtgcgatccctgaaggtgctacgtttataatgtggaagaaggggaaaatgagtacattcgaaagccctgacggattatgcatcaaagtaaccggcggggtaagtctgatgtgtcgtagcatgatgcttagaacagctacggatgaaggggccgtgctctttaaaatgccatatattaagtctatatacttaaagtcgactggcggtaaagagttcgacagatag

SEQ ID NO: 118859 - DNA, 675 bp, Enterobacter cloacae
atgacaccacttaaagaaattggcgaattacttattagtgttggcccggatgatttctttttccggccgtcattcatcaatatgaccagaattggcgcgccagcagaaatagttcagacattttatgaccttcatcatgacgaagtgactgcgcttattcagtcggctattgatgcgtacggctacataccgccctggctcatcacacacctaaaaagctcgacatatggacgcaaagcattaattgctgcgtccagcgtgctgtcgtcatgctgcgacaaagatgtcacttcacttacaggtgaattaagggtctccagggtcgcagggaaggcattcaaacttcgacgcggcttaatggacgagttcgacatgttggtcattgcccagtcgctgatcacccacgggattattgggaaagcgaaagtaagacaccttcagcgccatgaaagcggagaggcaacatctgagtttagagccttcgagtacatcagcgcagcacgtaaccactttggcatgagccgggcggaagcggagcagttatcgatgacggaatttcagctcttaattgccgccaaataccccgaccagaaaggctttacaaaagacgagtacgacgcggttgctgatgaatatctggcgaagaaggcgcgacgcctggctaaatcaggatag

SEQ ID NO: 118860 - DNA, 741 bp, Enterobacter cloacae
atgcaaggctgctctactgacaacagtaagctatttggtcgtgccgttgtgttagaggtggccttgggctgccctgacgcagttccaccggaaagcgagcgtcaatccctcatggcaggcacttcaaagggtttcgacttcagccctaacacggtcaccagcgacgctgatgatacgaagggatacgttgaaaatatcgtaactaactcggatttcaccatcagctttgaaggtgaggtgcgtaaacgcgacaagttggatcaatttggcgttggcaagttcatcaaatactacaacgatgaagttaaagcggggcgccagccaaccatttgggtgtttatggattatggtccggtgcaatttcaggggtacatggttattaccgcacttagctctgatggcggcagtaatgacattgtaacgctttccacagagttcaaagtggcagactcggacactatagatgttcaggaaacgcctgatgatgtggctgttgcaagcgtcagcgttacccccgcgacaagcagcggtgctgttggatcaaccgttcagcttaccgcgaacgttctcccttctgacgctacagataaaaccggtacctggacatcgtctgaccccaccaaggccacagttagctctacaggacttgtgacgcgagttgcaaccggcagcgccacgatgaccttcaccactaatgacggtgcaaaaaccggaaccagtgcaatcacagtaacggcgtaa

SEQ ID NO: 118861 - DNA, 390 bp, Enterobacter cloacae
atgaagccaatgatgcacgagcgggttagaaacctgtttgttaacgcagggctaacgtctggatttactgtccagcaattgatgtacgacgacccagggaaattatccgaggcgttaatggtattcaggcctaacggcggcacaaacatccgcaacgagcttggctctgaatatcacgtgatagtcgatgttattggcgctaaaggcgtaggtgccaaagacaaagccttaaacgccgttcagcgcatcactgattacgtccaggctaatcctattagcgatagctgtgtgggacatatcgaaaatatggggggcatcccgccaccggtattaaccgaagagggaaggatagttttccgacttcaattcgcttgcctctacggggagtaa

SEQ ID NO: 118862 - DNA, 369 bp, Enterobacter cloacae
atgggcatcaaattgcgaggtgtccagcgtactgtgcgcaacactaaccgcatcatcaacgatattcaggggcgaaaaattgtgcgtgcccttcagtctgcgatgctaattggcggtgctagagctgccctctacactccaatcgatacatcggcgctgattaacagtcagttcagggaaatcataaccaacggcgcaattgttaccgggcgcgtggggtattcgacgaactacgccgtttatgttcacgatccggccaaccctcagcaatttagacgctccacagctaagaaagagttccttacgcttggattcgaagaagaacgaagcgctattgatgctgctgttgccaaggagctttccctatga

SEQ ID NO: 118863 - DNA, 351 bp, Enterobacter cloacae
atgtcatcggtagcgaactggtcatacaccgccacggcgacaatctggcgcaaactggaaggcaatgacgaatacggcgacccaatgggatatgccgtacctgagcaaatcatggtggattacgaaggtggtctgtcaaagcgtatcggtagtctcggcgcggaaatcgtcgtgaagaataccgtgtggacggagttcgcgctggcgaccgccggtgattacctgctcattggcgtttcgaccgaagccgacccggttgtagccggtgctgacgaggtgcggcaggttatccgctatgccgacacgttcgagcgcctggcggatgattatgcgatactgacaggcgtatga

SEQ ID NO: 118864 - DNA, 174 bp, Enterobacter cloacae
atgacgtacaaatcagtgaagcacggtctaccgcgctcgttcacccgcgtatgggtgatgaccgacaccgggcgggagactaccggctacgttaaatcggatggtgagtggcatatcaactgtgaccgcatccgggcgactggcgcgaaggtgctgcgctggaaggagggctga

SEQ ID NO: 118865 - DNA, 381 bp, Enterobacter cloacae
atggctgacccaatcacagcggcagacgtgcaggcgttcctcggtgaattgggttactccatcccgggcgcgctgctggagccgattctctgcgtggtgaacaagattattccgtgcctcgatggtgcgggttatgacgactgcaccgcgaagctgatcctgatgtacgccgccgcgcttatggctacttcgtccggcgcgcgccgcatcaaatcgcagggtgcgccgtctggtgcatcccgttcgtttgattatagcgacgacagcattacctggctgcgtgattcgctggcccggattgataccagcggttgcaccggtgagttaccgatcagcgcaggtaatggcgtcggcctgttcatggtggtaggggggtgctga

SEQ ID NO: 118866 - DNA, 288 bp, Enterobacter cloacae
atgaaaaagttaaaagtcgagaagactggctgctggggaacgattaacggcgtattccagcaactgccggtgggccatgagttcgttgcggttggtgttccgcctgctttcgctggccgcgtatcggtcgttggtgaagttgaagagcaggagcttgaagttgccacacctggtgctgacgataaacctgcagagcaggcagagcaggcagagcaggcagagcaggcagagcaggcagagcaggcagagcaggcagacaccaccgctaaatcgaaaaaggcgaaataa

SEQ ID NO: 118867 - DNA, 534 bp, Enterobacter cloacae
atgctttcaggtgatgcgaaagtgaaggtgaaggggtatgttggcgcaggcatcaccaaccacgccaacaccaaccaggtggacctgagtgcgtccggtctgaatatcgacctgaccaccgccacccctgacgagatggtcgcattcttcaccggcccattcgcgaagctcctggacgataactacgtgcaggagaaggtgaaggtgtgggtgtcgcctgacatcatgcgcaacatgagcaaaccatattcctccgctgccggcttcaaagaaggcaccgtgctggagtacatcctgcgctacggccgtattgagtctgttaaccagacctttaagctgacaggtaaccacttcatcgcgtacgtgcgcaattcgcagtacatcaaaacgcgcattgccgcgccggtgggcaccttcatgatcccgcgccagaacccgttcgacaactacaactctctggtctggagtgctgtcggtctgcagattaagcgcgatttcaacggtcgttctaaagtgttcaacgcacagggttaa

SEQ ID NO: 118868 - DNA, 462 bp, Enterobacter cloacae
atggctctcgcacctcgtttccataccgtaatcgcgggcccggcccgtaagaatgacccgcaggtcattgaagcaatcatggcggcggccgtgaagcccggctcactggtaatgctcgacagcaccgggaaactggcggttcacaatgtcgctggtggtgcaggcgttgctctggctcttcagcacaactatatcggcggtggtgacattcgcgactcggttcctgcaggtgataccggcgcggccatcatgtgcgaagacgatgtggattaccacatgctggtcaaagcaggtgaagtgttgctggaaaacgaaggcctggtttctgccggtgacggcacgcttgccaaggcaacaacgccagctaccgaccaggtcctcttctattcacgcgaaaaaatcaccgttggcgctgaagctcagctcgtgaaagttcgcaaatcagggaaagcaaccgcatga

SEQ ID NO: 118869 - DNA, 1371 bp, Enterobacter cloacae
gtgaagctatccagcatccacgttaaatccctcgccatcaacgcctccaacatctcaacgaccaccatcaacggccaggaacactacgtcattcgtggtgcggttccgatcgtcgatgacatcgtgatgaatggcggcctgtacccggcggaggagattaacaacagctaccagacgatggagcgcaagttaatgccgatcggccacccgatggtgaacggcaaatacgtcagcgccaacgatccgcaggcggtcaacgattactacgccggggcatgggctcagaacgtcagcaaggccaacgataaggtcgtgatggacgtttacgtcaataaggctgtagcagataccaagcctgacggtaagcgccttatccaacgcctggacgacatgatttccggcaataacgccgatccgattcatgtctccaccggactgctgctgaacaaagagcaaaaggcaggggaatcgaaacagaagaaatactcctgggtcgctcacaacatgcagttcgaccacatcgcgatcctgctcgacgagcccggagccgggacgcctgatgaaggtgtcggcatgttcgttaacgctgacgggcaagaggctgatgttgaatcgacgagcctcatcgatgcagccaacagcatgaaagtcggctggtggaacaaagtgaagttcttcatcagcaacgcttcagagatgtccttccacgacatctaccaggcactgcgcatgtccataaagcaggacgacaaaaagtggcgctacgtcgtcagtgtctggcctgaccattttgtttacgaagaggatggcgagaacgtcaaaccgaagctcttcgaccagaaatacctcatctctgacaaagtcgtaacgcttgtcggcgatccagtagaagtcgtgcgcaaaccaactgagtacgaagtcaaaaccaacggagaaacaaacccgatgaaagagaagatgatcgccgcgctcaatgccgcaggcgttaaaaccgaggggctgaccgacgatcaggtctgggatgcctacaaccagcagatgaagaagaaagatggcggcggcgacctgggccaggctcagatcaactctgatgtgattactgccgctgttaatgcggcgctcaccccgctgaacgaaaagctgagcaagcttgaaacccagctgcaggcgaacgcagaaagcgacctgaaaaccaagcgcgatgcggttaaagcgaaattctcgttcatgactgaagcggcgatcaactcgctggctggcgacgcgctgaacgacttgtactcacagtgccagaccagcaccggtcttaaccctgcattccaggggaatggcgctcagagtgaaatccttaacatggaggcacctgaataa

SEQ ID NO: 118870 - DNA, 204 bp, Enterobacter cloacae
atggaaaaatatatcgtaacttatcgcgcttttggacataacaacgttcaattgggagaagggcatacagctgttgagtatgcggaaggaagttttactgcggtaggttttttgaaagatgttgaagacgaggcgctaactgatgcccagagtcgccatcaaaacgcaatcagaattatcattaactctgtatttaagctctag

SEQ ID NO: 118871 - DNA, 987 bp, Enterobacter cloacae
atgacaccggagcaaaagacgaaagtcgggacaccggtagttccgcgcagcaaggttgacccgacgcgctcggcaaagcaggttaccgcgatgtaccgggatatagaggagcggtatctcggcatcaagcgcgcgctaaaagcactgtttgaccagcggctgaccgggcgagatcgtgaggtaaaccgccataactggcacttcctgtgccacgaccatggcgaggatatgcggctctaccaggtcaacgctggcaagttcatctacgacatgtcagcacaggaactggctgatctgctggaagcggtgcaaggcattctcgacgattacctgctggaaggtggcgagcaaaacctctgggcgatggattacgtcgttgcagaagcgcagcgcggcacgctggaggccttcaacaacctttcgcagcagtcgcaggtgtacgccagccagacgacgttacagcaacttttaagcagccccggtcaccttaatcaggtggcggctgccaggctgacaacgtttagtgactggaaggttatcagcgacacagcccgcggcgatttaaccaacatcatcaccgatgcggtagcgcgcggtgtaaatccacgcgagacggccagcgtcatcagtaagcgtcttgacgtatcgatgtcgaaggccaagaccatcgctcagactgagcaggtcggcgcgctgcggcaggcgcaatggaacgaaaccgactgggctgctgaccggcttgggctgaacactggcctgctgtggctgtcagcgctcaagcccacaacgcgcacctggcacgccagccgtcacggcaaggtctacaccaccgaagaggtgcgggacttctacgccgagaacggcaaccggtacaactgctattgcagccagattccggtgcttctcaacgacgacggcagcatattcaacgaagggctggcggataagttggcgaaagagcgaaaaatctggaataagactcaatga

SEQ ID NO: 118872 - DNA, 1476 bp, Enterobacter cloacae
atgaaacctgagcacatcaagctgctgtccgataaagactggcggctgaataacctttactggatcaccgacaaagagggcaagcccacgcgcttcaggatgacgcctgagcagcgggaatactttgaggggatccacacccgcaacatcattctgaaagctcgccagctcggtttcacaactgaagtgtgcatcatccagctcgacgcagccctgttcgagtcggctaaatgcgcgctgatcgcccatacgctgaatgacgcaaagcgcctgttccgtgaaaaggtgaagtacgcatacgataagcttccggcagagataaaggcggccaacccggccagcaatgattcttccggcgagctcgtcttcaagaagggcggctcactatacgtcagcacttcatttcgtggcggtacgctgcgttacctgcacgtttccgagttcgggaagatatgcgccaagtatcctgacaaagcccgtgagatcgtcactggtgcgtttgaggcggtatcgactggatgcttcgctactatcgagagcacagcagagggccgggcgggttacttcttcgattactgccagacggcagagaaggctctactacagggcaagccactttcaccgctcgactggaagtttttcttcttctcctggtggaagaatccgcagtacgccatcgacccggtagagccactaccgcagcgcctgattgaatacttcgctgaaatggcggcgaagcacggcgtagtcgttaacgaacgccagaaagcctggtactacgccaaagagaaaacgctcggcgaggacatgaagcgcgaatacccgaccattccggccgaggctttccagcagtctgtcgagggcgcgtattacgccaaacagttccgctggctctacaccaacaagcgaatcggccaaatcccggataactcacacctgccggttcatacgttctgggatatcggtgtgggtgactccacggcgatatggttcgttcgtgaggttggcgaagagttccacatcatcgactactacgaaaactccggcgaggggctgaggcactacatgaaggtgctgaaagaccgaggctatgagtacggcgagcactgggggccgcacgacatcgagaaccgcgagttcggcgctgatgccaaatcgcgcaaagaactcgcgcaggaaggctatgaaatcgacggccaggtgtactcgatgacattcaatgttgttccgaaaacgggtgttgataccggcattgagtcggtgcgtgaaatcctcccgtcctgtgtattcgatgaggagaaatgcgccgagggcatatcccacctggagggctatcgcaaggagtgggacgacaagcgcggctgctggaaagataaaccgcttcatgacttcacatcacacggtgctgacggcttccgctactttgctgtagcgaaaaataaccaaaaacaggttggtgcaatcttcttcacataa

SEQ ID NO: 118873 - DNA, 207 bp, Enterobacter cloacae
atgtccgaaatctaccaaatcacgctaaccacccaaacaggcgaaaccttcacgggcaagatgtcacgacgtcagcctgagctggttaacggctttgtgccgctggcgacggaaacgggacagtggctgtatttcgctcctgcagatgtaaagcgcgtggagttcacgccagtaccggaagagcagaccgaacaaacgacggagtaa

SEQ ID NO: 118874 - DNA, 234 bp, Enterobacter cloacae
atgtggatagtgcaaaaaaaatctagcgatgacggtcttgatgttgagatcagtgccatttccgatgataacgatcacggtaagaaaagttggggctggcataacccagatgaaaagtgtgtagtgctcagaacctcgagtttatatcaaaaaatgcctgtcgcagatagcatcttagaatcggcgatatcggaagctcaaaagatatgtgacgaaaagaactcgaagatttaa

SEQ ID NO: 118875 - DNA, 240 bp, Enterobacter cloacae
atggaaattactgaaattaagtggtcagaagcgtcaagggaattgcttatgtcccaacttgattacatggctgaggttagaggctcacgcaagggtgatgatcctacgccaatttcggttggacctttcacgggttcatacgctgaattgcaatctttcttccagagcaacccaacagaagaagaaatgcacgccttcgccatggtagatggttactcaacaagaaaaacattctcgtaa

SEQ ID NO: 118876 - DNA, 462 bp, Enterobacter cloacae
atgagccgccttaccgccatcaccgccgtagtggttgtcttcctgctggtctccatggcctgggcgattaaccactaccgcgacaacgccatcacctacaaagaccagcgcgataaagccatcaagaatctcaacctggctaacgccaccatcaaagacatgcaggtgcgccagcgcgatgtcgctgcgctggatgccaaatacacgaaggatttagctgatgcgaaaaagcagcttgatgatctgcagcgttgtgttcgcgatggcaagtgtgggttgcgcatcaacgcaaaatgtcccgcgaacggagcgaccagcaccggcggcatgggcgatgcttccggccccagacttactgactccgctgaacgggattatttcaccctcagagagcgaatcgtcacagtgacgaagcaggtcggctatctgcaggactacatcaaagaacagtgtctcaagtag

SEQ ID NO: 118877 - DNA, 690 bp, Enterobacter cloacae
atgaacagtcagcaactggaatacgtacgtcagcagcttattgtggcgaccgcagatctgagtggggctacgaaagggcagctggtagctttcgccgagaatgcgcagttcaccgcgacggcgcgcagccggggacgaaagaaagtcactgacccggtcaccggccggaaagttaacccggacggcccagcgatgagtggcagtcagtcccgcgccaagggctcgtctatcgcgctggtgagcccgttggagttcggcactgcgtcatggcgccgcgctgtgttgtcgatggaagagcaccagaaagcgtggctgctgtggaactacagcgagaacgttagctttgagcaccaggtggcgatcacccagtgggcgtgggcagagttccgggaacagctcggcgcgaagaaggtggccgacaagacgatggaccgcctgaagaagctaatctggctggcggcgcaggacgtcaaagcagagctggctggccgtgagacgtacgaatatcaggcgctggcggaactggcgggcgttgcgaaatccacctggacagaaacatatctgcctcactggctggctatgcgtaacagctttaagcgactcgatagcggtgcgcttatctcagtaacgcgatcacgttcacaacaaaaggcgacaaatttggatgtaagtcttgcaaaaccgaactga

SEQ ID NO: 118878 - DNA, 579 bp, Enterobacter cloacae
atgaaaaaacgcctgttgggtatcgcattaggttcgctgttatttaccaccggttcggccattgccgccgactataaaattgataaagaaggccagcatgccttcgtcaatttccgtattcagcatctgggttacagctggttatatggtacgttcaatgatttcgatggcacatttagtttcgacgagaaaaaccctgctgccgataaagtaaacgtcaccattaatactaacagcgtcgacactaatcacgccgagcgtgataaacatctgcgcagcgctgaattcctgaacgtaggcaaattcccgcaagctactttcgcgtcgacagaagtgaagaaagacggtgataagctcgctattaccggtaatcttacgctgaacggcgtaacaaaaccggtaacactggatgcgaaattaatcggccagggcgacgatccgtggggcggaaaacgtgctggctttgaagccgccggcaaaattcatctgaaagattttaatatcaccacagatttaggaccggcatcgcaggatgtagagctgattatttcggtggaaggcgttcagcagaagtcataa

SEQ ID NO: 118879 - DNA, 954 bp, Enterobacter cloacae
atgctgaccgatagcaaactgttgaccagtgccgcctgggatgcccagtcgctcaacgagctgaaaaccaaagcgggcaatgatccggcggcgaatatccgcccggttgcccgtcaggtggaaggcatgttcgtgcagatgatgttgaaaagcatgcgtgaaaccctgccgaaagatggcatgttcagcagcgattccacacggctttacaccagcatgtacgatcagcagattgcccagcaaatgaccgccggaaaggggctcggcctggcagacatgattgtgaaacagaccgcagccgctcaggggctgccacctgaagaggctccgccgcaggtgccgctgaagtttgatctggaaaaggtgaccagttatcaaaatcaggcgctgacccagatggtgcgtaaggcgatgccgaagccggcagaaacgcgtgacgagccgctctccggcgacagcaaagacttcctggcgcagctctccctgccggcgcgtcttgccagtgaagaaagcggcgtgccacaccatctgattctggcgcaggcggcgctggagtcgggctgggggcaacgtcagatccgcagggagaacggcgagccgagctacaacatctttggcgtgaaggccacctccagctggaaggggccgaccacggaaattaccaccaccgaatatgagaacggtgcggcagtgaaggtgaaagccaaattccgcgtctacagctcgtatctggaagcgttgtcggattatgtcgggctgttgagccggaatccgcgctacaccgccgtgacccaggccaccacgccagagcagggcgctcaggcattgcagaatgccggctacgcgaccgatccaaactatgcacgcaagctgaccagcatgatccagcagctgaaatccatgtcagagaaggtcagcaaagcgtatagcacagatctcgaaaatctgttctga

SEQ ID NO: 118880 - DNA, 507 bp, Enterobacter cloacae
atgaacacaaccgccacccgggccataagccgctgggtaatcttaatgctggcgctcggtgcgggcttcagcgtggcatccatctattatgcccagcctctgctgccgctgatgggctcagacctgcacctgagcatcgaaggcatgggcatggtcccgacgctcacccaggcgggttatgccttaggtatcctgtttctgctcccgctcggcgatcgttatgaccgcagaacgttgatcctgataaaaagtgcagctctggcgctgttcctgctgggttgtagcctgaccggacaactgcactccctactgctcaccagcctgctgattggcatggccgccaccatggcgcaggatattgtcccggccgcagcgatcctcgcgccggaaggcaaacagggaaaaacagtcggcacggtgatgaccggcctgctgctggggattttgctctccagaaccgtgagcggcgtggtgggtgaagcctttggctggcgagtgatgtattag

SEQ ID NO: 118881 - DNA, 273 bp, Enterobacter cloacae
atgggttattttaagcctggcaccgtttggcaggaaggcaacgtaaataacagtatgattttaaaaatgaatgctgacaaaaaaccttggccgggtatatacattaaatcgcgttttgggatcgttcttattcaaaaaatgaaagaagaaattattgctatgttatttgcggctttttataatttgttacctttctatggtcgccttgtcattgatccgcaagaaagtttccgagaccgtgacggtctctttttatgttgtacggactcctaa

SEQ ID NO: 118882 - DNA, 993 bp, Enterobacter cloacae
atgtcccggcgcatcacgttatcgttatggcttctggcggggttgcttaccgtcatgacgttcatggctaccggttttggggcgttacgcctgccagtgaacgtgctgtggagcggcagcgatgagacgctacgccagatctggctcaccatccgtctgccccgcgtgctgctggcgctggtgattggcgggtcgctggcgctcgccggctgcgtcatgcaggggctgttccgcaatccgctggccgacccgggcctgctcgggatcagcagcggtgcggcgctggccgtcgccctgtgggtggtgctcccgctctcgctgcccgcgctggtgatgctttatgccccgatgctggcggcattttttggggcgctggcagccacaggcgtgatcttcctgctcagcaagcagcgtgacacctctctgtcacgtctgttgctggtgggtatcgccatcaatgccctgtgcggtgcggcagtgggtgtgctttcgtgggtcagcaatgacgcccagttgcgtcagctttcactctggggaatgggaagtctcggtcaggcgcagtggtcaacgctgctcgccgtgatctcgctgatggtgcctgccgctctggcgatctggcgttgtgccagcgcgttaaatttactgcaactgggtgaagaggaagcgcattatctcggcgtggacgttgcccttgtacagcgaatattacagttatgcagcgctctgctggtcgctgcggctgtcgccgtcagcggcgtgattggctttgtcggactcgtggtgccgcacctgatgcgcatgtggctgggcgccgatcaccgggcaaccctccccggcacggttctcgcgggcgcttttctgctgctggtggcggatacggtagcccgcactctggtcgccccggcagaaatgccggtcgggttgctcaccagcatccttggcgccccctggttcttatggctcatttttcgtcgtggagaacagcatggctga

SEQ ID NO: 118883 - DNA, 189 bp, Enterobacter cloacae
atgtcaccgaccgataacagcgcggcaacgccagtaaaaacacacacagcgccgtcccctgctcccaccgatcgccgaatcgacagcaaaagcctgttgggtgaggagggacgggtcattatcgagcatgacggccagcactacctgctgcgccagaccaatgccggaaaactgatcctgactaaataa

SEQ ID NO: 118884 - DNA, 2376 bp, Enterobacter cloacae
atgactgtgatctacaaggacgcgggacgtcccgtacacgagcgtgtcgctgatttactggcgcgtatgacgccggaagagaaatttgcccagatgcacgcgtactggctgatcctcgatgaacacggcagccaccgcgagcgcagcgatttgagcgatgagttcgccggcgtgagcgaacaggcgtccctcagcgaaaggctgaagctgggcgtcgggcagatcacccgtccgctcggcacgcacattgttgatgcaaaaaccggcgtgcgtgccgctaaccgcctgcaacgtatgatgatggaggagacccggctcggcattccggcgctgtttcatgaggagtgtctggtggggctgctgtgcaaagatgcaaccctgttcccgtcgtcgctgaactacggttccacctgggacccggcgctggtgcagcgcgcggcggagcatattggcaacgaggcccggtctgtcgggtgccagcaggggctggccccggtgctggatgtctcgcgcgatgtgcgctggggacggacggaagagacctttggggaagatccgtggctggtaggggtgatggcgacggcgtacgtgaaggggttgcagggcgataagcgcgatctgctggcgaccctgaaacattacgtggggcactccttcagcgaaggggcgcgcaatcatgcgccggtccatctgggtttcagcgagctaaacgataccttcctgctaccgtttgagatggcggtgaagctggccaacgtcggttcggtgatgccggcctatcatgacatcgataatcagccagggcacagcgaccatttcctgctcaccaccgtgctgcgtgaacagtggggcttcgacggcattattgtcgcggattacggcggcgtcagcctgctgcaccagcaccatgggatttctcacgatccagcagaatcggcggcgctggcgtttaacgccgggctggacgtggaattgccgaaggatgactgcgcgcgtcatctggcggaagcggtagagcgtgggcttatctcaatggcgaaagtggatgagattgtggcgcgcgtgctaagtgaaaaattccgtctcgggctgtttgaaaaaccgtacgccgacgaaaaaggtatcgatttgcagaatgagacgacccgacaggtggcgcgcgaggtggcaacaaaatcgatcacgctgctggaaaataacggcattttgcccctcggcggaaaaccccgtgtagcggtagtggggccgacggcggacgatccgctggcgttgctgagcggctacagcttcccggttcacctgatcatcagcgatatggttgaagagacctcgcaggtgacaaccccgcgcgcggcgctggaacagtaccttggtgcatcgcagatacgttacgccaaagggtgccacattatcgaaaaacggatggcgggtgcgccggtgttcccgggcgacagcggcggtaaaccgatgcagcaatcgccggtttcacaacgcacggatttgatccccgaagccgtgagcgcggcaaaagagagtgacgtggtggtggcctgcgtgggcgacctcgccgggctattccagagcggcaccgtgggggaaggatcggataccgattcgctgaatctgccgggcgtgcagcaacagctgctggaggagctggtggcaaccggcaagccggtaattgtcgtcatgacgggcgggcgtccttataaccttcaggggctggaagagaaggtggccgcgctgatgatggcctgggcgccggggcaggaagggggctgggcgattgccgatatcttaaccggccgcgcggagccgcagggcaggctagtagtcagcgtgccgaaaaacgccggggcgatgccgtactactataaccacaagctgaaaagcggcggcacgccgtttgcgttccattttggcgcactttacccgttcggttacggtcttggctggacgcagtttcgctggagtgcggcgcgtctcgctgaaagccacgtcccggtcgacggagaggtggtgttaagcgtcgatgtcagtaacatcggggagcgcagcggcagcgaagtaatacaggtgtacgtgcgtgacaaagtcgcgacgcaggttcgtccgcttcaggagctgaaagcgtttcaacgcgttacgctttcaccgggagaaaccgccaccctgacctttaccttgccggtggagatgtttaatttcacccgccgggacgggaagcgaattgtcgagccaggtgaatttgagctacaggttggcgcgtcctcggcggatattcgcgaggtggtgaacgtgcaggtgaccggggagacgcgggtgctggagggggaatggcagatgttgagtaggagtgaaatttgtaaaaattaa

SEQ ID NO: 118885 - DNA, 207 bp, Enterobacter cloacae
gtggttgtagatatttcggtgttattcattattcttttaatgattgtgtgcgccctgatttatcgcctttctgtcatggaagataagttgttagcaatggagttaagacacgctacggaagtcaacgcagcgcgtagagaagggtatataaactgcatgaatcttcatgctcaggttgaaaaaagtataaaagataaagctaaatga

SEQ ID NO: 118886 - DNA, 3057 bp, Enterobacter cloacae
atgatcccacagatttctcaggcaccgggcgtcgttcaactggtgcttaattttttgcaggcactggagcaacagggttttacaggtgataccgccaccgattatgccgacaggctgacgatggcaaccgataacagtatttaccagcttcttcccgatgccgtcgttttcccgcgctctaccgccgatgtggccctcatcgcccgtctggcgtcgcaggagcgtttcagctccctggtctttaccccgcgcggcggcgggacgggcaccaatgggcaggcgctgaaccagggcatcatcgttgatatgtcccgctatatgaatcgcatcattgagatcaacccggaagaggggtgggtgcgtgtggaagcgggggtaatcaaagatcagctgaatcagtttttaaaaccgtatggctatttttttgcgcccgagctttccaccagtaaccgcgcaacccttggcgggatgatcaacaccgatgcctcagggcagggctcgctggtctacggcaaaacctccgatcacgtcatgggtgtgcgggcggtgctgctggggggcgatattctcgatacccagccgttgccggtcgaactggctgaaacgctggcaaaagagagcaccaccagcggacggatttatcgcaccgtgctggagcgctgccgtgaaaatcgcgaactgatcctcgacaaattcccgaagctcaatcgcttcctgacgggctacgatctgcgccatgtctttaatgacgatctgagccagttcgatcttacccgcatactgaccgggtcagaaggtacgctggcctttatcaccgaagcgcgtctggatatcaccccgctgccgaaggtgcgccgtctggtgaacgtcaaatacaactcctttgactccgcgctgcgtaatgccccgtttatggtggaggcgcgggcgctgtcggtggaaaccgttgattcaaaagtactgaacctggcccgggaagatattgtctggcattcggtgagcgaactgattaccgacgtgccggataaagagatgctcggtctgaacatcgtcgagttcgccggggatgacgcagagctgattgagagccaggtgagcacgctctgccagcgtctggacgagttgattgcacagggggaaggcggcgtcattggctggcagctgtgtaacgacctctccggcatcgagcgaatctacgcgatgcgtaaaaaggcggtggggctgctcggtaacgcgaaaggggcggcgaagccgattccatttgcggaagatacctgcgtgccgccggagcatctggcggattatattgtggagtttcgtgcgctgctcgacagccatggtctgagctatggcatgttcgggcacgttgacgcgggtgtgctacacgtgcgcccggcgctggacatgtgcgatccgcagcaggagatcctgatgaaggagatctccgacgaggtcgtggcccttacggccaaatatggcggtttgttatggggagagcatggcaaaggattccgcgccgagtacagcccggcgttttttggcgaacaactctacgccgagctgcgtaaggtgaaagccgcttttgatcctgataaccgtcttaacccgggtaaaatctgcccgccagagggcgttgatgcgccgatgttgcaggtagacgccgtcaagcgcggcacctatgaccgacaaattccgattgcggtacgcgcttcctggcgcggcgcgatggagtgcaacggcaatgggctgtgcttcaacttcgatctgaaaagcccgatgtgtccgtcgatgaaaatcaccagcaaccgcatccactctccaaaaggacgtgcgacgctggtgcgcgaatggctgcgcctgctggctgaccgcggcattgacccgctcaagctggaactggagctgccggaaaaacgcgccagcctgcgcgggctcatcgaacggacccgcaacagctggcatgcgaataaaggcgaatacgatttctcgcatgaggtgaaagaggcgatgtccggctgcctggcgtgcaaggcgtgttcaacccagtgcccgattaaaattgacgtgccggaattccgttcccgcttcctccagctgtaccacacgcgttatctgcgcccgatgcgcgatcatctggtggcaacggtggagagttacgcgccgctaatggctcgtgcgccaaaaacctttaacttctttatcaatcagccgctggtgcgcaaactgtctgaaaaacatatcggcatggtggatctgccgctgctgtcggtgccatcgctccagcgtcggctggtggggcaccgctcggcgaacatgaccctggaacaactggaagcattaagccctgagcagaaagcgaaggtggtgctggtggtgcaggatccgtttaccagctattacgatgcgcaggtggtggctgattttgtccgtctggcagagaaaattggctaccagccggtggtactgccgttctcgccgaacggcaaggcgcagcacattaaaggtttcctgacccgcttcgcgaaaaccgcgcagaaaacttcagatttcctgaatcgcgtggcgcagctcgatatgccaatggtgggcgtcgatccggcgctggtgctctgttaccgggatgaatataagcagacgctcggcgataagcgcggtgattttcaggtcttactggtgcatgagtggctgccttcggtgctgaagcaaacggcccctcaggaggtcagcggagaatcctggtacctgtttgggcactgcactgaagtgaccgcgctgccgacggcgcctgcccagtgggcttctatcttcgcccgctttggcgcgaagctggaaagcgtcagcgtgggctgctgcggtatggccggaacctacggtcatgaagtcaaaaaccacgctaactcgctcggcatttacgagctgtcgtggcaccaggcaatgcagcgcctgccgcgtaaccgctgtctggcgacgggctactcctgccgcagccaggtgaaacgggtggaaggtaacggcgttcgccatcccttgcaggctttactggagattatcggatga

SEQ ID NO: 118887 - DNA, 558 bp, Enterobacter cloacae
atgtcttctgacaaaccatcgcatcgcggctctccctatgcccaggaactgatttcccacttacagccgcactgcgccacgtataaaaccgatcccggtgagcaacttgatctccaggttaacgggcagagtatgtgttatttaattctcgagggcacaatcgcgatatacagaagaagcgacgacatgatgcttaccaccgcgcgcagtcccgccctgtttggcctcgctaacctgacggacatatattttaacgattatctcaaaacggtgacgccatgcctgatcggcgtgctagcaaccgatcgggtggcagaagttatcaaagagaaggcgttatgggggctgctttctaatcatctgatgtttgtctataaccgcctttatcacaacgtcatgccgaaaggtgcgccaacggcttacgagatgattcgtcagcagctcatgatgctgatgcaggaagatgacaactaccgacgcagcgtgacggcggaaaggtacatccgggataaaacccggctttcccgcagcggcgtaatgcggatacggctgacctga

SEQ ID NO: 118888 - DNA, 660 bp, Enterobacter cloacae
atgaacacccgtattgcgcccgtttcaggcaatgaaataacaacagtgcttggcgctaagcctcttaagcacattgaaaaaataatcgataatgttttgccgcatacggaaagatgcatcatggctaaaggtgaagtcatccattattattccggtgatatccgccagtgctttttactgttacatggcagcgtggcattgcatcgtcgaggtgacggtatcgtcttaaattccgaatccgcaccttttatactcggcgtgagcagccagttttcttctgagcacctctacgtcagagcgctggaaacttcagaggtggctagcgttacgctggagcgttttaatcacgtagtcgcacaacagaatttatgggagtccttctcgaacctgctgatctataccgcatcgcgcgtttacgaacattgtgcccagatatcgcagatgtcggcttacgacattatccgctttcagctggtagaactgatgcaggagccggaagccataagacaaagcattaccgccgcagcctatatcaaaagccgcacctatctttcacgcagcggcattatgcggatcctggcggagttgcggacggggaaatacatcactatggagcgcggcgtgctaatcgagatccatcacttaccccgcaagtactga

SEQ ID NO: 118889 - DNA, 1023 bp, Enterobacter cloacae
atgatcgtactcagtaatatttcgaaggtttttgacaacgggaagctggcgctgacagccgttgataacgtcaatttgacgatagagcagggacagatttacgggatcattggttacagcggggccgggaaaagtacgcttatccgtctgctgaacggtctggaaaagcccagcgccggcagcgtcactattaacggtcaggatatctccgccgcgaagggagaagcgctgcgtcaggcacgcctgaaaatcagcatggtgttccagcactttaatctgctctggtcgcgcacggtgaaggaaaacatcgccttttcaatgcaaattgccggtgtgccaaaagcgcaaattcaggctcgcgttgccgagctggtggagctggtcggcctgaagggacgcgagaatgcctacccgtcgcagctgagcggcgggcaaaaacagcgtgtgggcattgcccgcgcgctggccaatcatccggacgtactgctgtgtgacgaagctacctcggcgctggatccgcagaccaccgatcagatcctcgatctgctcctggacattaaccgtcgttttaacctgaccatcttactcattacgcatgagatgcatgtggtgcgcaaaatctgcgaccgcgtggcggtaatggagaacggcaaggtggtggaagagggggaggtgctgagcgtgtttacgcatcctcagcagccgatcacccggcagtttgtccgccaggtgagccagtacgcggaggaagagaccttcaataccgaactggcaaatgagctggagggcgcggtcatcaagctcaccttcaccgggcacagcacgcacaggccgatcgtcggtgaactgaccctgcgctacggcctgccgtttaacatcctgcacggcaaaatgacgcaaaccgcccacggtgttttcgggcagctctgggtgcacgtggtggcatcggatgaacaactgaacaatatcctcgccgacctgaagcaaagcgatattgaaggcgaggtaatcaagcatggctga

SEQ ID NO: 118890 - DNA, 1407 bp, Enterobacter cloacae
atgaaacggacagtattaacccccgcgctttctgccaccgtgctattgcttgccatgcaggcggcacacgctggtccacaggcgcatgttgtatgcagttattcccataccctcggcgatgatgccattatgatgtacggcatgcccaacgaggccatgctgcacgatttttttggtaacgtgcaaacggatgcttactccagccgtgaatcgctgcgtacccaggaaaagaccacctgcgataacaaagcagacagctcggcctactgggctccgtcgctaaaattaccggacggaacggtggtcaaacccgcctatcaaaaaacctattatcaggcatcgaacgttgacgcctggccactgcacccgttcccggcggggctgtcgctgctggcgggcgatcatcacggcaccgcgccaaatccacatatcacctttttatgcgccaacggcaagggctacaccaccagaacgggtgaagtctgcggtttacgcaaggcgaaggatgccgtgcagtttaatatcggcattcagttcccgaactgctgggacggggccaacctgaagcccgcccacggcctggctaacgccacctacgatacgaaaggacagtgtccgtccaccttcccggtgaagatcccgacggtgaacatgaatattgcgtacgtgcttccgacaattagctctctggataccagcaaagtccagctttccctcgaccccaccatgcatggcagtgaacgtgaagagcgatgggggagcctgtatacggcgcatgctgacttcatgaacggctggacggaagatgccgcgcgctttatgaccgacctgtgcatgaaccgcggaatggattgcggcaccaccgtgccgtatggttattcaaaagcgaaggccaacgtctggctcagcagcatggaacccgcactttcacagcccgatccccaggtcttactggtgcaggacaactggaagaacggcggaaggacgaaaaacagcgaaacattgtcgctggtgaagttcaacattcctccgctgcctgccggacaggatcctgcccagtttaaataccgcgtgagaatttatggcgggaaagtggaaaccaacggcgcggatcaaatcttcttctatccggcgagcaacgactgggatccggccaccgtgagctggcattcacggccgccctgcaactatcgctcggatgcggtgctttacctgaaccactcccgcgaataccggatggtggacgtggataaagcggtgcgcaaggcgctggcagaagggaaaactgaaatctcgtggtatatcggcggcgatcgtcagggaaaccactatcagtttgagacggggtcatctcaacaaagcctgatcctgatgctgaccgggtttagcaaaacgccggagatctga

SEQ ID NO: 118891 - DNA, 564 bp, Enterobacter cloacae
atgaaccctgacgacaaatcactttttcttgacgccatggaggatgtccagcccctgaaacgctgcaccgatatccactggcagcaaagccgtaatacccgggttcgccaggagatcgataccgagcagctcgacaactttctcacactgggtttcctggaactcttgccgcttgaagagccgctgatgttccagcgcgagggcgttcagcagggcgttattgacaagctgcgctcgggtaaatacgcccgacaggccagcttaaatctgttgcgtcagcccgccgaacgctgccgccagatgctgtacgccttcattcgccaggccagccgcgacggtttacgtaacctgattatcattcacgggaagggccgcgagcagaattcgcacccgaacgtggtgcgcagttatcttgcccgctggttaactgagttcgaggacgtgcaggctttctgcgtggcgctgccgcatcacggcggcagcggggcatgttatgtttcactccgaaaatccgatgaggcgaaacaggaaaactgggaacgtcacgccaagcgcagccgttaa

SEQ ID NO: 118892 - DNA, 867 bp, Enterobacter cloacae
atgagcagcatagataaatgcggaacattcacgctcggaacgcgtacggttaaacggtttggctatggcgcgatgcagcttgccggacctggcgtttttggtccgccaaaagacaaaaatgcggcgctggcggtgttgcgtgaagcggtagagtcgggggtaaatcacattgataccagcgatttttacggcccccatgtgaccaaccagcttatctgcgaggcgcttcatccgtaccgggatgaccttacgattgtgaccaagatcggagcccgacgcggcgaggacgcctcctggctgccggcgttttccgcccaggagctgacgcaggcggtgcatgacaacctgcgcaacctgaagcgagatgtgctggacgtggttaacctgcggatcatgtttagcgcccacggaccagcggaaggctcgattgccgcgccgctaagcaccctcgcggagctgcaacagcaggggctggttcgccatattgggctgagcaacgtcaccgcttcgcaggtggctgaagcgcagaagatggtttccgtggtatgcgtacagaacatgtacaacgtggtgaatcgcggtgacgatgcgctggtagattcgctggcacagcaggggattgcctgggtgccgttcttcccactgggtggtttcacgccactgcaatcttccgggctacaggcggtggcagattcactggatgcgacgcctatgcaggtggcgctggcatggctgctacaacgctcgccaaatatcctcttgatcccgggtacttcttcggtggcgcatctgcgtgaaaacctggcggcagccgatctggtattgccgcctgaggcgctggagacgttaaatacgctggtggagtaa

SEQ ID NO: 118893 - DNA, 447 bp, Enterobacter cloacae
atgcgggagagcattaattttcttttcgtagtgctgtctttcacggcactgattatgctgatgcgctttttcatcaggcgtattcggcatccaacgcgcatcgttgccgacagccggggaatgaaaaaaatctctacccatccttcctggtttggcggatcgtcaggtaaaacctacttttatgatgagcagtatttatacgaggtcataaatagcgtcacccgtaaaattgagctggcggctatcgtaaaaattaagccgggctcgacagtggtaaataacaggcggatctggtctgtgagctatcttgagggaacccgtgaaaaacaggtgcagttttataataatctgacggtgtttaatcaaaactttgctgcgtttttagaggttgtaaaacgcgtgaatcctgaagccgatattaaggccgtctccttgttcaatctgtga

SEQ ID NO: 118894 - DNA, 1035 bp, Enterobacter cloacae
atgaaaaagatcggatttttgtcgtttggtcactggacgccgtcttcccagtccggcacgcaaaccgcagctgacacgctgctacagtccatcgatctggctgtcgccgctgaagagctgggcgcggacggggcttatttccgcgtgcaccactttgcccgccagctcagttcgccattccccttgctggctgcgataggcgcgaaaaccaaacgcatcgaaatcggtacgggcgtgatcgacatgcggtacgagaatccgctgtatatggcggaagatgctggcgcggcagatctcatctccggcgggcgattacagcttggtatcagccggggctccccggagcaggtgattgatggttggcgttattttggttacgtgccgcaggacggggaaaacgaatctgatatggcgcgccgtcacactgaggtactgcttgatgtattacgcggtgaagggtttgcgaagcctaacccacagccgatgttcccaaacccgccgggattgttgcgtctggagccgcattcagagggcttacgcgatcgtatctggtggggggctggctccaatgcaacggcagtatgggcggcaaaactggggatgaacctgcaaagctcaacgctgaaagatgatgaaaccggcgagccgttccatattcagcaggcaaaacagatccgtgcctaccgacaggcctgggccgaggcagggcatacccgtcagccacgcgtttcggtcagccgcagtatttttgccctgatggacgatcgcgaccggatgtatttcggttcaagccgcaatgagagcgacagcgttggctatctggatgagaaaacgcgggccattttcggacgcagctatgccgcagagccagacaagctgattgaacagttgaaaaaggatgaagcgatcgcggaagcggatacgctgttgcttaccgtgccgaatcagctgggcgtggaatacaacgcacatgtgatcgagtccatcctgaaacatgtcgcaccggaaatgggatggcgcgatcgcaatgcgtaa

SEQ ID NO: 118895 - DNA, 1059 bp, Enterobacter cloacae
atgagttatgcagaaacgctaaatcctaacgcccccgtttcgatggtgacaacctgggataaaaccttcgccgagagcaataaagtcaaccaccgcaaagtgacgttccagaaccggtacgggatcaccctggtgggcgatctgtacattcccaggaaccacggcgaccagaaactggcggcgatagccgtcagtgggccgttcggtgcggttaaagaacaatccagcggtctgtacgcccagactctggctgagcaggggttcgtggccctggccttcgacccatcctacacgggggaaagtggcggccagccgcgtaacgttgcctcccctgacatcaacaccgaagactttagcgccgctgtggatttcctggggttacagaaagaagtcgaccgtaaccgtatcggcattcttggtatctgcggctggggcggtatggcgctgaacgcggcatccatggatacccgcgtgaaggcggtcgccaccagcgtaatgtacgatatgagccgcgcgatgggtcacggcgtgggcaacgggaaagatcgctattcagcggccgatcgtcgggccgtgttgcagtatctgaacgcgcagcgctggaaagatgctgaaagcggcactttcgcccatggcggccacgatattaatgtcgatgagaatggcaaggtgacggcggccgagcgcattctgccggaagcactgcccaccgatccgcatccggtactgaaagagttctatgattactaccgtatgccgcgcggtttccatgcccgttccgtaaactccaccggcgcgtggactgcgaccatgccgttatcctttatgaatatgccgctgctgagctatgccggggagatcactatcccaacgctgattgtgaccggtgaaaacgcacactctcgttattttgcggaggatgcgttcaaggccgtcggtagcaaagagaaagagctggtgattgttcccggtgcaaaccatgttgatctctacgataacgtcgcaggaaaaatcccgttcgcgcagtttgagcagttcttcaaaaccagtctgaaataa

SEQ ID NO: 118896 - DNA, 660 bp, Enterobacter cloacae
atgacaaaaataacgccagaatatacggctgtaaacttatcgagttgggcaaggaaagaacattttgaagtctttcagagctttgctcaatgcacgattaaccaaacggttcagctggatatcactgcgctgctgaaacatatcaaacaggttggctggaaattttatccttcgattatttcccttatttcgacagtcgttaaccgccattctgagttccgtatggctatgaaggataatgagcttgtaatatggaatgaggtgcatcccagctatacccttttccataaagagacggagacgttttcatcattatggagtcacttcgacgggaatattcatcactttcagaacgtttatgcagaagacgtttctcgctatggtgataatcttgcttactggcccaaagaagagtaccgggaaaatatattcttcatatcggatattccgtgggtcagttttaccagttttaatatcaacgtggctaacatgcagaacttttttgcgcccatgttcacgtttggaaaatactttaaccaggatggaaaagtcttgttgcctttcgccgttcaggttcatcattctgtctgtgatggtttccatgtggccagactaatcaacgagttgcaagagttgtgtgataatttaccgcactattaa

SEQ ID NO: 118897 - DNA, 615 bp, Enterobacter cloacae
atgaatgacgtctcacaccgcgaatcgttcgcgttcagcgcccgggtactgggcgcgctgttttattttgccccggacagcgagcagaccgcaccgctggtgagtgccctgaccgcaggtgactgggtgcaggactggccgctggcgcaggaaagcctgcagcccgtggccagtatgtttaagaacccgtcggacgaagcgttgaaagacgcctggcagcgtctgtttattggcccgtatgctctgcccgcccccccgtggggctccgtctggctcgatcgcgagtccgtgctgtttggcgattcgacccttgcattgcgccagtggatgcgtgaaaaccatatcgcctttgagatgcagcagaatgagccggaagatcacttcggaacgttgctgatgctggcggcatggcttgccgagaacggtcgcgacacagaacgcgaccagcttatggcctggcatctgctgccgtggagcacgcgtttccttagcgtattcgttgaaaacgcggcccatccgttctatacggcgctgggtaaacttgcccagctgacgctggcagaatggcagtccactttgctgatcccgattgcagaaaaaacgctgtaccgataa

SEQ ID NO: 118898 - DNA, 612 bp, Enterobacter cloacae
atgtcttttaataaattaggtctggcaactatagtagcaatggttctgagtgcgggttctgcaatggcagctgatattccttcagatacaggcactattactttccacggtatggtttctaataacacctgtaaagtatccctggatcagaagattgaccaggagggtaatgattttgacgttaacctggataccgtgtttgtaaaagacttcgctaatgcgctgggtaccaccagcaccctgggagaaaagaaattctccctcaccctgacaggttgtgattctgctaccgtcaaccaggcatctgctcagtttgattcctgggcgggttcttcttcaacttccggcggtctgctggttccaccatcaaatactcaaggcgccgctaaaaacgtcaatctggtactgtcaaacgatggcaactccgctaccgatcagatcaaactggatcagaccaacaatacccagaaagcaacgattgataccacaggcgcaggcgcactttactaccgtgtagcgtatacccagggtcagaactgggatgcggccaacaacccagtgtcagctggtgtggttcaggcacaagctgcattcaccatgatctacgagtaa

SEQ ID NO: 118899 - DNA, 744 bp, Enterobacter cloacae
atgttaagcacatcattttataaaggatttaaagctgcctgctttacagctgctgctgtcgcgtcattccaggcaagcgcagatatcgttatttcgggaacacgtattgtttatcagcagtcgcaaaaagatgtcatcgtttctttagacaaccgtggcaaaaagccactattagttcaatcatggctcgatgacggtcgcgatgacaccaacccacaggaattaaaactaccgtttattattactccaccagtatcccgaattgatccgcaaaaaggtcaatccgttcggatctcatacctgggtggttcattgccgcaagatcgcgaatccctattctggttcaatgtgctcgagattccaccgaagtcaaaagtgaaagacggtgaaaatcctaaccagctccagctggcattccgcacacgtattaaactctttttccgacctgacggcctgaaaggtacgccaggagatgcagcagccaaagtaacgtggtcacaacaaaaacaaggtaatacgctaaacctgatcgcacacaatgattccccttacaacgtttctatttcaaatgtaaagctgaaatcagcaaataaagagtaccaggttgagcataaatctattttaccgtttagtactcaaattatgcaggtaaaaggtttaggtagtactgccaccggcactgttgcttacgaaaccattaatgacaatggcggctctgatacttttgaaagcaaagtaaattaa

SEQ ID NO: 118900 - DNA, 2595 bp, Enterobacter cloacae
atgctatttcaacgatcaattttatgtctcgcaatctgtgcagcatttcctctgcatgcgagcgagactgaaaaaaaagctgtagacacctcatccgaaacagaatcggccattgaatttaatgaccagttccttatcgataatggtggaggtatcaatgtcgatcgttatgcttatggcaacccagttctgccaggtacttaccgtgtaaaagtgaatttgaatggcaattcaaaatccacggtcgagatgacattcattgataacaaaacgccacgtgcctcagcatgtctgactaaactcacgctgacacaagcaggcgttgataccagcatattaggcgatgatgtcaaaaacgacgaaacgtcttgcgtagatatcaaaaaatattatcccggtgcttctgaaaattttgatagtagcaagcaggaaatggatcttaattttccgcaaatctacgtgcttaagcttccagcagggtatgtcgatccttcattatgggataatggtgttccggccggattactctcatacgatcttaatacctggcacagcgagtcaaacggcaccaattcagataccgcttatgcgggcttgcattatggcctgaacgtggggccgtggcgtttacgttctcgcggcagtctgaactgggacagcgataatggcacacattattccagccaggatatctacctccagcgagatatcacaccacttaacgcacagatggtaatgggtgattcctacacacgcggtgatgtctttgactcggtgagcctgcgtggtgcgcgtatgtataacgatgaccgcatgctcccggaaggcacctctggctacgcgccagtaattcgtggtgtggcaaacagtaacgccaaagttagcgtaacgcaaagcggcaataaaatttatgaaaccaccgttccacccggtgctttcgagatcaatgacctcagtacaacaggctatggcaatgatttgattgtcactgtagaggaagccgatggaagtaaacggacgtttaccgttccgttctcctcagttacacaaatgctccgcccaggctccagccgctgggatgtgggtttaggtgagctgaatgatgattcattgcacgataagccaaacgttggctacgcaacttacgcgtatggtctgaataatacctttaccggttacgtgggtgcgcaatatacggatatggatttctacgccggcctgcttggtctggctatgaatacccgtattggtgcattcgcattagatgttaccgggtcctatgccgatatcgacgggctggacacgcttaaagggcagagttatcggctgacctacagcaaaatgcttgaagccactaacacatctcttaacgtggcagcttatcgcttctctacagaagattatctcagccttaacgatgccgcctcattgcaggacagtattcatcacgaggaatatggcaatcgatcttatgacagcaatgccgagctttatgctgattatcagcgtaccaaaaaccagatacaggtcagcctgaatcagccattgaatgttaacggtgatgaatacggctcactctatattagcggcacctggcaggattactggaatgactctagctccacctccgactacagcgtgggttacaacaatagttttgcttacggtagctatagcgtttctgtgcaacgcacgtacaacgaaacaggggaaaaggatgacagcgtttatttaaacgtcagtattccattcagcatattcaataaagatagcgcgcagtcaggcggatttaataacgtcaacatgagcctgcgcactgatttaaaaggcggtaccagttttaactctacggcaagcggcaactccaaaaacagtgaagtgagctattccgttagcgcctcatcaagcgggggcaactacggcaacctgaaccaggtcagtggctatagctcatggaacagtccttacgggccgctcggtgtctcagcgtcctttggcgatgacaatagtaaacagtattccgcgagttataacggcggaatggttgttcactcgggtggcgttgtatttacatccggcagtatcggcgaaacggattcacttgcgctggtaaaagcaagtggcgcaacgggtgctcggctgggttacggccaaagccgcattaacagctccgggtacgggattatgccgtatatgtcagcctacagagaaaaccgagtatcgctcgatatcagcactctcgaagcagacgttgaaatcaaaaataccagcgctgttgccgtacctcgcaatggctccgttgtattagtgaattttgaaacggatgaaggtcgttcgcttgttctggaattacaacgttctgataacggctttattccgttaggtgcagacgttctgaatgagaaaaacgaatctatcggaacggtaggccaggcaggacaagcttatgtacgcggtgtggaagacaaaggcgctctccgggtggtatggggaagcgatggatccagctcttgcacggtgcattatcagattcctgaaaatgcgaagaaagcaggcttaaccacgattctgagtaatcaacagtgccaaatgtaa

SEQ ID NO: 118901 - DNA, 582 bp, Enterobacter cloacae
atgggaaataatatgaagaaaaatcattgcggttattcattaatcgcattagcaatgttagcgatgtcaggttctgctgcggcagccgatctcaatgttaacttcactgccaatatccgcgaaaccacctgcgatatgaaactggtcggcggtacgggttcagatacgcagcaaacgctgactatcggtaataacggtcaggtacgtttagatgatgtcaaagccggaacggcaaatgccaatttcaaaattgtgctcgttgaatgcccggcgtcgctgacctcgttaaaaacaaccgtaaaaggaaccaaatcaggttatttagctagcggccttgttaaccagattgcaaaaactaacggtggcgctgattactctgcggctgaaatcgccagagccgatgcaccaaatactccttttatcattaactcaaccctggattcagagcgcctggtctggagtccgacagaaatccagaataaggaagttgctctggtggccaccttacgtgaaacaaaagaaaacagcatgaccattggtgattttcaggccgtggcgacctttgaatttagctacgagtga

SEQ ID NO: 118902 - DNA, 603 bp, Enterobacter cloacae
atgcaacaatcaccgtttattttataccagcccggtcttgtgttgcttatgggcttggctggtggcatcttgcctggcgtaagccaggcaagctcaggattagacgtaaatattaccgctaacattgttaatagcacctgtaagatgaccgtggaaaatgacggcgaaatttatctccccaatgcgatgcgcagttggttttataacccggatggtagcgatcgttttactgcaaccgatgatgcaggcggtacgccttttaagatccatgtagatgattgctatggagacagcggtacggctaaaaagctgagttttagcttttcgccgcagtcgggtttctggccaggacaaaatcaggttttcaaaagtgatgataccgccgcaggcgcggcaaaaaatgtcggcgtcgtcgttttctctgaaaaatataaaaagaatgttttaaacaacgacggcacgtcaaaaatcacttatgacgtaagcggtcaggatactgcatttttaacggattatcagttctatgcccgatatcaaaatattggcgtagtggctggtggtgtcgttaccagtaaagtattggttgacatcacttacgaataa

SEQ ID NO: 118903 - DNA, 1080 bp, Enterobacter cloacae
atgttcaactttataagacagggtttcaacgtgaaaggcacaatggcgtttgccatggcgagcgtgttatttaccctcagccactcctgctgggcaggggagtgccgaatgaataatggaaaaggcggcacaaccacgctgatcaattccgactactcaggtggcaccgtacgtcttccccctccgggtaattatgccagtactctttttaacgttaacctgacaccgggcattcaggccgaatgtggtgcaggggacgatggttttaacctcgtgtcacaaacaaacccgaccttgctgatggggagcagttatggcagggctatgtttgaaacaaatattcctgggatttattattccgtaagggtccacaccgcagaaagcactggaggcatgggtggctatttcgctatgaatacgactgactggactaccgttgcatcctccggaaaatctgacccctgggatgacaaatggataaacacctcagttcaaatttatattgatgaaggttacagaggcaacccgaacaaagaaacctcaatcagacccaaacccggcactctggggaaaatggctattggtaatccaaatgattctaacaaccaaccatggacatttgtggtcaacgaggactcattccagatcccgatcgttcttccaacctgcgacatggccatgctatcggatggcactaataatgttaacctgggagaatattatgtttcagacattaaaaacaatcgggttaaggatatccctttttcaattagcctaagcaattgtaccggtgtggcaaatatcacaaccaaactcaccacctcaaagctaaccggaaaaaataatgaacttcttggtaatacgctttcgtccggagctgagggcgcaggcgtgagaatcatgtataacggaacctctcaactcctgccgaataatcctgactcatcctatgtcataacggattaccaaacccctgaatccaagcaaattaattatgttgctcaactggtagcaaacggaaacacagtgaaaccggggtcgtttaaagccaccggcgtattcaccctttcatacgactaa

SEQ ID NO: 118904 - DNA, 927 bp, Enterobacter cloacae
atggcgattgcactggagcttgaacagctcaaaaaaacctacccggggggcgttcaggcgctgcgcgggatagatcttaaagtcgaagcgggagatttctacgcgcttctggggccgaacggggcggggaaatccaccaccatcgggatcatcagctcgctggtcaataaaacctccggccgcgtcagcgtgtttggctacgatctgcaaaaagatgtggtcaacgccaagcgtcagctggggctggtgccgcaggagttcaacttcaacccgtttgagacggtacagcagattgttgttaaccaggcgggttactatggcgttgagcgcaaagaggcgcttgagcgcagcgaaaagtatctgaaacagctcgacctgtgggagaagcgtaacgaacgcgcgcggatgttgtccggggggatgaagcgccgcctgatgattgcccgcgcgctgatgcacgagccaaagctgcttatccttgatgagccgactgctggcgtggatattgaactgcgtcgttccatgtggggcttcctgaaagatctgaacgataaaggcaccaccatcattctgaccacgcactacctggaagaggcggaaatgctgtgccgcaatatcggcattattcagcacggtgagctggtggaaaacacctcgatgaagaatctgctctccaagctcaaatcagagacctttatcctcgatctggcggcgaaaagcgcgctgccgaaactggagggctacaactatcgcctggtcgatacctcgacgctggaggtagaagtgctgcgcgagcagggtatcaacagcgtgttctcacagttgagtgcgcagggcattcaggtattaagcatgcgtaacaaagcaaaccgactggaagagctgtttgtctctctggtgcacgacaaacaaggagacaaggcatga

SEQ ID NO: 118905 - DNA, 1518 bp, Enterobacter cloacae
atgaagttgccttttaagccacatcttcttgttctgctttgcagtgcggggctgtttgccgcctcgggtgtcatgtacgttaaaagtcgcgcaacggaacctgctacgcctgctccggttacacaacaacctggcgcaccggtagcccagcctgcgcccgtcgctgccccggtctacactgcggcgcaaatcgaccaatgggttgcccctgtcgcgctttacccggatgccctgctgtcgcaaatcttgatggcgtcgacctacccgtcaaatgttattcaggccgcgcagtggtcgaaagacaatcctaaaatgcagggtgatgccgccctgcaggcggtagccacccagccgtgggatcccagcgtaaaatccctggttgcgtttcctcagctgatgtcgttgatgggcgaaaatccgccatgggtacaaaatctgggagacgccttccttgcacagccgaaagatgtgatggattccgtacagcggctgcgcctgctggcccaacaaacgggtgcgctgcaatccacaccgcagcagacggtcaccaccgtcacgaaacctgcatcgacaaaaaccacgacaaccgcaacgcctaccagcccaacggtgatcaagattgaatccgccgatccgcaggtggtgtatgttcccacgtataacccgaatacggtttatggtacctggcctaacaccgcttacccgccggtctatcttccgccctcacccggcgagcaattcacggacagtctggttaaaggattaggttttagcctcggggtcgctacaacctacgccattttcagcaatattgactgggatgacgacgactgggatcaccatcatcacgatgatgactgggacaatcacggcggttataaccgcaacggtgataacaacatcaatatcaacgtggataatttcaacagaatcagcgggcagcacctgaacggtaataaccacacctggcagcacaatcctgcctatcgtgaaggcgtgccttacccgaataaccagctggctaaccgcttccactctacacatacagccaccgggctaagcgcgacgcagcaaaaaccagtcaatcgcgacagccagcgccaggccgctctcagccagatggaaaaatcaacgggtaaaaccctcccacactcagtacatacagccacgcgggacgcacaacgtctggcctcaacgcaacagttgaagcagatctcgcagcgaaataactatcgtggatatgacaccaggccgcaggccgtaaaacggacgagcacgccgcagcgtgaacatcatcagactgacatgcacagacaggagaagcgggtttcacagacggtacagcagccagccaggctgcatcgggccaatgccctgagcggcaacgacagccgctccgccaactggcaagcccaacagcagcgcggggcgcaaagccggcagctcgctactcgtcaacatcagccgcgccagctcactggtgaacgcgctgaacgccatgaattccgtcatcgttaa

SEQ ID NO: 118906 - DNA, 792 bp, Enterobacter cloacae
atgaaacgtcaattactcagtggaatggtgttgttcatggtctcggcggccgtcatggcacagcaatcgttcagttcgccagaacaggcgaccagtgcgctggcaagcgccatcagcgagcaaaacgaaagtgcgatgaacaatttgctcggtgaaaactggcgcgatttcctgccgcccgaaggcgttgatcccgaagcggtcgatcgcttcctgcgcgactggaacgttcatcataaaaccgtcatcagtggcaacgtggcgcacctggtggtgggcgataacggctggcagctaccgatcccggtggtcaaaacggcatctggctggcagtttgatatgcaggaagccgcagaagagatcctgacccgcgaaatcgggcgcaacgaactcgcagccatcgaagcgcttcacgcctatgttgatgcccagcagagctattttgcgatgaaccaaaagtacgcgcagaagatagtcagttctgaaggtaaaaaggatggactgtactggcccgtcgctcccggtgaaacgcccagcccactgggtccggcgttcagtcctccacagtcgggggcgggttaccatggttaccgattccgcatcctgccggataaaaatggctttgccatggtcgcctggccggtgaactacggtcagacgggggtaatgagctttgtaattaaccaggatgacgcggtttatcaggcagatctcggcaacgattcggcgcagaaagcgcaggctcttagtgaataccagccggataagacctggcagcctgtcacaccctga

SEQ ID NO: 118907 - DNA, 819 bp, Enterobacter cloacae
atggaagctcaacagcatggcgatcagctaaagcgcggccttaaaaaccgccatattcagctcatcgccctgggcggtgctattggtactggcctgtttctgggcagtgcgtccgttatccagtcggccggtccgggcatcattctgggttacgcgattgcaggtttcattgcgtttttgattatgcgccagttaggggaaatggtcgttgaggagccggttgcaggctcttttagccactttgcctataaatactggggcagctttgcgggcttcgcctctggatggaactactgggttctttacgtgctggttgctatggcggaactcaccgccgtcggtaaatacattcaattctggtacccggagatccccacctgggcgtctgcggcagtcttcttcgtgctgatcaacgccattaacctgaccaacgtgaaagtgtttggggaaatggagttctggttcgccattatcaaagtaattgccgttgtagcgatgatcatttttggcggctggctgctcttcagcggcaacggtggcccgcaggcaaccgtgcgcaacctctgggaacagggcgggttcctgccgcacggcatgaccggcctggtaatgatgatggcgatcattatgttctccttcggcggtctggagctggtgggcatcaccgccgcggaagccgacaacccggagcagagcatcccgaaagccacaaatcaggttatctaccgtattctgatcttctacgtgggctccctggggtcctgctctccctgctgccatggacacgcgtcacggcggataccagcccgtttgtgctga

SEQ ID NO: 118908 - DNA, 1398 bp, Enterobacter cloacae
atggataacaacaaactgtcagtaaaagaaaagatcggctatggcatgggtgacgccggatgcaacattatctttggcgccatcatgttatttgttaactatttttatacggatatttttggtctggcgcctgcgctggttggggtactgctgctgtccgttcgcgtgattgacgccgtaacggacccaatcatgggcgcgattgccgaccgtacccgcagcaaatatggccgatttcgtccatggctactgtggattgccttcccctatgcgctgttcagcatcctgatgttcaccaccccagagtggagctataacagcaaagttatttatgcatttgtcacctacttcctgctgtcgctgacctataccgccatcaacattccgtactgctcgctcggtggcgtgatcaccaacgacccgaaagagcgcgttgcctgccagtcctatcgttttgttatggtcggtatcgccacgctgctgctgtcgcttacgctcctgccaatggccgactggttcggtggggataacaaagccaaaggctaccagatggcgatgaccgtgctggcgctgattggtacctgcatgttcctgttctgcttcgccacggtgcgcgagcgcgttcgcccggctgtacaaacccacgacgaactgaaaaacgacctgaaggatgtgtggaagaatgaccagtgggtgcgcattctgcttctgacgctctgcaacgtctgcccgggctttatccgcatggcggccaccatgtattacgtcacctgggtaatggggcaaagcacccatttcgccacgctgtttatcagcctgggcgttgtcggcatgatgttcggcagtatgctggcgaaagtgctgaccgaccgctggtgcaagctgaaggtcttcttctggaccaacatcgcgctggcgattttctcctgcgccttctacttcttcgacccgaaagcgacgacaaccattgttgtgctttacgtcctgctgaatatcctgcaccagatcccatcccctctgcactggtcactgatggccgacgtggacgactacggtgaatggaaaaccgggaaacgtatcaccgggataagcttctccggcaacattttcttcctgaagctgggtctggcgattgccggggcgatggttggcttcctgctctcctggtacggttatgacgcgggcgcaaaagcgcagagcgcggatgccatcaacggcattgtgctgctctttaccgtcattcctggcattggatatttaattaccgcgggcgttgtacgtctgctgaaagtggaccgtgagaccatgaagcaaatccagtccgatctggagaagcgtcgcaccaactatcgtgaactgagcgactatcaggaatttaaagccgctgagactaaataa

SEQ ID NO: 118909 - DNA, 951 bp, Enterobacter cloacae
atgcaaacctggccaaacccgtttattgaacaacgcgccgacccgtatatcctgcgtcacgaaggacaatattactttatcgcctccgtgccggagtatgaccggctggcgatccgccgcgcggactcgctggaaggtttacgcaatgccgaagaggtagttgtctggcgcaagcccgacaccggcccgatgagccagctgatctgggcaccggaactgcatcatatcgacggcaagtggtacatctactttgccgccacacatacccaggcgctcgacgaactcgggatgttccagcatcgcatgttcgccattgaatgcgcagatcgcgatccgctcaccggtacgtgggtggaaaaagggcaaatcaaaaccccgtttgacaccttcgcgctggatgccactacctttgtgcatcagggcaaacgctggtatctgtgggcgcaaaaagccccggacatttccggtaactccaatctttacctgtgtgaaatggaaaatccgtggacgctgaaaggcgagccggtgatgctcagtaaaccggaatatgactgggagtgccgcggattctgggtcaacgaaggcccggcggtgctgttccatggcgataagctatttatcagctattccgccagcgccaccgacgagaattactgcatgggattactgtggatagacgtagatgccgctccgcaaaacccggctaactggcataaatccccgcgcccggtgttcgtcaccagctacgaaaaccgtcagtatggaccaggccataacagctttacgcagacgccggaaggcgacgatgtgctggtctaccacgcgcgaaactacactgaaattgaaggcgatccgctttacgatccgaatcgccacactcgcctgaagctcgtccgctgggacgacaacgggatgcctgatttcggcatcccgcctgcggatacgctgtaa

SEQ ID NO: 118910 - DNA, 855 bp, Enterobacter cloacae
atgacgttgtttaccatgctgctggttatgatcgccgaacgcctgtttaagctcggcgagcactggcatctggatcatcggctggaagtgttattccgccggatcaggcatttttccatgctacgcacgctgcttatgacggcaggtgtgatggtgattacgttcctgttgctacgctcactttacggcctctttttcaacgtgccgctgctggtggtatggatactgctgggcgtgttgtgtattggcgcgggcaaggtgcgtttgcactatcacgcgtatctgaaagctgcttcccgggatgatgtccacgcgcgcggcgcgatggcgagcgagctgacgatgatccacggcgtaccgccggactgcgatgaacgcgaatttctgcgcgagctacaaaacgcgctgctgtggattaacttccgttactacctggcgccgctgttctggtttgtggtgggcggtccatggggaccggtactgctgatgggctatgcttttctgcgcgcctggcagacctggcttgcccgctaccttacgccgcatgaacgtctccagtccggcattgatgccattctgcacgtgctcgactggcttccggtgcgactggtcggcgtggtctatgccctcatcggtcacggtgaaaaggcgttgccagcgtggtttgcttcccttgcagaccgccataccgcgcagtatcaggtcttaacccgactggctcaattctcgctggctcgcgagccgcacacgaacaaagtcgaaacgcctaaagctgccgtctcgatggcgaaaaaaacgtcgtttgtggtggtggtgattgtggcgttgctgacgatttacggcacgctggtctga

SEQ ID NO: 118911 - DNA, 156 bp, Enterobacter cloacae
atggattcgttcgtgtgcattgaggcctggagggagagtgaaaaatggctgaatattcatcggctggcgcctgtttgtaacaaaacaatacaaagaaatgtcagtcaaaaatttataattgtgctttttaacaccaaaatggattcagaaaaatag

SEQ ID NO: 118912 - DNA, 3024 bp, Enterobacter cloacae
atgttccttctcactcaaatggatgtgtacatgagcaacaatttctttagattaaatcatacaaccaaaactcttggaaagatatttcctgccttgttgatatgcacccctgcggttgcgttttctgcaacgattgaccaatcaacttctgttcctcaagatttctcagccgatgctgaatatattattaataaaaacgtgacgatctcctccgccggtagtgaagcggcggtatctgtctctgggtttgcgatcgataatgtcactaacaaaggaaatatttccggtacaggaactggcctcgatattaatactggcgcgcaacgtgtagttattaacaatgacagtggtgcaaccatttcttccaccactgcgaatgctgtgaatattcagtcattactcggcgatttcaacaacaatggaaatatcatcggtgcggaaaatggcatttatgtcagtgaaagctcctcagcagtaaatattaccaacaccagcactggagtgataaaaggaaaaacaggcctgagttctcagactggcattggtattaataacagtggtgcaattattggtacaagcggtgacgctatcacactaggcactggcaatacaaagatattaaacagtggtacggtacaaggaacccagaacggcattaatgtaaaagatacggcaaaagtagatattacgaatagcggaacgattagtggcgatactgcggctattatgttcgccagcaataaaaataacaccctggtacttgatacgggttccactcttatcggtgacgttatttccaccaattccatgggaaacactctcactctgatcggcaccggtacggaagacagtaacttcgtgggtctgaatgtaggcgacggttttgccagcgtaaaaatggagggtgaaagctgggcactgtcgggcgatctcgacattattggctctggcgactccttgctgatagagactggcgcgttaaccctgtcgggtgcggtatcgaataccggtaatacgcgggtggccaaagacgcctcgctgcaactgggcgatggcgaaaaaactgcgacgctcagcggtgggctcaccaacaatggtaccgtcatttttaatcagggtagcgatttcactttcgccaccgacatgaccggtagcggtaacgtcgaaaaagttgattccaacacgctgaccctgacaggcaaaaatagctatacagggaatacggttctgcacggtggcaccacgctggtctccaccggagcaacgctcggcgtcaagggcagtaacgccaccgttaccgttgaaaacggcgcgacctttgccaccgcaggcgaagtgaacaacaacatcgcgattcttagcggcggtacgctggcggcatggaatgcagtccagggtaactccacgctcagcgcttccggtgttgataccatcaacggcaacgtggctaatggcggcacgctgttgctgagtgcggctgataatagcgttggcaataattttacgattaatggcgactacaccggctctgacggtagccagattgtgatgaacagcactctgggtgaagataactcaccaactgaccacctcaccattacgggcagcagcttcggtcagtccggcgtcagcattaccaacattggcggcgcaggcgcgcaaaccattaacggtatggaaattgtcagcattggcggcagttccgaagcccagctgacgctggcaaaaccggtcgtcgcaggcgcctgggagtataacctctaccagcacagtgacggaaactggtatctggaatcaaaggcgacgccttctgatgatccttccgacgacaccgatgacggtggcaataatgatgacggcggtaacaccgacggcggtggcaacaccgatgacggtggtaacaccgatgacggtggtaacacagatgacggtggtaacgccgatgatggtggtaacaccgacaacggcggcaacaccgacaacggcggcaacaccgataacggcggtaacaccgacaacggcggcaacaccgataacggcggcaacaccgataacggcggcaacaccgataacggcggtaacagtgccccggaagttatggcacctgaagtgggtgcttacttaggtaactaccttgccgcgcagagcatgttcctgcataagcgcgacgatcgcgaccagctcgctttccgcaatgaagacgatctgaacacttggatgtacgttaagggtcgctatcatgagaacgatgcgggtggcgataaagtcagctacgacaccaccaccaccgttctgcaagtcggcagcgatttcatgagcaagccaatggataacggcatcctgcgtgccggtggtatgttcggtgcaggccaggcgaagacccattctgatgcgaagcacaacgtgcgtgacgcacagggtaaagttgatggctttaatgttgggctgtacgccacctggcaggaagatcagaaattacgtctgggcagctacgttgatacctgggccgcttatagctggtacaacaacaaagtcaccagcaatcgtaacgatgaagattacgatagcaaaggtttcgccgcgtctgttgaagtcggccacgcgtgggttatccagtctgaaaatgaacgtacatggaagatcgagccacaggcgcaggtgatctacagctatctcgatcaggaaaatcacaccgatcgcgacggcgtacgcgtaaccacgctggacaatgacagcgtctttggtcgtcttggcgttaaagcaagctacttccagcagaaggacgtcaaggcctggcagccatacgtcgcagttaactggttgaaaggtgctggtcaaaacgatctggcattcaacgacgaaaccgtcagcaacgatacgccagaagatcgtggtcagttagagctgggcataaccggcaacctgaacgaaaccacaacgatctccctgcgtgccagcggtgagtggggtgaaaacagctatgccgcttacggcggtcatattttgttaaaccatcgctggtaa

SEQ ID NO: 118913 - DNA, 546 bp, Enterobacter cloacae
atgaaaaagctcaacgttctccttctttccgctctgactgccgtatcgggctccgcactggccatgggcggcagcattgagcagggtaaaaactttaccaacctgaatgtggaaatggggaaatcaacctccggtctgtacaccgaaggtagctggctgaaaaacaccgatgacggcaccacaaccggtggcgtaggagcaggctacaactttgaagtcggcccggtgatgctgaacgcaggcgctaaggccctctacgttggcccgaaaaaaggcgataacggcgtggcgttcccggtcggcggcggtgtgaacgttgccctgaccgacagcatcagggtattcggtgaaggctacgttgcgccagacggcctgaacaacagcgtgaaaaactacgttgaagcgaatggtggcgtaagctggacgccagtgaagccggtgacgctgaaggtgggttatcgtcacgtgagcgttgatggtaaagacggtcgtcctaaccacacgctgattgacggcgcatatgttggcggtggcgtgtccttctaa

SEQ ID NO: 118914 - DNA, 1371 bp, Enterobacter cloacae
atggcttatcagacagtaaatcctgccactaaccagctcatcaaagaatatccctcccacactgacgcagatgttgaagcggcgctgaaggcagccgatgcgctctatcactccgactgggcgaaaggcgacataagccagcgcctgccggtgctgcataagctggcggacctgatcgacgaacgcgtggaggagctggcgaaaatcgccagccaggagatgggtaagctcatcgaacagagccgcggcgaggtgaagctgtgcgcgcaaatcgcccgctactatgcggacaacgcgaagcagttcctggccccggtgaagtatgactctgaactcggggaagcatgggttgaacatcaccccatcggcgtgctgatggccgtcgaaccatggaacttcccatactatcagctgatgcgcgttctggcgccaaacctggcggcgggtaaccctgtcatcgctaaacacgccagcattgtgccgcactgtgcggaaaccttcgcccatctggtgcgtgaggcgggcgcgccggaaggggcgtggaccaacctgtttatctcgtccgatcaggtggcgaacatcatcgctgacgatcgcgtacagggcgcggcgctaaccggttcagaaaaagcgggcagcgtggtagcggcccaggcggcgaagcacattaagaaatccacgctggagcttggcggtaacgacgtattcgtggtgctcgacgatgcggacctggataaggcggtgaagatcggcgttaacgcgcggctcaacaacgccgggcaggtctgtaccgcggcgaagcgctttatcctgcatgaaaagattgccgatgccttcctgagcaaattcaccgaggcatttaagcaggtgaagattggcgatccgctggacgaaagcaccacgctggggccgctgtcctctaaagacgcgctcgacacgttgaccaaacaggttaacgaggcggtgaaaaacggcgctacgctgcactatggcggcaaacctgtgcagcgagacgggagcttctttgagccgaccatcctgaccaacatctcacgcgacaacccggcgtacttcgaagagttctttggcccggtagcgcagatttacgtggtgaaaaacgacgacgaggcggtcgcggtggcgaacgactcccactacggcctgggcggagcggtgttcagccaggatattgagcgcgcgaagaagatggcatcgcgtattgagaccgggatggtgtacatcaactggctcaccgatacggcggcagaactgccgttcggcggcgtaaaacgttcgggttacggacgcgagctgtcggacctggggatcaaagagtttgtgaaccagaagctggtggtcgttcgcaagtaa

SEQ ID NO: 118915 - DNA, 744 bp, Enterobacter cloacae
atgaccgatacccgccacatccgtcagacctttcaccgcgcctcgggccttgaactacgcagcacgtggcagagcatgcaggcgtacaaacgccattgccaccctcagctctccatcggcgcaattgtggaaggccagacatgctgcgtgtgtaatggcagagaatacatcctccagcccggggacctgattgtgatcccggcttatgtcccacacagctgcaaccctgttgccgggcagccgcgtagttatcatatgctttatatcgatacggaccttccccttgcggttcaggtgattcgcaacgctacgctgtttatgtattaccgggaagttgttgagaggatgtcccctgcgtccgtggacaggctgcttgctgcccttccccattgcatggatgaggcagaaaagcctggatcaaccagccagcaggttcagcaggcatttctttccagtctttccagcccgccttccctcgacgcacttgcgcaacgattctcgctgcgaaaggagacgctgatccgtaccttcaagaaggacacgggcctgacgcctggcagcttcctcaatatctcccgcgtagagtacgccaaagcgcggctgcgtgccggggatgatatcgccgatgtcggctaccagagcgggtttgccgaccagagccattttcataagacctttgtgcgctacaccgccgccacaccgcgccagtacgctacgggccgatcaatatcagacaataaatag

SEQ ID NO: 118916 - DNA, 1125 bp, Enterobacter cloacae
atgatgaaagccgtctccggctattcagtgaattcggtacgtaacatgatcagtgcgattcaggaacaaaccggcacgccgcaaaacccggtcgactggtccgaaccagatatgtggatcaacgaacgcctgaaaggcgaagacgctgagatcgcgctgcgaatatggaatcaggatagccacatcctcaatccgcgccatagctacggtagctatttgtttcttaactcttctgtcttcgagctgatggaaacgacgccgaaagatacctgggtccctacccagcgcgggcagcaattcctgaataatgacgatgccacgttacgcgcgctcgacgataaagaagggttactgcaactccttgaactgcttgcaggacgtgaaatgtcccgtcgtgctgacttactcccggaatggcaggcttttttacaccagcattcaaaattcgcttctactagttctatcaaaagcacgctctactcgcgcctctacaacctgatcgatcgcgatatggtcgcccgtgaagggatgagttactacatcaccgataaaggccgggcatggctagcgaatgcgttaccggcccgaaaagccgacccacgaaaagaacttctggacgcggttaagcgctataaccagcagcaaaaagagcagcttcgcgaacaaatcagcaccatgaatccctataagtttgagcatttgattggtcaacttctggaggcaatgggttatgaacaggtggaagtgaccaaagcgtcgggcgataagggcgtcgacgttgtcggcagagtacaggtgggcattaccaccatcacggaagtggtgcaggttaagcgtatgcagagcaatattacccgccctgttatcgatcagttacgtggggcgttgccttatcacagcgcgattcggggcacgctcatcaccacgggtcgttttgccgggaactgtgaaaaagcggctctgcatcccggtgcggctcctattaccctgatagatggtgaccgactgctagaactgctgattgagaataatgtcggcatccgacgtagcaacgcggtcgagctgctggatgtggatttacagctttttgatgagctggaagagggattaaaaggcgaaatttaa

SEQ ID NO: 118917 - DNA, 1623 bp, Enterobacter cloacae
atggccaaagcaccaacaaaaaaagccaaagcaaagaaaggctttgaagacacattatgggataccgcgaaccagcttcgcggtagcgttgaatcctccgagtacaagcacgtggtactgagcctcgtgttcctgaaatttattagcgataaatttgagtctcatcgtaagaaaatgctcgccgatgaagagcaaaaaatgtttgttgatatggaagtgttctatcagcaggacaacatcttttatttgccggaagaggcccgctggtcatttatcaaaaataatgccaagcaaggcaacatcgccgttctgattgataccgccctctccaccattgagaagaacaacccgacgctgaaaggcgcgctgccagataactacttcagccgtcaggatctggagaccaagaagctggcatcgctgatcgacaccatcgacaacatcgaaacgctggcgcacgaaaccgacgttgaagcgctgtcgaaagaagacctggtcggccgcgtgtacgaatacttccttggcaagtttgccgccaccgaaggcaaaggcggcggtgagttctatacgccaaaatgcgtggtgacgctgctgaccgaaatgctcgaaccgttccagggcaaaatctatgacccgtgctgcggctcggcggggatgtttgtccagtcggtgaagttcgttgaaagccaccaggggaaaagccgcgatatcgccctgtacggtcaggaactgacagccactacctttaagctggcgaagatgaacctcgcgattcgcggcctgtccgccaaccttggcgaacgtcctgcggataccttcttcagcgatcagcacccggatttaaaagccgactacattctggcaaacccgccgtttaacctgaaagactggcgtaacgacgccgagctgaccaacgatccgcgctttgcaggctaccgcacgccaccaaccggtaacgccaactacggctggattttgcatatgctctccaagctgtcggccaacggcaccgccggttttgtgctggcgaacggttcgatgagctccaacaccagcggcgaaggcgagatccgcgcgcagatgatcgaaaacgatctgatcgactgcatgatcgccctgcccggccagctgttctacaccacccagatcccggtctgcctgtggtttatgaccaaatcgaaggcggacgaccccgccaaaggctaccgcaaccgtcagggtgaaacgctgtttattgatgcgcgtaatctcggcaccatgatgaaccgcaccaccaaagaactcacggcggatgatatcgccaccatcgcagatacttaccatgcgtggcgcagcacgccggaagagctggccgagcgtgttaagcgtggtgacagcaagctggagcagtacgaagaccaggccgggttctgcaaggttgccaacattgaagagatcaaggctaatgactatgtgctgacaccgggccgctacgtcggtgccgccgagcagaaagatgacggcgtggcgtttgaaaccaaaatgcgcgagttgtcgcagacgttgtttgagcagatgaagcaggcggaagagctggatagagcgattcgtcagaacctggaggtgttgggttatggggaataa

SEQ ID NO: 118918 - DNA, 1299 bp, Enterobacter cloacae
atggggaataagtggacagaatgtgaattaggcgtttttattgagcttaaacgtggttacgatcttcctaaaagcgctcgaaacgaaggcagcatcccaataatttcctcatcgggttttactgattacaatgacaaaccaatggttaaggggccaggggtagtaacaggtcgatacggaacaatcggtgaggttttctattctgaagaagacttttggcctttaaatacaacactttatgttgttgattttaaggggaacgatccgttatttgtgtactatcttcttcaaacaatatcatatgcagactatacagataaagccgcagtaccagggataaacaggaatcatctgcataaagccaaagttaaagtacctatttctctggagatacaacaaaaagtggctgcccagctatatcaattagagaaaagagtcacgcttggcaagcaaatcaaccaaaccctggaacaaatgtcccaaaccgtgtttaaatcttggtttgtggatttcgacccggtgattgataacgcgctggatgcgggaaacccaatcccggaagcgctgcaatctcgcgccgaaatgcgtcaaaaagtacgcaaaagtgcagatttcaaaccacttccggcggatattcgtgcactattcccggctgaatttgaagaagcagagtcgggctgggttcctatggggtggaaagatggatcacttcctgatatagcttttataaatcccacgtcatggggaaccaagaatcagcctaattatgttaattatgtagatctttctaatgcaaaagatggaataatcagctccattgataaaatatcatttaaagaagcgccaagccgagcaagaagaatattaaaaaaagacgatctaatctttggtcttgttagacctgcaaatagatcgtttgcatatgtacatattgatggtttaactggtagtactggtttcgctgtgatcagagcgaaaaatacaatttataaaaatttcatttattattttgttacctacgacaaaaacgttgaagaactggcaagaattgcagatggcggcgcatatccggcaattaagcctgatgatatatgctctttacctttaataatcccatcagaggagatcgttcagaggtttgatgagttaacaagcaattttagatacctgatgaataattcattagttcaaaacgactttctaaccgccctccgcgacactctgctccccaaactcatctccggcgagctgcccctggaggatctccccgacctcatcaaacaaacagaagccgcataa

SEQ ID NO: 118919 - DNA, 3264 bp, Enterobacter cloacae
atgcatctctcattcagtgaagcgaagttagaacaggcaataattggactgttacaggagcagggctaccagcacctgacaggtgacaatgtgccgcgttccagccacgatcaggtgattattgaagacgatcttcgtcactatctcgctgctcgctatcaggtcgacggtattacggaagatgaaatccagcggctgattaaacaattgaccaccctgcccgcttccgatctctacgaaagcaataagatcttttgcacctggctggccaatggcttcctgtttaaacgcgacgatcgtcagcagaaagatctctatatcgaactgctcgatacacggcacctatccgccgcgctgcgtgagctattcgatagcgaagacgtaccgatgcaacaggctgctgaaacgccagcaagctatcttatccagccgttgaaccgcattaagatcgttaatcagctgaccatcaccggcaaagaaaaccagccgcgcattccggatgccatcctgtatatcaacggcctaccgttagtggtgtttgaatttaaaagcgcggtgcgagagcaggaagtcaatattggtgatgcgtataagcagctatgcacccgctatcgtcgcgatattccgcagctgtttatctataacgcgctgtgcatcatcagcgatggcgtgaataaccgcatgggcaacctgttcgcgccgtatgagtatttctactcctggcgcaaagtcactggtaatgaaaaccgagagcaggatggcattccttccctacactcaatgattcagggactatttcacccggtacgcctgctggatgtgattaaaaactttatctgcttcccggataaagccaaacacgaagtgaaaatctgctgccgctatccgcagtactatgccgcgcgcaagctctactacagcattgagcgagcgcgtaaaccttacggtaacggtaaaggcggcacctactttggcgccacgggctgcggtaagagctacaccatgcagttcttaacacgtctcctgatgaaaagcgtcgagtttgccagcccgaccatcgtgctgatcactgaccgtaccgatttggacgatcagctctccacgcagatgtgtaatgccaaaaattatatcggtgacgataccgtggagccagtcaccagccgcgacgatctgcgagaaaagcttgccggtcgtaatagcggcggcgtcttcctgaccaccatccataaatttactgaagacaccgaattgctctccgagcgaaacaacgtcatttgtatctctgacgaagcgcaccgcagccaggtcaatctggatcagaaagtgatcgtcgataaagagagcggcaaggtacgcaagacctgggggttcgccaaatatctgcacgactcgctgccagcggccacctatgtcggtttcaccgggacgcctgtagacgctacgctggatgtcttcggcgcggtagtggacagctacaccatgaccgaatccgttcaggatgagatcacggtacgcatcgtctatgaaggccgtgctgcaaaagtgatcctggatgccagcaagctggaagaggtagagaaatattacgaagagtgcgctaacgcgggcaccaatgagtggcaaatcgatgaaagtaaaaaagccagcgctaccatgaacgcgatcctcggtgatgaggatcgcctgaaggcgctggcggaagattttgccaaacactatgaaaaacgcgtcgctgaaggctcaacggtgaaaggtaaggcaatgtttgtctgcgccagccgggaaattgcctgggatttgtatcgtcagttaaaagactgtcgtccggcgtggtttgaggtcaaacaggcccctgaaggggttgtgcttaccgagcaggagcagaaagagctgccaccgtccgaaatggtcaagatggtgatgacgcgaggtaaagacgatgacgccaaactgtacgacctgctgggcagcaaagagtatcgtaaagaactggataaacagttcaaaaatgcaaagtcgaatttcaaaatcgctattgtggtcgatatgtggctcaccggtttcgacgtcccggaactggacactatctatatcgataagccgctgcaaaaacataaccttatccagaccatatcccgtgttaaccgcaagctggaaggaaaaagcaaaggcctggtggtggactatatcggcatcaagcgccagatgaaccaggcactggcgatgtattcccgcattgatgccaccaactttgaggacattcagcagtcggtcattgaggtaaagaatcatctcgaccttctgtcgcaagttttccacgatttcgacagccgcgcttacttcacaggagagcctcaggctcagctggcatgtttgaatctggcggcagaatttgtcttgcgtacccagaaaattgaacgtcgatttatggggctagtgaagcgcctgaaggcagcctacgatgtctgctgcggcagcgaggcgctatcgcagccagagcgagatcgtatccatttctatcttgccgtgcgttccatcgtctttaagctgaccaagggtgatgctcctgacgttacccagatgaacgcccgtgtgcgagagatgatttctgacgcattaaaggcagatggcgtggaagagctatttttcctgggcgataagaaagcggaatcgatcgatattttcgacgaggattatctggcgcgtattaataagatcaagctgcccgcaacaaagatccagcttctgcagaaactgcttgagaaagccatcagcgactttaaaaaaattaaccagcttcaggggatcaacttcacccgtcgcttccagtccatcatggataaatataacgagcgccgggaagacgacgtgctgaatggtgaagagtttgatcacttcagtcaggaaatgactgacattatctatgatattaaaaccgaaatgggcacttatgcagatttggggattgatatcgaagagaaagcgttttatgacatcctggcacacatgcgtgacaagtatcagtttacttacgaagacgacaggatgctggcgctggcaaaagagatgaaagcagtcgttgataacacgtcgaagtatccagactggagcaaacgtgatgatatcaaagccaaactaaaagttgagttgattcttttactgcataaacataagttccctcctgtagcaaacgacgaggtctatctgggcgtactgatgcaggcagagaattttaaagaaaatatgggatcgataaaaatgtaa

SEQ ID NO: 118920 - DNA, 933 bp, Enterobacter cloacae
atggccgaaggattaaaaatgttttacgcgcgtgatgagcgcaatgtacactcccgcattcctgtagaagatattaaagagagtaatagagaggggctgatatgtgagttctgccccgctaaaatcagctgggtcaaggcgcacaaacgtaacggcaagaacatttcagcgtttttacgtttacagaaaaatgaggaacatgcattcaattgcaaaaacagcgtcaaatcagcgattacttcgcttgtagcccattcacaaaatattgaagacggaaaacttctcctcgaagcgcaagattcaggttttatcttccgaatgaatgtccttattgaagccagtgccgctctaagaaaagccactttaagattggaagaagaatccgatccggaagagaaagcacgcaagcgaattcgatataagaaaacagaaaagcatctcgctgattactttaacacggctgcaggcattgccaaaatcagagcaaaaatagaggaaagcagcgataagaaaacactctctgacctggtaaagatagattataacggcaagaaaattagctggaatgactttttctatgatgaagaccgttatcccattctttttaaaaaggccgcaaaaatcgctcatcctgtcgcaattcttataacggttaaaaaagcgcgagaacacattaataatgaaaggaataatttcttcgccctcaaaggagaggtatgcacactggagcacgaggataaaagcaaagagtttttcgcgccaggtttaacttgtaacgatgctaccttttttgaaaacctcgaaccaaaagacgagattattgttgtcggtaaagtacgcccaacaacaaaccactggggtgaagggaaaacctataagaatttgaactttactatttttaacaaaaaacaaatcacacggttaacagattga

SEQ ID NO: 118921 - DNA, 492 bp, Enterobacter cloacae
atggccattccgggatatatgtcattaactgacgatgcgggcaatagcataaaaggcagcgtgaaagttaaaggccgtgaaaaccagattgaggttttgggtctctatcataacgtaagctataattctgacctgcacaacggcagagcattgagcaaacgccagcatcgtccctttcttattgagaaagaaattgatgcctccagcgtttttctctataaagcactcagcacgggcggtacgctcaggaaagcgactatcgacctgtacagaatcaatgatgccggtcaggaagaaatctatttcacgataacgctggaagcggtgaaggtcgtcacggtgttttcattaatgcatgacgtgaaagagacttaccatgaaaaacaggggcatcttgagcttgttttgcttcgttatgaaaagattacctggcattaccgtgacggtaacgttattcattcggatgactgggattatcggttaggggcttga

SEQ ID NO: 118922 - DNA, 513 bp, Enterobacter cloacae
atgaagtatattattgcgctattcttcttgtgtttaccgatgggtttatttgccaaaaaccacactcctgaacagatcttgcagatgataaacggcaaaggcgccatgtctgttgtagcggagctggattcaaatgatacgggtgagtcggaatggtggaatcatgtcataccagagataagtaaaggaactcaggcatggttagccgtggcgagtgcccttgaacccggagtggacgccagtacggctgaagatttaaaggcggcgctttctgaagccatcccacataaccctgaaggtgtcctggcaatcttaaataacaataaaccgttactcactgttgaacaaatttgcgcgtttgcgaatttccccgaaacggaggctgagagtaataagctttttgtggattcaatcagggagatgttcaaaataaaaagcccgccgggtaaaagatgtctcgccgttatgatcgccactgttgaacactctgttccattcgataaggatatgtaa

SEQ ID NO: 118923 - DNA, 363 bp, Enterobacter cloacae
atgacatgggattataaagtttcgacgggggtattgagccataatggtgagtttgttgctaactgctacagcggtgcgggtgaatcgaaagataagccagagtgtgaaagtcaacgaaacagaggccccattcccagaggtatttattttattgccgggtggaataatcataaaagtgcagaggccattattcttgagcctatagcggggaccaatacctttggtagagatcattttcaaattcatggtgataaaaaaggccagccgccaggctctgcatcagcaggttgcatcattatgaacagtcaggacaaacgtcatatgatttatgaatcgggtgatacaatactggtggtgcgataa

SEQ ID NO: 118924 - DNA, 1272 bp, Enterobacter cloacae
atggaaaaaatagctgaactcaaacgcgccaagcttctcgcgctgtcgctgctgctgattgccgctgcggcctttatcactaccctgttcctgccgcaaaccttctgggtacgcggcgcaaaagctattgccgaggcggcgatggtcggcgcgctggcggactggtttgccgttgtcgcgctgttccgccgggtgccaattccctttatctcgcgccatacggcgattatcccgcgcaataaggaccgcatcggcgacaatcttggccagttcgtgcaggaaaagtttctggatacccagtcgctggtcgcattaattcgccgctacgagccggcccagatgattggtgcctggttcagcaagcccgacaacgcccagcgcgtcgggctgcatctgatgcaggtgatgagcggttttcttgagctgactgacgacgggcgcattcagcgcctgctcaaacgcgcggtgcataaggctatcgacaaggtcgatttaaccgagaccagcgccgtcatgctggaaagcatgaccaaaaacaaccgtcaccaggtgctgctggacgccatcatcaaccgtctgataaccctgattcagcgagagagcacgcgggaatttatctctgaccagatcgtccactggctgaagaccgagcatccgcgcaaggcgatggtgctgcccaccgagtggctgggcgatcagagcgcagagatggtgtcgaacgcggtgaacacgctgctggatgatatcagccacgaccgcacgcaccagatccgtcgggcatttgaccgcgccacgctgaagtttatcgacaacctgaaaaacgacccggagatgacggccaaagccgacaacatcaagcactatctgaagaatgatgaagcatttaaccgctacctgggtgaaatgtgggctgacctgcgccagtggctgaaaaatgacatgcagagcgacgattcccgcgtgaagcaacgtatcgccaacgccgggctgtggtttggtgagacgctgtcgaatgatgccagcctgcgtgcgtcgttgaacgagcatctggagcaggccgcgcaccgcgtcgcgccggattttgcggcattcctgacgcgccatatcagcgacacggtgaaaagctgggacgccaaagatatgtcacgccagatagaactcaatatcggtaaagatcttcagttcattcgcgtaaacggtaccctggtaggcggaacgattggcctgatcctgtttttactttctcagttgcccgccgtgctggggcattaa

SEQ ID NO: 118925 - DNA, 396 bp, Enterobacter cloacae
atgtatgacgttcacgtgatttttagcgacaggcccggcgagctggcgcgctttggacagctgttaggccgcaacggcgtggggctggaggggggcggcgttttcggtacggatgcccatttcctggtggaggacggggaaaaagcccgccgtgtgctgctcgacgccgggtttaccgtgcaggcgctgcgaaagccggtgatcagaaagcttaagcaggagcgtcctggcgagctgggcgagatagcggcggcgctggccgcaaagggcgtgtctatcctgactcagtacagcgaccacgcgaatcaccttattctgctgacggatgatgataagctggccgctgagatcaccacaccctgggcgacgaatgttaaagacgagcttaccctctga

SEQ ID NO: 118926 - DNA, 954 bp, Enterobacter cloacae
atgctccagagtgaaaatacatcagcgaagcgcatattttttgttgaggattttcaaatattcggcgagcgctacggcatcgactaccgtttcccgcagctaaaagatgagcaggtcagcggcagccccgtgttgcaggggaatgttgaagagatgacgctctcgtccggcatttcactgacccattccgacgtacgtgtattacagccctatgaaaccacctctcgccacagcagcccgctttatatgctggtggtgctggaagggtgcgtgacgctcacgctcaatggtatcgattatcccgtccgcccgggcatggcgttcagctcgcgtctgagtgaagatcaggtgatgagcgcgcgtcacgatgctgacagcacgctgaaaacgctctcgtttggcgtgtacccgcacgatgccggacgtgaagccctgcttgagtcgctgctactggaatggcaaagcctgaatacccccgcgtttgtctggcacgttcccgagtttgtgatgtcaggcattcagcatgcacagcggcaggggggaagcgtgctctcgcgtaagctgttgctggaggggctcatgtaccagctgctcggccacggcctgaaccagtgccagctgccctgtccgagccgccctgagcatgcgcgtctggaacgcgtccggtgcctgctggaacagtctcctgaatgtgaccatacactcgcgcagctggcagcccttgctgccatgagcccaagcagcctgcgcagcaagttccgtcaacgctacggctgcacactcttcgattatctccgcgactgtcgccttgcgctggcgcgtcgctatctgctggaaggccacagcgtacagcaggcggcgtggatgtgcgggtatcagcatgccaccaacttcgccaccgcgtttcgtcgtcattacgggatttcaccgggtgacgtgcgcaaactccgctaa

SEQ ID NO: 118927 - DNA, 5586 bp, Enterobacter cloacae
atgaacgaacaaacgtcgcctgcattttggcccgcccggggaagtctccatgaagggcgggcttttgttctgaaagaggatgttatttttaccgtgctggcgcaggagggcggcatctcctggatgaacgggcggcatccccagtccggcggttcgtttattattgccaccgcggtcagcgatgaagaagaggagcgggcaacgcggctgcttaaaaacgagtttgccctgcgcgatcgacttcatgacggctgggctatccggcccgtcgcttcaacccagtaccgcggacgttttgcgctggtatacgcgccgttctgctttgaactgctggcgtgccgggcaggtaaggcgatttccgggatcgcccgctttatcgagatggcgatccgcatctgcggtcccctgcgccagatgcatctgcacaacctgatccacggcgatatcaaacccgggtcgatcttcgttcatcacgacgccaccagccgtctgtgcagctttggtctttcctgcgccacttccgacgcattctcccagtcccggcttgccgcgtctggcggcacgcccgcctacatgtcaccggaacacaccacgcgtacccggcgcgccgtcgacagccggagcgatctctacagtctgggtatcgtgctttatgaacttctgaccgggcgattgccgtttgaactgagcgctgatgaccagactaactgggcgcattaccacattgcctctgagccgcttgcgccgggccgggtgcgtccggacgtacccggcatgctctcgaccattatccttaagctgttggagaagaatccggagaatcgctatcagaccgtcgacgggctgattgccgacctcaggcgctgccaggcgacgctgaccgccgaaggtgagatcgtcgactttattcccggccagcaggatcgctctccggcgatccatcttgccgattcgcttttctctgcgcatccgcaggccagcgacgtcatcgccgcgtttgagcgggtcagccagagcggtgcgccggaactggtgacgattggcggtccgtcggggatcggcaaatcttccgtgatcgccaccacgctgaaatcgctgcaacagcgcaaggtgctgctggcggtgggcaaggtcgatcaatactctcccacgctgccctacggcgtgctgagttcggcgtttcggacgctcacgctgcacctgctcgggctgccagccggggaggtggcgacgtggaaaatccgcctgtcgcgcgcgctggaaggcttcgaggagctggctgtcagcctggtgccggagctgaatttacttcttgagaacaaaccgcgtttctctgcggatacattttccatcgacgcgcgggcgcgcttcagccatatggtgctggcgctggtgaaaaccttcgccacacagggcgcgccgctggtgctgctgctggatgatgtgcagtggatcgacgccgccagcctgcaaacgctcgatcacctgctgcgcgcctgcggcgccatcccgctgctggtggtggtggcgcaccgcgatctcagttcgctttctgatcccagcttgcagaccgcgctggcgagcctgccggaggcggcgcagcatgccatgacgatcgtgccgcagccgctgtcggtgaaggccgtggcacgctggctcggggggatttttcatgcccgcagtaccggcacctccgatcttgccacgctgatccatgaaaaaaccggcggcaacccgctgttcgttcaggaatttttccgccgcatcgtcgatgacggactggtggtgcacaacaaatatcaggggaaatggcattacgatctccaggccatccgcgcccggcattacaccgagaacgtggtgacgctggtgcttgaacagctcaaggagatgcccgacgagacgcgccgcctgctgggcagcatcgcctgcctcggctgcacgggcgagctggagatgctgtgccgcgtggtggggcagtcggcggcggaaatccgctacgcccttcatccggcggttaccgctcagctgattgtgctgacggagaaagagtacgcttttacccacgatcgggtgcaggaagccgcctttgccctgctggatgagggcgagaaaagccatctgcacctgaccaccgccagcctgctggcggatgccgcgcggcagacggcgggtaacgaactgctgttccgcgcggttcaccacgtcagcgccgcgctggactgcatccagcctgcgccgcagcgccagagattccgtgagctgagcctccaggccgcgcggcgtgcgaagcgtaccggcgattacctttccgccttaagttacatccagaccgccagagcgctggggaacgcgggtccggtctcggactttatgctggatatcgaagaggcgggctgtgagttcgcgctcgggcacctggagcgcacgcgcgcgctgtgcgatacgatcctcggctcaccgggcgggctgacggagaaagcgctggccgctaacctgctggcggaagtctatatgcgccagtcggagatccgcctggcgctggaggcgtcgttatgctggctgggcgtgttcgggatccagatcagccgctacccggaaaatgccgaatgtgacgaggcctggcagcagttctgtcaacgcaccgccgacgcgccgcagaacccgtttactcagcttaagctgatggagagcgcggagaccgaagcggtaatgaacctgctttacagcgccagtattttcgccagctttacctgcccgcgcctgcactttttactcctgtgccggatgatgcacctcacgctcgatcgcggcataaccggcgcatccaccacggcgatggcctggtttggcgtgctgattggccaccgctacgccgaataccgtctcgggtttgagtacggcacgctggctcgcgagctggtgaaccgccacggctatgatgcctatgaagctaaaactctgctgccgctcgaccagctcagcgtctggacccagccgctgtcgtacactatcgagtgcgccaaggcctgctttacctcggcagtgacccacggcgacatgacgatggcctgcttcgcggcttgtcatcagatcattaacttcctctcccggggcgatcatctggacggcgtgttgaccagcatcgatcgcggtctggcttttgtgcgtaaaacggattatcaggacattgaaaccgttctgcacattcagcgccgctacgtggagtttttacgcacgccggtgacgggcacatggagcgccgcccaggcgctgcctgacgatctgctgcccgcaccgccggagcaggcgcccgagcagacctcgaccatgctgttctggtactggctctatcgcgggatggcgcactttacctgcggcgaatacgccgacgcgcaggcggatttagagagggcgggctggtatgcgtggtccgcgccgggccatatccatctgctggattaccatttttacagcgcgctggcgctctcccgccagctcacgccggagaccttctcggcggattatcgccgcagtattcatcaccattacgacaaaattgccctctgggcgcggatcaatccgggcacgtttgccgataaagaggcgctgatttatgccgaaatcgtccgtctggacggcatgaacagcatcgcgctggagcagtatgaaaatgcggtgcggctctcgcgggagggcgggtttaacccgaacaatgccctggcccacgagctggcagggcgtttctcgctggcctgcggctacccgaccgcctccgacgcccatttccgcggttcgattgccgcctggggccgcgccggggcgcaggccaaggtgcgtcagctggagcaggatttcccgcatctgctggcctccgggcagagccgcgcgtacgacaccgtggcatttgcccagaacgaggtgatccgcgatttacagagcgtcatcaaagcctcacgcgccttgtccgaagaaatcaacctcgagcgtttaattgaaaacctgatgacgctgctgcttgaacgggccggggcgcagcgtggcctgctgcttcgcgtcagcgataatcacatcccggagatcgaagccagcgcctggaccagcaccgacggggtgcgggttcgcatcctgaaagagacaccgatggcgacggacatgccgctgtcggtgctggccgcggtgatccgcaccgggcaggagatccgcaccggcaaaccggaggaatttcacccgttcagccaggatccttatctggtgacatccggcgccgccgtgatgtgcgtgccgatgttcaaacaggcgcgactggtgggggtgctgtatctggaaaaccgcctgatgccggaagtgtttaccgccgaacattcgcgcgtggtcagcctgctgggcgcgcaggcggcggtttcgctggagacggcacggctctacgccgagctgctggcggaaaacatccaccgccgacgggtggagaaagagctgcgcgccagccagacctcgctgatgctgggtgagcagatcagccataccggcagctggcgctgggagctggtgcaggatctgatgtttatgtccgaagagtacgcccgtattcttggcctgccggagcagcaaaagatgatctcaatggcggagtttttgaccttcgtgcatgaggatgattatggccggattggtaacctcgttaatcagagcgtgcgtgacgggctgtcgatgcgcgcggagtttcgcattatccgcaccgacggctccgttcgctacattctcgggattggcgatccggtgggcgtgggcagcgaagtgaatgagtattacggcatcattaccgacatcaccagccagcgggcggcggaagatgcgatgcgggtggcgcaggcggatctggcgcgagtctcacgggccaccaccgtcgggcaactcacctcctcgatcgcgcacgagatcaaccagccgctgatgtcgattgtctcgaacgccggcgcgagcctgcgctggctcaaccgcgatccggcgcggctggacaaagtgcgagaggggctggaggagatcgccgccgagggcgagcgggcaggggagatcatccgcagcattcaatctctgacgcgcaaacaggaccccacgtttaggcgcatcgatctgcacttcctgatccaccacatcattatgctctcccgcagcgaacttgagctgcgacacataagcgttgattatctcctgaacgctgacgacagctttatcatcggcgacagcgtgcagatccagcaggtgctgcttaacctggtgatgaatgcgatggaagcgatggcggaagtgacggatcgcccgtgcagcatcacgatcgccaccgcgaactgcgccgaagggaaggtgatctttgagatcgccgataccggcagcggcattgagccggagctcaccgagcggatctttgactcgttctattcgaccaaagcgcagggaatggggatggggctgaccatcagcgccagcatcattgaacggcaccggggaaaactgagtgcgcgccgcagagagccgtacggcacggtgtttaccttcgcgttgccgcttgccggacaggaggcgtaa

SEQ ID NO: 118928 - DNA, 399 bp, Enterobacter cloacae
atgtaccccactctttcgcaggtcattgaggttgtacgtcagtcctcgggacatcatcgcaagcgcattgatgagaacaccctaatcgaagccgacctcgatatatgcggcatggatggcgatgccctgattgaagactgcgaggaagcgtttggcgttacgctcgtcactgaagaagatggttatgagaaaattttttccctcgctgaaaacgagtttctttttagcaccgagggcatagattactttggtatctgccgcttgattcgcaggctacgaggcattcccgaacctgtgatacgcgatttaaccgttggcgaactccatgctgtgctggttaaggctgtgaaagagcagataaagcacgagtggttttttcttaatacgggcatgagatga

SEQ ID NO: 118929 - DNA, 543 bp, Enterobacter cloacae
gtgtcgcccaacaggctccagcgacagttcaatccggatgctccggataagcgttgggtaacggacataacctacatcaggacccacgaaggctggctgtatcttgccgtggttgttgatctgttctcacgcaaaattatcggctggtccatgcaatcccggatgacaaaggacattgtcctgaacgcactgctgatggctgtatggcgccgtaatccccaaaaacaggtgctggttcattcggatcagggcagtcagtacacaagccatgagtggcagtcgttcctgaaatcacacggcctggagggcagcatgagccgtcgcggtaactgccatgataatgcggttgcagaaagctttttccagttgttgaaacgcgaacggataaagaaaaagagctacggaacgcgggaagaagcccgcagcgatatttttgattacatcgaaatgttttataacagtaagcgtcggcatggttccagcgatcagatgtcaccgacagaatatgaaaaccagtattatcaacggctaggaagtgtctag

SEQ ID NO: 118930 - DNA, 369 bp, Enterobacter cloacae
atgggcatcaaagtacgcggcgttaagcagtcgaaagccgggctcaaccgcatcattaatgacgtcaaagggcgaaaggtcgtcagggcgctacagtcagtaatgataatcggcagctcacaggcagcgttgtacaccccgatcgacacctcaacactgcttaatagccagtatcgggagttgataaacaacggcgttcgactgacggggcgagtgggttacacggcgaactacgctgttttcgtacacgatccgaacgtgccgcaaaccttccgccgcgcaaccgcgcagaaagagttcctcactaaaggctttgaagacacccgcagccagattgatgccgtaatgcgcaaggagctttcagtatga

SEQ ID NO: 118931 - DNA, 384 bp, Enterobacter cloacae
atgacacctgccatgtatgagcgcgtgcgtaactacttcgttgatgccgggcttaccactggcttcattgttcagttgctggcatgggacgacacaacgaagttaaccgacgcattcatcgtgttccggcctaacggcggtaccgacatccgaaatgacctcggatctgatcactatgtgctggtggatgtcatctccgccaaagataagcgccgcgcagccgctgagaaggctcaggaaatcatcaattatgtcgaacagaacgacattaacgacgaatgccttggccttattcaaaacatcggcaatatgcctgcacccatcctgaccgaagaggggcgcctggtcttcagactccagttcatgtgcgtttacggcgaataa

SEQ ID NO: 118932 - DNA, 756 bp, Enterobacter cloacae
atgcaaggctgtgctaatgattttggcaagctgatcgggaaagtagctgtgctacgcatggcctttggctgccccgacgcagtgccagcgctttctgagtggaagcgtctcggcgctatgacgaccaagggcatcgactattcgatgaacaccatcaactccgaggcagatgatgctaaagggctggtggagaacctggtcaacaacatggatctgacgatctccggcgaaggtgagtttcgcaagtctgataaagataacgagatcggcgcgtggcgtctgtcgaagtatatctttgacgaagtccaggccggtcgtcagcctaacctgtgggttcgtttcgactttgctggtgagaacgccggtacttatatccagggatacatgaacaccacatcatggtctggcgatttcggtaccaacgatatttccaccttctccggcgagtggaaggtttacgacgctgatactgttgtgtttgaagtcgctgattctatcgcggccactggcgttgaagttacccctgcaactgcatctctggtcgttggcgcaacccaacaactcagcggcgcggttcaaccaaccgatgcgactaacaaagcgatcacctggacgacttcggcgccatccatcgccaccgtcagttcaaccggcctggtgacagcagttgccgagggcaccgcgactattacggctaccactgctgacggtgatttcaccgacacctgtgcagttaccgtgactgccgcgccgtaa

SEQ ID NO: 118933 - DNA, 744 bp, Enterobacter cloacae
atgacccctttgaaagaaattggcgagtgcctgattggtgctggcggccgtgaatacttcttccgtccatcgttccgtaacatgactcggatcggcgaaccagaacatatcgtccgcactttctatgcgctgttcaatgacgatgtagcaaagatgcttgaagcggcgcgcgaaattcacagtgcgataccagagcatcagcgcagattttacgcccactatttcggtgacgttttgctgccccgctgggcacttgatgcatcaggttctgccgcatttgtgcgtgaggcattgctctcggctattaacgtcattcagtcatgctgtgacgaggacgtttcagagctgacaggctggcatgagccatcacgcactggcaggcgtacgtttgtatggcgccgcggcgctctcccgcctgagaacctgattctgatagctcagtcgctgatcatgcatggcgttatcggacgggccaaggttcgtaaattgcagaagcacgaaagcaaggaaacgacgccggagtttcatgcgactgaatacatcatggcggcaagaaaccatttcgggatcagcagggaagaggctgaaaaccttactatgaccgagttcgctatgatgcttaatgccaaataccctgaccagaagggcttcacaagggaagagtacgacgcggttatggacgatgatgatcgccgttggcaggaaatgattgagcgcgaaaaatcagcaaagaaagcggcctga

SEQ ID NO: 118934 - DNA, 441 bp, Enterobacter cloacae
atggatgtactagccacgcctgagcgggcgtatgatggcacgacaaaaaatactcaggggataagagtgaagaaaatacttttggctttggtgattccactggttctggctggctgtaagccgggcgaggaaaaggcaatttctctggcacaatctgaagtttcagccaatctactggatcctggcagtgcacaattccgtaacgtgaaagtcgtgaagatgacagatgccgatgacggtcgtgttaatgctgttgtttgcggggaaattaacggaaagaacggtttcggtgcctatgcagggttccatccattctttgttgagctgaaaatgaaatcgaaggggatgttctcaaaaggcgtcgactacacccttggtgatcacttcctcagttcgaaagatacgcctccaccaccggcctacacagaacgatgccaataa

SEQ ID NO: 118935 - DNA, 2328 bp, Enterobacter cloacae
atgtctgagaaagcaggcgagatttattacgacatcgaggccgatgtatctggcttgctcaaggcccagggaaaggccaataagtcgctcgactccatcggcaactcggcgaccaatgcagccaaaaagatggatgagttgcagacgaacatcaaccgcgtcgccggggcaattgccgcctcactcgtagttgactggggtaaggcgtttctcgtagctgctgacaacatgagccagctcaacgcgcgtatagagaggctcactggtagcgcaggggcagcctcgcagactatgcagagtctgatgcgcatcagttcggcaacgggggggtcgctacaggatacagcgaagctgtgggagactctcagcacggcgttgcgcgataccggcgcgacgaacggccagatcatccagctcaccgaaacacttcagaaaataggtcgcattggcggatcttcgacagaagaaatggcgaatgctcttcgtcagttcggtcaatcaatttcctccggcactgtccgggctgaggagttcaactccatccttgagcaaatgccagaactggcgcggcagatcgccgccgggatgggcgtaagtatcggcgaactgcgtcaactgatgttggacgggaaactgacagcagaagatgccctcaatgctattcagaagcaaaccagctcagttaatgcagagttcgagaaactcccgcgcacgctttcacaggccaataccgctctcaccaactctttcctgaccatggttgataatattaaccaggctacaggggctagcaacgggatggttctggttatcgattctcttgctgttgccattggcaggcttaccgggcaggccgctaccgccagtcagcaaatagcagatctgcgctctgaagccgaaatgtacgctaagcgagcgagaacatggagttggcttggctttggtgactggcagaaagagaacgaggagaaatccgcgcaacttacagctgaagcgtgggagaaggcctctcgcgccggttgggatgcggttcagaaaacagcagcagctactaagcctatcgaaataaaagccatcgccacttcaggtggttctaaaacgaaaggcgggaagtctgctgcacagaaagaagctgagcaatacgccaaagctcaagaatctgttaatcaaaaactggatgagttgcggcagaaggccgagctgtcagctggcagtgtcggtgaactgtccagagcgcaggccgtgcttaatgcgcaacagtctctcggtaataccgccacgcaggagcaaatcatgctggccggtcaactggcaggtaaagcatgggacaatgccaacgcattgcgtgagcaggccaaggctgaacgggagcgcactgaggcagccaataagttcagcaccatccagggtaaaaccagcaaaactgccgggctggatagccagtatcagaaagacattgctgacatccagctttacgcccagctttacccgcaaaaaatcggagaggccgaggccgcgcgtgcggctatcgagcagcagtatcgtgatcagcgtaacgctgcaatgtgggaggaatgggcgcaacagaacgcggccacccaggcagcagcggcggctttcgactcccttggttcggtggccagcaatgcgctgaccggtatcgtaacaggcagcatgtcagccagcgacgcaatgcgtagcatcggcatgaccgtgctgaacagcgtggttaactcgttcgttcagatgggcattgagtgggttaagtcggccattatggggcaggcggccactaccgcgccggttgcagcatccaccacggcacaggcggctggcatcgcaaccacgacggctacatctacagcggcggcggcggctacaacggcagcatggactccggcggccatcatgtcatccgtggcttcattcggtggtgcggtggctattggtcttggtgcgatggctggcatcctggcactgtcaggaaaacgtaaaaacggcgggcctgtctcggctggtgggatgtatcaggtcggcgaaggtggcatgccagagatttaccaggccagcaccggcaagcagtacatgataccgggcgacaatggcagggtgatcagcaataaggatatgcaaggcgggagtggtgtaataatcaacaatatcgtgcaaaattacacccctgctaccgttgattctcagggaactgtgaactcagatggtagtattaccctcactacaattatcgcggatttgaataatggtggcccgataagtcagggtataaccagtaatttcaacgtgaaaagaaccccgaacggtcagggataa

SEQ ID NO: 118936 - DNA, 498 bp, Enterobacter cloacae
atgccaattatcgactatcccgactggctgccgctggcgcagaaggccagcaaaaacatgacactcgataccggtttccagaccgatcagccagcggtcggcccggctattttcgagaatcaaaccgacgacttgaaagtgacctggtcgctgacgtggatattcacgctggcgcaggagcgcgcattccagcagtggttgcgcagcccgaactatctcaaccggggcctgaactggttccggatgaatatcaacctgggcggcagtggtctgcaattgcaggaacttcacttcacgcagatgccggtgcaaaccagtatcgacggcggagtggtgacctggacggggaccgttattgccaaccacctgtacaacgccgatgacgagtttgacgacgtaattgttgagttaccgcctccatggccttcagtgttggatatcgttgtcacgggttatccggacaacagggacccagaatcactaccgagggtgccttaa

SEQ ID NO: 118937 - DNA, 471 bp, Enterobacter cloacae
atgccgagcttcagggagtacaagcagcagcgaccgacacgaggcctttacgacactatcacgttctaccatccatcatttggctacgtccgccttgtcgataagcagttcttcccgaagacgcttggcggccagacgttcacgccagcgcgctttgaaatcgaagagagtcagcagagcggtactccggtgatcgacgcgacggtgaagttagggcggctgtcgtcggatatcaaagcgctgatgaaacagtggaagggtgcggccaggctgactgccatcacggccacgcggcagatcttcgacagcggcgatgtgtcggtaccgataaagtcgtggcagctttacgtcaagacggtggacatcgacgcagactccgcctcggtaaccctgtcagttaccaatcctctgaacaacaatattggtcgcctttatgatccagtcgagtacacgggacttcagtacctctga

SEQ ID NO: 118938 - DNA, 417 bp, Enterobacter cloacae
atgatccagtcgagtacacgggacttcagtacctctgattttatcagcaggatgatcggcgtgccgtgggttaaccgtgcctgctcgttcgataaggtcgattgctggggcttgtgcgtattgtattaccgacatgtgctcggcattgagttgcaccagacgccggactacgaagccggtgaagacttctttacctgctaccagggtgatgtcgttttctggcgcaaggtcgataaacctgtcgagggcgggatattcgtcgggtatcgcggcgcgcaaccggcgcacgttggcctggtgcttaacaggcaggcgctgcattcacgcggcgagaacggaagcgtgcgcatggactcgttgctggtcattcagcgggcattcaccaaagtggagtacttttcgtatggcgctggttga

SEQ ID NO: 118939 - DNA, 2478 bp, Enterobacter cloacae
atggcgctggttgagatatcgaattttccaggaacgcctaagttgcgttgcagggtgccaaacggaatccttttttatgactggctggcggccaatgacgctacctttcaccgcgatctgctgatcgtccgcaacggatttaggctgggcgacgatgacgagctggcgtttgaactgagcgagttggaccacatccagatattcgaccagccaaagggcattgtcggcgatatcctcagcccgatatttaaagtggttggccaagtattttctttccttgcaccgaaaccagctatcgcaaacaacggcggcaataccgtcgactcgcccaacaatagcctgaccggtcagacaaacaccgcgcgcgtatataaggccaagccggacatctacggccaaatccgctctttcccggacctgattcaggaatctgtattcgaatacgttcaccagacgtctaccgacggcggcctgaagtacgtcacagagtggatgtgcatcggtattggaaaatacgattacgagtccgtgcgctactcagaatcaagcctcggttcactggctggcgctgaattccagttcttccagcctggcgaagtaatcccgcagatcgttgaaggttacgggttcgatgacgtcgacgggcaggaggttcccgggcagaacgaagccagcgacttcccgatcgaaacagcaacggcaaacacggtggtcagcggaacgtattccggcggccagatagcgatgaaaatcgttaagcaggctgagttcgattacttcatggggctggttctgccgcacgctgtaaccttcaccatcaacgtgacgtacagcacggcctccggcaacgttactaccgatgcgacattctccggaacgctgatctccgccgttgaaacaaacgacggtgcagtggttaacccggtgcgctggtacacgtttacgatgaatcagctcgaaggaccgcaggacatcccggcgaatgccacgatcaacaccacgaaattcatcctcaacgataacgaagcgctggtggttgggccgttcttttccccggtcgagtcaacgcagctgtggctgcatacccagtccagcctcggcgggaagaaagagaccaactggaaggttgtcatctggaaaatcgacgacgactacaaccaggtgccgggaacgcagcagacgtttacgtaccggcagacgacgccgcaccagtcgacgagcgaggtgttttatcgcaccgacaagatcactccgaccggcgggttcgggaaatacgcggtcagcttccagcgcacggataactccggtgacgcgtcactgctcaaggtcgaagagatccacagcatcaacatcaggacaaacgtcgttcacccgaccgacacgcttgtgcgagtaaaagtccgggcgacagagaacgctcttggcagccgcgagcgcaaatataacgcactggtgacgcgccacaccatcacatacgacctcgacacgcaaatggtggattacaccctgaggccgtcgcgctcgttcgctgatgctgtggcgcacacctggctgattatgggtgagcaaccggtaagcagcatcgacctgtacgggctttactcaatcgccgaaagcctgcctgatgaacggctgggttacttcgactacacgtttgacgacgagaacgactctctcggcgaccgcgtgcaggccatctgcaatgcggcgtctgttgtggcgtactgggatgatggcgtgctgacgtttacccgtgatcagaaagttgattacccggcggccgtattcaaccgggccaacatgaagacggacgagtacaaaatgacgtacgaagccacgcttcctggcggctacgacggcgtacaggtgtcctacgtccacccgaccacgaacaataagacgtacatcaactatcgcgtgctaaacggcgccatcgtcgagcaggaagctgagaacccgaacaagctggagatcgtcggtttccgtaatgagtaccaggctcgggagcgcgcgctgcgcgaaacgaaacgtctgatttactcccgggtgaagatgaacgccaaagttttcgaggacggaattattcaggtaggcagcgtcattcagatgcccgacatctacgacagcaaccagcagcagggttacatcaccggacgcgccgggaataacttcgataccagcgagccgatcgtgtttaccggctcgatgtatgtgctggtgaccgacagtctgggcaatccgacactgcgctatccggcgactgcacgcagcgacacgaagtacggattcaccgcggctatccccaatattcagctcaacatatggaatggagatacggtgcagctcccgtcgcgctatctcatcgcgacagtggaggagctggacagtcagctatggacggttaacagcatcaaacctaacaccgataacacggtatctcttaccgtcgcggaatacagcgacgccatctaccaataa

SEQ ID NO: 118940 - DNA, 2076 bp, Enterobacter cloacae
atggggtggacctataccgatcgctttggtcagaagcactacaccattgagggcatcaactatctttcccagcaggcaatggccgccttcggttacgttatccttaccgggaaaacattcaccaccggcgcgactatcaacaacccgaatgaggtgctgctgaataccgccgacggcgagtattataaatggactggttcgtttgcttccggcccgaaagttgttcctgctaactcaacgccagcaagcacgggtggtattgcgcctggtgcatggcttggtgtgggtgatgcgtcattgcgtgctgcgctggcggctacaagcggggctgggttggttggattgtcggttggctctgtctaccctgctggcactgtcggatctgccatccaataccgaactccgcagatgtatggtattgaaccaagcaccacaaacatcattggctcaggtctggattctatgtttgccgcaggcggggatattcgtttcgagaagcctggtacatatatcactgatagaacatgggtgctcagaagcggaacccgcttgtggattggtcctggagtaacgataaaacttgctaacggctcaaatgtacctgttttcaagaactattcatacgcaaatagctcagccgtagatgcgtatatcgagatctggggttcaggaacaatcgattataatggggccaatcagactgttgtcggccttggatcgatggcgtcaatccttaaaggaataaccagcctaaaaattggtggtggtataaaggttattggcgctaacaaatatgcatggctggtctgtaatgtcacatacttaactgctgttggattgaatttcgacaccaatagtgatggactgcactgccagccaccaatccgccatgcctacattcggaaccttaagggtaaaactggcgatgatatgctggcttttactattggtgactatgcaaattacaatataagtgagcctggtgatttttctgatgtagacgctgaagggttattttgtaattacgctcattgcgcagtaaagattacaggagatggaactggtaactttgttcgcttccgcatctcaggaatttatggagatactgaacagtgtgttgttcgagtttggggcgatgcaaacttaacaaagacggttgttaaaaacctgaccatcgaaaacatctttgctaagccaggtagcactgggtcagaattcgcagcaattgagattaatgacagggggtttggtacctctgggtatagcattgaagttgatacgttattgatcagaaacttacgctcacaaaacgatgcacagcaatccgtctatttcgctggcaccttcggctcggtaatacacgatttagttatagacggcttaccgcgctctgcgttcgccatatttggcgtaaataacgcgtcaatattagccgtagataacctgacaatcaagaatggtaatataattttccaggataatgccaactctgccgttgttgtgaatcgtggcacaataacaaatatgaacattgaaaatgttgcatgtaattttgtaagtacaaacaatggtcaaatagctcggttaatagcaggttgcaccgtaacacgcgcaaactgggttaatgtgtatcagctacgcggccagcgtgggtggaaccatatcacatctgctatgactggcggcactgagctaaacttgacaaattacacttgtgacggcgaaggccgcatcgcacaggttactggttcaactctatcggtgagaatgtctaactgtcgccgtattaacgatactggcgctcagaccgcattctttgcaagtggtggagcaattacgttgtctggtagtctggaaaccgggtttaacactatcggcacaaactctggcggtgttatcaaaacaacgccaggcgttcacaatatcccatgtaacgttgatcttctcacatccgtagatggtgcgagcgtgcataacctgaatacctctctttcatgtggggctggaagggtgttggtgcaaaccaaggtatggaaaaaccttttctctggggctacatataccagcagcatttga

SEQ ID NO: 118941 - DNA, 972 bp, Enterobacter cloacae
atgcgcaacaatgcattggatgcagcgaaactccttgcttgtttctttatcatagtggttcatgtgggtaatttcccagaaatgccacaaccttttggtgaactgttccgtgcatcctcaagatgggcgctacctttcttctttcttgcctctggttacctgatgggaacctctgcgcatgatgacattggtaaaaagcttaataagttggttagcattcttttctggtcatccatgttatacattcctattttgtatagaatgatgcagggtgatatatggcggattattggtaaagttgtatctaatgacgcccttcacggcggaacattcttccacttgtggtttttaaatgcattaatacttggcgttatattgataaattattttataaaaaatgtaagcattaagatatcgttgtttatatcaacagcaattttgttggcgtgctggtacggtgatttggtcaagtcacttcattatgatatttatatattttatgcattgagaacattgatcgcgttttcgcttgtttatcttgggtggttctttgctaaaagtggaatattaaataatatatcaacaagagtctctacgtctgcaatatttcttggtatagtattaatggtcgtcgaggtatacggatttggtcaactatttaatgccgacatggtagaaaggcaatttcctctgttagctgctccggtaagtgtggcattgctgagcttatgcgtgaataaaaatattggtgataatattttctctaaacttggcagagactattcactgggggtatatcttttgcatccattcattctttacatactgacacatgatgtcgggccatatataggaaataattcgatgctaaagctactgattagttttagctcatctatcatcatactgatgatagttaagagaatatttccaatagcgtacaggaagcttaatggaataggtgtgaagtaa

SEQ ID NO: 118942 - DNA, 387 bp, Enterobacter cloacae
atggggttcccgagtcctgcagcagactacgttgaagagcgcatatcactcgataagcgcatcataaccagaccagcggctacgtacttcatgagagcgggcgcaacgcattaccgggaaggcattctcaacggtgcgcttctggtagttgatgcatcgctatcaccatgtgacggttcgcttctggtttgcagaatggagggtgaactgaggattaagcggtaccgaaattctccaagacctcacctggaagatttgcagactggaagaagggaagcgataccggtgcacgatgacggaacgagccctgatgcaatttttggcgtgatcacctacatcatcaacgatgcgcgttcgggtgagttcgacgactgcccggtgatgtga

SEQ ID NO: 118943 - DNA, 1488 bp, Enterobacter cloacae
atgcgcaacccaacacttttacaatgttttcactggtactaccccaccggcggtgaattgtggcgagaagtcacggcattagcccccaacctgaacgaaatcggcattaatatggtctggttacccccggcctacaaaggcgcatccggcggctattccgtcgggtatgactcttatgaccttttcgacctcggtgagtttgaccagaaaggcagtgtcgccaccaaatacggcgataaagcccaactgctggaggccatcaacgccttaaaaagcaaccagattgcggtgcttctggacgtggtggtcaaccataaaatgggggccgatgaaaaggaacccgtccgcgtgcagcgcgtggatgctcaggatcgcacccaaatcagcgatgagatcatcgaatgtgaagcctggacgcgctacacctttcccgttcgggccggccagtattcgcagttcatctgggattacaaatgctttagcggtatcgaccacattgaaaatcccagtgaggacggtatcttcaaaatcgttaacgactacaccggcgaaggctggaacgatcaggtcgacgacgagatgggcaatttcgattacctgatgggtgaaaatattgattttcgcaaccacgcggtgacggaggagatcaaatactgggcgcgctgggtgatggagcaaacccactgcgacggcttccgcctggacgcggtaaaacacattccagcctggttctataaagagtggattgaacatgtccaggaggtggccccgcagccgctatttattgtggcggaatactggtctcacgaagtggataaattgcagcaatacatcaatcaggtggacggcaaaaccatgttgtttgacgcgccgctgcaaatgaaatttcacgaagcgtcacgccagggacgcgactacgatatgagccagattttcaccggtacgctggtggaagccgatccgttccatgccgtaacgctggtggccaaccatgacacccagcccttgcaggcgctggaagccccggttgaagcctggttcaaaccgctggcctacgcgctcatcctgctgcgtgaaaacggcgtgccgagcgtgttctacccggatctttttggcgccagctatgacgacactggcggggatggtgagacgtatcacattgatatgccggtgattgaacagctccacgagctgatcctcgcccggcagcgttttgcccacggcgtgcaaaccctctttttcgatcatccaaactgcattgcgtttagccgcagcgggacagaggagcacccgggctgtgtggtggtgctgtcgaatggtgataacggtgagaagacgatctgcctcggcgagaattacggcaataagacctggcgggattttttaggcaaccgcgaggaaaccgtgaccacggcggcggatggcgaagggacgttcttctgtaacgggggaagcgtcagcgtctgggtgattgaggacgcgctgtag

SEQ ID NO: 118944 - DNA, 1413 bp, Enterobacter cloacae
atggcaagtatttcatcattggggattggatcgggtcttaagttagcagacattctggatagtctgactacggccgaaaaagcgcagctgacgccgatttccaaacaacagtcatcttataccgccaagctgagcgcttacggcacgttgaagagttcactggaagcctttcagactgccaacaccgcgctgaataaagccgatctgtttacggcgaccagcacgtcgagcagcaccacggcattcagcgccaccaccaccggcagcgcgattgccggtaaatacaccatcagcgtgtcgcagctggcgcaggcgcaaaccctgacgaccaaaaatgcgcagccggacagcaaaacggccattgccacggctgacagcaagatcacctttaccgccggtaacggtaaagatccggtgaccgtcgatatcagcgcggcaaactcctcgctgaccggcattcgcgatgcgattaacaaagctgacgccggcgtgaccgccagtattattaacgtcggtaatggtcagtatcgtctgtccatcacctccaccgaaaccggggcggacaacgcggtcagcatcagcgtgagcggcgacagcgccctgcaatcctttatgggttacaacggcaccagcaccgacgccagcaacggcatgacggaaagcgtcaccgcgcagaacgcgaagctgaaggtgaataacgttgatatcgaaaacagcagcaacaccatcagcgatgcgctggaagatatcaccctgaacctgaacgatgtcaccaccggtaaccagacgctgacgatcgctaaagatacgtcgaaagcggaaacggcgatgaaagcctgggtggatgcctacaacaccctgcaagatagcttcgcctcactgacaaaatacacggcggtagatccgggtaaagatgagcaagataccagcaacggcgccctgctcggagacactacgctgcgtactatccagacgcagctgaaaaccatgctgggcaataccgtcggcggaaccgcctataaaacgctgtctcaggtcggcattacttcagatccaagtacgggtaagctggagctggacagcgacaagctgaaaaaagcgctgacggataacccgtctgccgtgaaagatttggttgtgggtgacggtaaaaccaccgggatcactaccaccatggccacccatctgactgactggctttccagtaaaggcattatccaggcggccaaagatggcgtcagcaaaacgctgaacaagttaacggatcaatataacgccgtgagcgaacgtattgatgcaagagtggcgcagtacaaagcccagtttacccagctggacgtactgatgacctcgctgaacaacaccagcagctacctgacgcagcagttcgaaaatacgtccagcaacaagtag

SEQ ID NO: 118945 - DNA, 237 bp, Enterobacter cloacae
atggacggatgttcgcgggcgggtaaatggcacagggtgtcgaacacaaagcgcataataatcgaattcaagcgcctgcgtttgtcgctgaagttcctgatatacctcgtcagcacaggtcatttcctgaaaccggaggacgcattcccgtcgccaggtgaaaaagtctatatccctcatacttgccgaatgaagcctctgataaagataatcattattatggtgaatataacctaa

SEQ ID NO: 118946 - DNA, 471 bp, Enterobacter cloacae
atgacacttgatgcgttatatcagttaatgaaaactgtattaccacctgacaccaattcagccgatgatttacaggattttatggccatgcttatggcgacgaaacatcactcagaggctctgtcaccgttttcgcagcgcgtatacatgctgtccgttgcccatcgcgaccctaagcaagcggctgcgctgatttcagcctgtcatcctgaagcaggaaagccccttccgctgctcgacttctccggctggccgcacgtgcgctacgccacgtcgggtgaattacagacgcctgagactgaagaatattttcacaggatttcgtctgccgccacgatattacgcggtgcaattattgacgctgagcagcagaaaaacacgccagcattttatattctggataaggtactcagcctgaacagcgctttgccagaacgctataaaaagatggcaaacatctcttactcataa

SEQ ID NO: 118947 - DNA, 2079 bp, Enterobacter cloacae
atggctaatctggtggcaatgttgcgcctgcccggcaacctgaaatcgacgcaatggcagatccttgccggaccgattctgatcctgctaattctgtcgatgatggtgctgccgttaccggcatttatcctcgacctgcttttcaccttcaacattgcgttgtccatcatggtgctgctggtggcgatgttcacccagcgcacgctggagttcgccgcgtttccaacgatcctgctgttcaccacgctgctgcgcctcgcgctgaacgttgcctccacgcgtatcatcctgatggaagggcacaccggcgcggcggcggcgggaaaggtggtcgaagccttcggtcacttcctggtgggcggcaacttcgccatcggtatcgtggtgttcgtcattctggtgattatcaacttcatggttatcactaaaggggcggggcgtatcgcagaagtgggcgcgcgcttcgtgctcgacgggatgccgggcaagcagatggcaatcgacgccgacctgaatgccgggctgattgcggaagatgaagcaaaaaaacgccgtgccgaagtgacccaggaggcagatttctacggctccatggacggtgcgagtaagtttgtgcgcggtgacgccatcgcgggcattctgatcatggtgattaacgtcgtcggcggcctgctcgtcggcgtgctgcaacacggcatggacatgggccacgcagcggaaagctatacgctgctgaccattggtgatggtctggtggcgcagatcccggcactggtgatctccaccgcggcgggcgtaattgtgacccgcgtcagcaccgatcaggatgtaggcgagcagatggtggggcagttgttcagcaacccgcgcgttatgctgctctccgcggcggtactgggcctgctcggcatggtgccgggcatgccaaacctggtattcctgctgttcactgccgcgctgctgggccttgcctggtggatgcgtggccgcgaaactcagcctaaagcagagccagcgccggtcaaaatgcctgagaacacccaggcggtggaagccacctggaacgacgttcagctcgaagattcgctggggatggaagtggggtaccgcctgatcccgatggtggatttccagcaggatggcgaactgcttggccgtatccgcagcattcgtaaaaaattcgcccaggacatgggcttcctgccgccggtggtgcatatccgggacaatatggatctcccgcccgcacgctaccgcatcctgatgaaaggggtggaaatcggcagcggtgatgcgtaccctggccgctggctggcgattaacccgggcacggccgcaggcacgttgccgggtgagcagacgaccgacccggcctttggtctggcggccatctggattgagagcgccctgaaagagcaggcgcagatccagggttacacggttgttgaggccagtaccgtggtcgcgacgcacctcaaccatctgattggccagttctccgcggaactgtttggacgtcaggaggcgcagcagctgcttgaccgcgtaacgcaggagatgccgaagctgaccgaagatttggtgccgggcgtgcttaccttaaccaccctgcacaaagtgctgcaaaatctgcttgatgagaaggtgccgatccgcgatatgcgcaccattctggaaacactggccgagcatgcgccgctccagagcgatccacatgagctgacggctgtggtgcgcgtggcgctcgggcgcgccataacccagcaatggttcccgggaaccggcgaagtgcaggtgattggcctggacacgccgctggaacgtctgctgcttcaggccctacagggcggtggcgggctggagccgggtctggcggacagattgctggcgcaaacccaggaggcgctggcgcgtcaggagatgctgggcgcgccgccggtgctgctggtgaatcatgcgctgcgtccgctgctgtcgcgcttcctgcgccggagcctgaaccagctggtggtgctgtcgaatatggagctgtccgataaccgcaatattcgcatgacggcgaccataggagggaaataa

SEQ ID NO: 118948 - DNA, 291 bp, Enterobacter cloacae
atggaaaatacaatgggcggtattatcgttaaccctgctgtaaatatgcatgccgataaaatgtctgatgaacatatcaatatgttcgacacggttttcaaggatattgatggtgcgggttatttcccactactgtatgtcggaagccagcttgtggctggccagttccatacctttattgcgcttcgccgttttatccatgcggaaggcccggaaaaatcactggttaaggtgattatttttcaaagcctgaataatgactttgccattcattcaatttctgagttttaa

SEQ ID NO: 118949 - DNA, 441 bp, Enterobacter cloacae
atgtggaaatcagcgaaaagggatgagtttatcccattagacgcgcctgtagcaggttatgaaataggtgttcctggtatcaaaggaccatctccattgtttattattcgcgcaaaagtgaatggtgggattcatccggggaaatgggtgttcggcaatacggcatgggtcccatggggaggaagagagcacttttgtaatgaatttgaagtttacgtgggcgctttaaaatgggtagacgttaaggataaacatttcccaccgaatatggttgaggcgggacatgaagccaatggcactaagctctacgttgcccgcgcaaaattcgataacggtctctttgtgggtaaagctggaagtcacctcagcagaggttgctgcatcggctataacggcagagagtatgaattagataccttccaggtactcgttcacgactga

SEQ ID NO: 118950 - DNA, 2514 bp, Enterobacter cloacae
atgtcaggggaatctgaggtggctcaacggtgggacacgttaaacagatatttattgtatttcccgcgtagcaaaaatgttatttctgatgttcattcttttacaggaaaagagatattaagcgagccttatcgctataccattcgctttaccagtccggatcaaaacattgccattaatgctgttcttaatcaaagggctgagtttattctgcgtgcacccaatctggaagcctcatggcatgggcaaacctcctggctgccggttcgccagattaatggcacgatcacccaattttcccggctgatgtcttcaggtgacgaagcactgtatgaatgcgtgctggagcatgagctggcgctgctggatcaaaattaccgttctgcggtttacatgaacatgacagtcccggagctcgttacaaagctgatgaaggacagtggtcactttgacggctacaacattgattttgaccaactgagccacagttatccacgacgggaaatgatcgttcagtggaaagaaaccgatttgcggttcatccgtcggctgctggcagagatagggatctggttccgttttgagaatcacaacaaagtgaaaacggaaaccgtcgttatttttggggattctgcgcgtcgttacaacttcagcgacaaacagatgccttatgtccgacattcaggcatgaccagttataacgaatacatcaccgatctggaggagcagcacggcctgatcccaaaaaatgtgttggttcgcacctataactaccgtgacccgcaatcgccgcagacggataagaccgttaaaacgagcgatattcccgaaggtgtaacgacaggccaacactatcactatgccgatcactatcttgctgcgggggattttcacggtgaagaggcggaaaccgccgcattttacgcccgtctgcgttatgaacgcctgttgaacggacagagtattctgggggcgacaaccagtgatcccgagcttcagccaggcattatgttttatcctgcagggcctgtacctgacgggtttaagtccgggtttgtgataactgcgatgattatccgcggcagccgtgctgaacactatcgcgccgtactttctgggatcccctatatccacggctatagcttccgttctgaatacatatcccggccggtgatagccggaacggtgcccgccagagtgatggctatcgggggaaataaaacctatgccggacttgatgcggttggacgctaccgggttaagttcgattttgaccttgatgaaaaacgggtcggatttgaaagcgccctggtacgcctcggcaggccgtacgccggtgacacttttggtattcactttccgttgctggaggggactgaagttgccgttggttttgaaggcggcgacccggacagaccttttatcgcccatgtcatgcacgacggcagccacccggatttagtcacaaaccgtaacgatacccgaaacgtgatccgcacggccgcgttgaacaagatccgtcttgaagatcgtcgcgggcaggaacacatcaaaatctctaccgagtacggcaaagggcaagtgagtgtgggccacctggttgatgctgagggcaaaaagcgcggggaaggtgtggaggctcgcaccgacgactggatggcgctgcgtgctgccaaaggcgtgatgatcaccacggaagcacagccctgcgcggggggtaagcaactggatatgacagcggctattgcacaactcgaaaaggcgttatcgctggcgatgaccctacaacaaagtgcgcttacggcaggtgcgagtaatgtggaaaccgatcggcaaaatgcgctcagccagacgctgagtcatctcgcggagcccggtattttggcatatggaaaaagtggaattgcgcaggttacgccggacagcctgcaattgtcagccgggaaagacctgattgccacagcgggcgggaatgccagcgtgaatgtggtgaaaaaattctcgctggccgtaggggaaaaactgtcgctgtttgcccgcaaactcggcatccagatgattgccggtgcgggggatattacgacgcaggcgcagcggggcgaaatgcacatgctgtcgcagcaggatttcacgctgacgagcaccgccgggaaaatgaacggcagtgccagaaagggaatgcagtttgtctgcgggggcggcgggatccggatcagcccgaccggactggtcacgattttctcgccgacgggcattgaactcaaagcgccgagcctgaaatacgacggtccggaaagtgtgtcggtaccgacgccatcctttgacaaaggcgcctttaaacttcgctacaaactgcacgccggcgatgatccggagcaaattctggcaaacaaaaaattcaggctgaccagtgcatccggacaggtggtggaaggcgtgacggacagctgcggtcgttcacccctgctcgatgctgacgacctcgacagctataaaatggagataatggaatga

SEQ ID NO: 118951 - DNA, 2121 bp, Enterobacter cloacae
atgacggaggcgaagacaaaaccctacgctccacgggtggtatcagaaggcgatattccggtacacaaaaccctgggcgaagtcgcccagacgcgcaacgtcgggataccgcgtccgatgcccggcattgtgatcctcgtccatggcgtgaacgacgtgggtgaagcttaccagaatcaagagaaaggaatacttgtcgggctgggtaagcgactcaaccggcaggatttttacgcccacgaatggaaagactacagaattatcactcccgggcgttcccccatcatcccgttttactggggatataaaccggttacgcatgctgactaccgggcggaccagaagcgctaccgggaggaagtcgggaagctgagtgacaaagcgcatcttccctatgatgcgtaccaggaagataacgagacgaataaaaagtcgctgggtaatgacggaaaagggccgtttcagtaccagaacgataactttaagaacgcacttgataagagttttgccaaggggggcgggacctttgccaacgcgacgacgacgatcccggatatgctggggcccggcgccggtggcttcggcgttgccgctgcgggatttgcctcgctgcacttcaatgatggcgattttacccatcccatttatgaaaacccgcaccgcatttaccagttttttgccgctcaacggctggcggatttgattattcagattcgtcagccgttagtaactcaaaacgatgttatcaatatcgtcgctcacagtcagggcacgattattactatgctggcaaatatgctggtgaaacaggccggatacgatccggtaaattgtgtgattcttaatcactcaccatattctcttgagtcgcgcgtggctgaaaatattcagccgggctatcaacagaccgacgacgccagacagcagacatttaaaaatttctgtcgcctgatgcatacgcaatggaaagggggtgggaaaatggcagagagcgaattacttgctctggaggcctcctgtaccctgcgtaaaccttccgataatccgctgcgaacggatggcagatattgccgaagcaacgacggtaaagtgtataactacttttgcccgaacgatggcgtcgtgtcgctggagaatgtgcaggggtttggctggcggggcattcctcagaatattgccagtgatataccgaatctgtttcagcgtgtgttttaccagcatggtgaagtaggaaacatccctgacgctaacccctttgagttacagccgcgaaatgagggggatgcaaaatatgcctttctcacgaacgccagttacagcgctcgcgatgtggtgataaatggtgaggagttaccggaaccttttattttcaaacttcagggggaggataatcacccggataacgatcctaaaaccagtgataaaccgtatacctattatgtcgatccggacagcccggacgcctacatttcctattccgccaaagccagcgccattaagcgcacagtaacgacaacctttgctgtgaaccgctatcaaaatattggctggcagcctggtcacgttttatctgcttcagagcttaaagaagagagttttgaacgcaagcatgaagttatttatggtgaggtgtcaggttcgcgtgattttcagttagttacccttacctggaagaaaacaccggaagaactgcaagcggaatggcagaaaattgacccggtaggctacagccagcactcctctattgtgatgagtgaatttgtgccatcgcacgctatggcgtttgatttggctattgggcagtgcaaatcattcgattatcaggcggggaaattttgggaagggttgctacatcgggcagactggcgcgatccgcagaacggttatcctgccgctaaagaatattaccgtaccggaatgctagatgaacagcgtacgaaatggtttatgaataagcctgatgaggtgcttccaaaaggggagtacggtgtggaaaaccactttaataatgcctcgccagccatgccgtcacgcgaactgtccatcagaaatcaggatgtggcaaatttgcaatgggatatgccaaagcccatgagtgatagtcaactggctaaaggatag

SEQ ID NO: 118952 - DNA, 708 bp, Enterobacter cloacae
atgaaaatattttttatcggcctgacgaccttagctgttttgcttgtgaccggatgcctggctaaagaaccgccgacgcaggtagtttatcgattcgatgatcatcgttatctcgaactgaaagggtgggattgtgaaggcgaactctggtacacggatactaagcgaggcattcacaccgaaccagttagtcagttttatcgactctttacccgtaaatttattcatccatcagagcgatatattgcactgacgggatggggagtgagtggattcatagtatctaaggactatgggaaaacgtggcgctcagtagcgttttcaccaaatcataatgaacccaatggtgatgactacgcgccgtatgaggatattatttctttcaccgtcgtcaacgatcagggctttttactaaccaagcaccggctgtatatgtcatcaaagccatttgaagacccgcgcattctgcccggtgggccggggattgcctataccgtggatgacggaatgggaaataaagtcagcgggaagctggaaccccgttcccctggctgggcttggggaatggtctacatgactaaacaggggcttgagggcagcacgcagcaacttaaggcaaactggcaagatttacccgacagcgtacccgaagtgaaggagtacaccggctgggatcatatgcgctgtgatatggatgcggggcgataa

SEQ ID NO: 118953 - DNA, 333 bp, Enterobacter cloacae
gtgtctttcaccgtcgtcaacgatcagggctttttactaaccaagcaccggctgtacatgtcgtcaaaaccatttgaagacccgcgcattctgcccggtgggccggggattacctataccgtggatgacggaatgggaaataaagtaagcgatacgctggacccccgtttccctggctgggcctggggaatggtctatatgactaagcaggggcttaagcacagcacgcagcaatttaaggctaactggcaagatttacccgacagcgtacccgatgtgaaaggctataccggctgggatcatatgcgctgtgatatggatgcgggaaaatag

SEQ ID NO: 118954 - DNA, 258 bp, Enterobacter cloacae
atgaaaggcgtcattaggttaaacgatccgctgataagcggaggaaaagtcactaaggcctctggggcagactttatgggtcagcccgtggccttgaaagatgatcttgtgcagtgtccgctccataaagggacgttcccaatcactgaatgtcacccaacctggaccatgcatggccgtggggttgtggtagatggctgtcgcgcggcgtgtggatgtgaaatcaaaagtaccttacctgtggcgggagcttcgtaa

SEQ ID NO: 118955 - DNA, 1395 bp, Enterobacter cloacae
atgcgcgcgtggtggttatacaaaaaacagccagacccggattccactgtgccagtcgtcatgattgttttcctctatgtgatagccgtcgcaatgggcctcgcgatccgggctctaacctggcctgaacaggaacacgttacggctctcttttttgtgccttcagttattctgcccatctgtgttgtgtcgttgttagtttttacaagtttcatatttcatgacgccaacattcattatgctgaaacccgaaaattcatagcaaaagagcaggagattaatttaaaggcgtatgcgcggaaaaatatggctatcgcagcatggtcttcaataacccccctggagcaacccgcgctgaatatgttgaaactggaaggcgaatttccgctggcaccgaaaacgccggttaacattcagctggaagatcgcttcgaccagaccaggaatgaacagatgttttaccgcttactggacccgatggcagaaaaattgaagggctataactaccgtatttttgaaaccgttgtctgggttcgcggagggagtggatcctgcattgatgaactgagacgcactctggagcggttgggtattgaaacggccagcacgtgtaaaattgagtacagcacagaatgccctgactacgcgatcgttagccaatggatgaacttatctgattacagagttgaaaaccggctgattgttatcgttcatttacatgaagaaagcggcgaatcaaagagcatggaaaatgcatgtgcattcctgctgaccagtcattatgtccgggaggagggcgaaaaaccggtatatttatatcagcctatgtctgatgtgaccgatgtagaggacaaaatggcggtcttccttgagacgggttcggtacttacgccgaaaagtctctggtataccgggctgtcccgtattgaaaaatatccattaatgcaggcactggacaaaaaagcgctcacggtggaacggctggatatcgatgcctctctgggcgcaaagagtgccgggtatcggtggctggctctggcatttgcggcggatgcggtaaaatatgcccagggggagcaactggtagcatattcagacaaaaacaaattttgtattactgcgctttcctccatgaagacagctatcccaaaaaaacttacctggtgtaactggagtaatcccctttatcctgcggggatggcggctttattctgcgtgttatccctcattgcctatcgtatcagtttcctggcgcaaaacgatccgccagcaatctgggaactgattgcgagcataatcattcccttcgttatttttataggcctcggtagttttgttttcatctcgaaaacgaatgaagcctacgaggacatggaatacgaatggaagcgatag

SEQ ID NO: 118956 - DNA, 651 bp, Enterobacter cloacae
atgtcaggttggatgaatcaactgcaatccctgttgggacaaaaaggctcgtcgtccggcgaacagggtctgagcaagctgcttgtgccgggtgcgctcggcgggctggccggtttgctggttgccaataaatcatcgcggaaactgcttaccaaatacggtaccggcgcgctgctggcgggcggaggggctattgcaggctccgtcttatggaacaaatacaaagacaaggtgcgcaacgcgcatcaggatgaaccgcagtacgggaagcaggtatctccgttagatttacgcaccgagcgtctgatcctcgccctggtctttgcagccaagagcgacgggcatattgatgccagtgaacgtgccgcaattgaacagcagatgcgggaagcgggcgttgaggagcagggcagggcgctggtggcgcaggccatcgaacagccgctcgatccgcagcgtctggcgcaaagcgtgaaaaacgaagaagaggcactggaactctattttctgagctgtgctgccatcgatatcgatcactttatggagcgcagctacctgaacgccctgggtgatgcgctgaagatcccacaggacgttcgtgagggaattgagcaggatattcagcagcagaagcagaccctcgcgggctag

SEQ ID NO: 118957 - DNA, 2076 bp, Enterobacter cloacae
atgcctccaaaagcccgacgtactccttatgcgatcaccacgcatggcgatacgcgtatcgataactactactggctgcgggacgattctcgttcccggccagaggtgctcgactatctgcacgaggaaaacgactatggccgccaggtcatggccagccagcaggcgcttcaggatcagctcctgaacgaaatggtgcagcgtatcccccagcgtgatgtctctgccccgtggtgcaaaaacggttatcgctatcgccatatttatgagccgggaaacgaatatcccatctaccagcgccagtctgcgctgagcgccgagtgggacgaatgggagatcctgctggatgctaacaaacgtgctgcccacagtgagttttatacgctgggcggcatgtccatttcccccgataacgccattatggcgctggctgaggattacctctcccgccgccagtacggtttgcgtttccgcaatcttgaaacgggaaactggtatcccgaaatgctggataatgtctcccccgatttcgtctggggtaacgattcagaaacggtctactacgttaaaaagcatgcctcaacgctgctaccttatcaggtctggcgtcatacggtggggaccgattccgccgatgatgagcttgtgtatgaagaaaaagacgagacgttctacgtcagcctgcataaaacctcgtctcgccactacgtgattatcttccttgccagcgccaccacctctgaggtgctgctgctggatgccgaactgccggatgcccagccgctgtgcttcctgccgcgccgtaaagatcatgagtacagtctggatcacttccagcacagcttttacctgcgttcgaaccgcgagggcaaaaactttggcctttataaaaccaaagtgcgcgatgaacggaagtgggaagtgttaattcctgcgcgcgatcaggtgatgctggaggggttcaccctgtttaccgactggctggtggtggaagagcgtcagcgcggactgaccagtatccgccaaatcaaccgcaaaacccgcgaagtggtgggcattgcgttcgatgacccggcttacgtgacgtggatcggctttaacccggaaccggaatcgtcccgcctgcggtacggctattcgtcaatgactaccccggacacgttgtttgagctagatatggacaccgggcagcgtcaggtgattaaacaggctgaggtccggggatttgagtcggaaaattatcgcagtgaacacctgtgggtgaccgcgcgcgacggcgttgaagtccccgtgtctctcgtctaccacaaggatcacttcaacaaaggtaaaaaccccatcctcgtctacggttacggctcctacggatccagcatggacgccgatttcagcagcagcaggctgagcctgctcgaccgcggttttgtttatgcgattgcccatattcgcggcggcggcgagctgggtcagcactggtatgaagacggaaaatttctcaaaaagaaaaataccttcaatgactaccttgatgtctgcgatgcgctgatcgcgcagggttatggcgatccgcaactctgctttggcatggggggcagcgccggaggcatgttaatgggagccgtggtaaaccagcggcctgaactgtttaaaggcgttatcgctcaggtgccgtttgtggacgtggtgacgaccatgctggacgaaaccattccgctgaccaccggggagtttgaggagtgggggaacccgcaggatgaaacctattaccgctacatgaaagagtacagcacgtacgataacgtcgaggcgaaagcctatccgcatatgctggtgaccaccggcctgcacgattcccaggtgcagtactgggagcccgcgaaatgggtggcgaagctgcgtgagctaaaaactgacgataatctgctgctgctgtgtaccgatatggactcggggcacggagggaaatcagggcgatttaaatcctatgaaggggtggcgctggagtacgcctttttgattggcctggcgcaggatacgctgccaggccgcgcgggaactcaggcttcgcctaaataa

SEQ ID NO: 118958 - DNA, 144 bp, Enterobacter cloacae
gtgaaaaaaatacgctgggtaattctgattatagtgctgatagcatgcgtggtgctgtggacgcagactatcaatgtgatgtgcgatcaggatgtacagttctttagcggcatttgttcaatcaataagtttatcccctggtag

SEQ ID NO: 118959 - DNA, 180 bp, Enterobacter cloacae
atgtttgcaggtttaccttctctcagtcatgaccaacagcagaaagcggtagagcggattcaggaactgatgggccagggtatgagcagcggagaagcgatcaccgtcgtcgctcaggaaattcgcgccagtcataccggcgagcggatagtggcgcgatttgaagatgaagatgaataa

SEQ ID NO: 118960 - DNA, 312 bp, Enterobacter cloacae
gtgccggtgccagtggtgtcgatcgtcgatctgacggtgacgctgagccgcaacgtgaccgccgaagaggtgaatgacgcgttccgtcaggctgccggtagcgggccgctgaaaggcatcctgggctacagcgatgaaccgcttgtctccagtgattatcagggcgacccgcgctcatccattatcgacgggctttcaacgctggtgattggcgggaatatggtgaagatcctgtcgtggtatgacaacgagtggggcttctcaaaccgtctggtggatttggcggtgctgatggataaaaaagggttgtag

SEQ ID NO: 118961 - DNA, 1017 bp, Enterobacter cloacae
atgaatatcgatgaatttctcgcgccgataagccccgataacccctgcggtgaaaacctggagtacgacgctgatttccaggccatggggcaggccagtcagggcaaagccgaacagcagtttggcgacaccatcattccggcagagcctgccgactggaacacggtggaaaaactcgccaccagcctgctgggccgcaccaaagatcttcgcgtcatgctggcgttaacccatgcctggacgcgtcgtcgcgggctggcaggttacgccgacgggctactgctggtgcaggaagccctgtcccgttactgggagcaactttacccgctgctggaagagtatggcgaaaccgatccgttctaccgcattaacgccctcgccgggctgagcgataaatctgacctgacggtagcggtgcgtaacgcctcactgctccgctctaacggcgatgagatttcgctccgtgacgcccaggcgctgcttgacggcagtaaaacagagtgtccggattatccgggcggtcgtccacgattaatagatgagctggcccggggcgatcagccaggcaccgaagcggtaatcgtgatcaacgaacgcctgctcgccatccgcgaactgcttaccggctatctcggggaaagtggcgtaccggagatggaacagctgctgaaaaccgtcgggcaagtttcgagcgcctgtcaggtgaccgatatcagcaagttgctgccgaaccgtgacgcgcaggctgagcagcaagccgagccgcagccggtgaccgcgtcgcccgttcagcaggtgacggactggcgcagcgtgcaggtgaccagccgcgccgacgcgcagctgatgctggaaaaagcgaaacagtattttgcgcagtacgaacccagccaccccgcaccgctgatgattgaacgggtgcagcggctgtctgaactcaactttatggacattattcgcgacctggcgccagacggcgttaaccaactggaaaacatctttggacgccgcgaatga

SEQ ID NO: 118962 - DNA, 426 bp, Enterobacter cloacae
gtgaaacatatacttttgatcgcgaccagtttgctggcagtttctactctcgcaagcgcggaggcaggaaattacaaataccctcaagcggaagcattgcctcaggatgacacatcaaacttccaacgcgatccgacgctgttaacagggtacgatttaaatctgagtgcagagcgttttgctaaagcctggctgtcgaaaacgaatgaacgtgaacgcattaaggcaaatatgtatcttctcggcgtagtcgacgcgtctgagggcactgcatggtgcaagggcaggccttttttgccaaatacaatacatgagtttctctattctcgttttgcgaacttatcgaaacagaaaggcgaggagcgcgcttcaaaaatcatcattgacggcatgaaagaattacgcccgtgcaaaaaaggagagtga

SEQ ID NO: 118963 - DNA, 495 bp, Enterobacter cloacae
atgagaccattatacgaacaacttaaacgtcagcattactcttcaaatcacacacgcgcgggttttgcctcgggtgaacaggttttttcagaaattggctacgattattcgacgattatcaagcaacaaccggcatacgaaaatacctgtgcggtaagaatgagcctggcattgttaaaatgcaatgttgaatttacagggcgtttacccataaagaccggtccctataagggaaaaacaatcgagcctggcgcaaaattacttgccgatcagctttataaatcccatgtgtttggcaaggcagaaatctttaaagaccgcgaggctggtgcacgctcaatgttgggccgaaaaggtgttgttttcttcaataaaattgatgggtatggcggtggtcatatcgaccttatcgagcctctgagtaataattcgtttatatgtaactccgattgctttccgtactgtcaggaaatctggttttgggaattaaaataa

SEQ ID NO: 118964 - DNA, 450 bp, Enterobacter cloacae
ttgggaattaaaataattatattcaggtgtttaaagaccgtatttcttttgctcacttgcttatctttttctgctcgcggtgacaacccttacgttgatttttatcagcagcaaacataccggcaggtggtaaaagatttggtcctggcgcgctgccttgcgcaggttgcagataaaggcagtcaattttctgctgatgcggcccgcagtgcgagtgcatttattgagtggatgccgtttgatgctgaaaacggtactgacaaagttaacgccattattgggaagtataaaaaccaaattaatggtttccactcggagcgtaaacctgatgtaaaaggcgtaaccttaaattgtctacgtctttatcatagcgacgaactgaataaactggttccgcagctcatcattggcgatcctgatcgtacctggattcaggataatccgccgtag

SEQ ID NO: 118965 - DNA, 171 bp, Enterobacter cloacae
ttgctttcgaaaaagcccttatatggcaaacaggaaagcatggggctgaataaaaccgtccatattttacctctgcctcatatcaaacgacccgtgtcatttgacagtcttacattccccctgaatgaacggaaagaatgtgaagtcttttactacggcggattatcctga

SEQ ID NO: 118966 - DNA, 483 bp, Enterobacter cloacae
atgcgtcctgcttttggtgccgcctggaacagattcagagaagttaatgtcaatgtcgagacggtgggtaaattattgggtggaaaagtccagcacaatatcgaagccggaatttttcaaaatgcatgccccattcgtatgagctacgttttaaattattgtggcgttccaattcccgccaacagtagatatgcgacggttacggggagtgataaaaaacgttacatgtatcgcgtaaaggatatgattgcttttctgccaactgtactgggtaatgcagatctgacggtgacgtctccaacaccaggccaatttgcaggtaagcaaggcattatcatctttaccggtcatggctggagcgatgccactggacatgtcacgctctggaatgggaatatttgctccgatgattgccattttctgggttctcccggtaatggttcgtttattcctggcagcgctacgctctggagcctgaaatga

SEQ ID NO: 118967 - DNA, 354 bp, Enterobacter cloacae
atgaaacatttactcgctttcgtgctggcgttgaatacctcatataccttcgcccaaactctgccggacgttaataccttttctcagcaacagatttttgaaaactgggtgcaaaatcgctgtttcggaaagattgcggatagtacgacactgaaaaatgatgcaaaggcaagcgccgcagcatggctggaagccagtaacctgcctgccgagaatttcgaaaaggccgacgaggttattaacaccttactgaaacagaagctaggtggtacagcaccggtaaactatgaggttttaaagtgcagcctaatttcccatagcgatgcgattcgccaactcagtgtgcaaaaataa

SEQ ID NO: 118968 - DNA, 990 bp, Enterobacter cloacae
atggcaagtccgtcaaacgttgctccaggttactgtgttgttcagcaacccggcactctggattttcaggcaagacagctatttggcaatgtgcgcaatgaaaaatccgagtattttatgcaattgaataaagacactgcgtggctcaagcctggacaaatattaattgtcgctgatccacgtagcgataatcaaacacagcagattaatagtttagccattgcgaaaaagaaggtaaccaacgcgcttgcgactttggacgtggccactgctgaatttttgaaaaataattatgataatataaaagctataacaggctggggcgatacaatcgtcggtggtgtgagtggtgctggtgagtcatattttaagcaaatagaaaatattttaattaaaattgaagctacctatcaaaatcagtacagaacacaaggtgcgcttttcggccaacagttttatgctgagcgcaatgcgcttttcgcacaattgaaacccttgttaaataaaataactaaaaaacagcttaagtttaaagataatgcggatcttaagagagcattagggctttccacgaaatcaattgtccatgaatggagtactgttgggattggcgcaatcccaggttactcaacatatattgacagaactgccaaaatcacctcttatctgaaagcaggcggatgggttgctttaggtttttcttttgttaacacgtctaacgaagtttatcatgcctgcaccactggaagagaaaatgagtgcagcagggttgcagtgactgaatatagcaaatttggaggcggtgtcgctggtgctgcattaggctcatccctggcggctcccatttgtcttgcattaggtgtacccacagcggggacaggaacactcatctgtggtttagtggttggtgcagtcggggctgcgggtggaacacaaatcggtgggtttgcaggagaacagctcaataacttaatttttagcggagaataa

SEQ ID NO: 118969 - DNA, 399 bp, Enterobacter cloacae
gtgatttttaataatatttactctgctgttattatatgtctttttgctgcctttataatcttggttatttcattttatatagactatcggaaaaaacatcgccaggttaaccaaatatattcgatattcacaaatcaacagttgctcaaaaaagaagattatcaaacctggcaaaatcttggattctgggggtttggttttctcaccacaattttatcacggatcttacagggtaagcgtgtgagactcactgagtgtcgttggcttgagccacagtcgtgcaatgaaattttgtctgcctttgagttatcatgggttaagtcttacagaagaaaaatcattattgccactattatatttttagtgctgttaattctttccatcgttaataatatgtaa

SEQ ID NO: 118970 - DNA, 1776 bp, Enterobacter cloacae
atgcgattcacgattatttctacgaaacccggtcatcagccgccgcaaagcagctgtgatttttatgccccgggcggcaccattgggcgcggtacggataacaatctggtgctgccggataatgaccgcaccatctcgcgtttgcaggccatcgttcacgtcgacgccagtggcgaatgccgcgtcacgaaccgcggcagcgttacccgcgtggtactgaatgatatcccgctggagcgtgggcgtcaggttgagcttcaggatggggatattctcggtattgatgattatcgcattgaagtcagcgaactcattcatgacacccagcccgtaagccgcatggcggccagcatgcagcaggcgcgcccagcggcgacacctgctccggcggcacaaccgaaaccggccagcgccgcgccgcgcggaaaagctgaacctacggccgtgccgtcggaaatctgggacagcctgatgcaggagttctccatctccgacagcatctccagcaaccgggcaaagccacagcccgcggcctcccacgacccgttctcccagcctgcggccccggagcggaatgccgaagacccgctggcgatgttcaacgatgccgatccgtcgcttgaacgtaaaaacgtggacccggacacgctgttcagcgatgaagcgttgtttaaaaaagagagcatctttgacgatgtcaccccttcaacgctggtactgccggacgaaagcaaacctgcccagccaaaggaagaggcgtcggatgaactcgatccgttagccctgtttggcgggtcggcgagcgcgcctgccgcgcgtcacgatgacccccttggcctgatgggcggcgcgccgttaacccatccggatgaaatcgtggctgataagccggagccaaagcctgaagcgcaagccgcacaggaagaggatgcgctggccagttcaccgctgttcgatccggaaccgactgaaccacaggacgcgccgcgcgcggaagaagagcccgcgcgtcccgattacgctggcttcaccatgccaacgccgcaggccgtggcgcgcagcaacgcgcaggcaccgaaaggccgcctgcgtatcgacccagttaaaaacgctgcatcgcctgctgcctcagcgcagaccggcgagcggggcgaggtgcttcagggcgaactgctggaggcgctgctggagggcatgggcctgagcgaaatgcagccggtgccgcagtttgaccgggaaaatatgcgtcagctggggcagatcctgggcatgttctcgcagggaaccgtggcgctgctctcctcgcgctccattctcaagcgcggggtgaaggccgatatgaccatggtgcttgacgatgccaacaacccgttcaagctgctgccaaccggtaaaacggtcctgatccagatgttcggcacgccgatgccgggctttatgccgccgaccaaatcggtgcgtgatgcgctgatcgatctgcaggcgcaccagctggggatgatctccggtatccgcgccattatcgccgccatgctgcaatcctttaacccggaacagctggaagagcaggcgaaacagaacggaatgacgtcgcgcctggcgctgccgggcagccgtaaagccgcgctgtgggattattttgttcgcagctatggcgagacggcgggcgagattgaggacgacttccacaccctgtttggcgaagccttcctccatgcctatgacatggaggtcaatcagtacaaagactcacaaagcggatccgaagaaaaatga

SEQ ID NO: 118971 - DNA, 564 bp, Enterobacter cloacae
atgagtaatcccgctggcgaaggcgatctgctgcgcagaggctggcaggcccgcagcaggcaggagaaagtgggggcacgcgacaaaatgcagccgtcactgctggatcgcctgacggataacgatccggaaaaaaaacgcgagtccgccaacagtaatctgattacccacgccgcgctgcgtcgtaacgtcctgcgggatttacagtggttgtttaacaccattaaccacgatgcctccagcgatctgagtggtctgacgcaggtgagccgttctgtcgttaactttggcgtcgcgccgctggcggggaaaagaatgtccgatatcgaatggcacgacattcagcgcaagctcaccgaagcgattattaactttgaaccgcggatcctgccgcaggggcttcaggttcgctgcgtgtccgatacctcctcattagatctgcacaacgtgctgtctatcgaaatcaaaggccgcctgtggtgcgtaccgtatccgctggagtttctctttcgcaccgacgtcgatcttgagaacggccattttgaactgaaggatgcggggtaa

SEQ ID NO: 118972 - DNA, 456 bp, Enterobacter cloacae
atgaacgccagagataaggttttcgttttctggggatgcatggatgccctggccattgtgctctattgtgcccagtccgtgcgacatgacaggatcccttttatttccgatatacacgccttcagtacggttgtgaacacgctgtctgctggtgggtatagcgctctggttattcttttctttattctcgatttcttgttgttactctcttttattgcctcagcatggtgcttcttcgcccggaatttatacgcgagcagactggcgctctaccaggaaatactgcgtctggttggatttcgctactcagtttcccttttccccatggtgttaagtttcacgggcgtgatgaatgtctggctaaatggatttttactcattttgtcagagtttctgaaaatctattccctgtggatttataaatatgaaggggaaaggcccccggttaaagagtaa

SEQ ID NO: 118973 - DNA, 519 bp, Enterobacter cloacae
atggaaagtaggatgattaaagctacattcctcattgttcttccactattttcagcatttacctatgcagggcataataaaatgaatcaagattcgttgtggcaaatgatcaaagaaatgaaatcagtgtggggtaaacaagttgaggatgtcagtaaactgtttaaccaaccgctgattaataatacacaggagaaagaagaccgttatacttcagctccctttacgttaactgatggcacacggatcagcgatgtggatgttcgtttatggggaaatggcgataacagcgtatctttgatttctttcgtaattaatcatccatgtattactcttgaacaagtcaaatctcattttccagatctgaaattgtctaatatccctcgcggaaacacgccgggacaatcagttggatatcgcactcctaccgatgaacgcgggctggcatgggcatttagctttccagttctgaatcaggaatgcctgagcagggtagttatgtcacgctacgaacattaa

SEQ ID NO: 118974 - DNA, 225 bp, Enterobacter cloacae
atgagtgaagttatttttactggttttggcattgacataattaaaagagataatgaatattttatccgatatgatgctggaactattgctatgattgataaagagtcgaaaattacatccgaagaagcattgaaagcacaaagaagtgaaagagatgcttatgaagttattgttgccactcagactagagaagggaaaaataagccctttttttcaaaggattaa

SEQ ID NO: 118975 - DNA, 789 bp, Enterobacter cloacae
atgaaacctttaattcaggtccaggccgtgagccagcgtttttccaccgccagcggcgagtttctggcgctgcaaaacgtctcttttgatatccacgagggcgaaaccgtcagtctgattggtcactccggctgcggcaagtcgacgctgttaaacctgatcgccgggatcacgctgccgacggaaggcgggctgatttgcgacaaccgcgaaatcgccgggccggggcctgagcgtgcggtagtgttccagaaccattcgctgctgccgtggttaacctgcttcgacaacgtggcgctggcggtggatcaggtcttccgtcgcaccatgagtaaggccgagcgcaaagagtggattgagcacaatctcgaccgggtgcagatgggccacgcgctgcataagcgccccggggagatctccggcggtatgaagcagcgcgtcggtattgcccgggcgctggcaatgaagccgaaagtgctgcttatggatgagccgtttggcgcgctcgatgcgctgacgcgtgcccatcttcaggactcggtgatgcagatccagcaggcgctgaacaccaccatcgtgctcatcacccacgatgtggacgaggcggtactgctctctgaccgcgtactgatgatgaccaacggcccggcggccaccgtgggtgagatcctgcgcgtcgatctgccgcgcccgcgcaaccgggtgcagctggcggacgatagccgctatcaccacatgcgccagcagatcctccatttcctctacgaaaaacagccgaaagcggcgtaa

SEQ ID NO: 118976 - DNA, 3987 bp, Enterobacter cloacae
atgcgactggtcattatcggtaatggtatggcggcaacccggctgattgcatcgctcaccgggcgtgtgcccggtcgttttgctatcaccgtcatcggtgacgagccggagcaggcgtacaaccgcatccagctttcgccggtgctgagtggtgaaaagcaggcggagcacatctgtctgcacgatgaagactggtacacggcacgaggcgtgacggtgctgcgaggagaaacggtgctcgcagtagacgttaacgcgcgtaaagtgcgtacctctgctcgcacgctgggctgggatgcgctggtgtttgccaccgggtctacccctgtagtgccgccgatccccggcggcgatgcgccgcatgtgttcacctttcgcaccctggcagagacccgcgccatccagaacctctccggtccggcggtagtgctgggcggtggcgtacttggcgtggaagcagcggcagcgctggcgcgcaacggtgacaacgtcacgcttatccatcgtggtccctggctgatggaacagcagctggatcagcaggcgggactgctgcttgaagaggcgctggctgcgcggggtgttagctgtgaattcgcctctggcatcgcggcgattaacggcaagagcgtgacgctactcaacgggcacagcgtcaccgccgcgcgcgtggtgctggccacgggtgtacaacccaacgttgcgctggcaaaagccagcggcattcactgcgcgcgcggcatcgtggtggatcaccagatgcaaacctccgtgccggatatctacgccatcggcgagtgctgtgaaattgacggccagacatttggcctggtcgccccttgtctggcgcaggcggatattctcgccgcgcggctggccggggagatcaccgcgccgtttacccggaccgacaaaggcgtgcgtcttaaggtgaccggcgtggagctgttcagcctcggacgcgcgacggcgcaggcggacgatgtggtatggagttcatgggatccgctgacccgtcactatcgacgtttactgatccatcagggggcgctggctggcgtgctgctgctgggtgactgccgcagcgcggcaacctttaccgatttactggcaacggctgcgcccgcccacgcggactggctgttcgatcgtttcacaacgcaaccgcaggttgcaggacagaacgctatgacaaaacctactctggtggtggttgggcacggtatggtcggccatcatttcctcgaagactgcgttaaccgcaatttgcatcagcagtatcagattattgtttttggcgaagagcgctatgcggcctatgaccgcgtgcatctgtcggaatattttggcggacgcagcgcggactcgctctcgctggtggcgggggagttctttgccgataacggtatagagctgcgcctctcgcagcagattgtcgctatcgatcgtgatgcacacgttgtgcgtaccgccagcggccatgaaacccactgggataagctggtgctggcgaccggctcgtacccgttcgtaccgcccgttccgggcagcgatctgccgggttgttttgtctaccgcaccctcgacgatctggacaacattgcggcccatgcggcaggctctcgccgcggcgtggtaattggcggcggcctgctggggctggaggcggcgaatgcgcttaagcagctagggctggaaacccacgtggtggagtttgcgccgaacctgatggcggtgcagctcgacagcgacggtgcggcaatgctgcgcaggaaaattgaggcgctgggcgtaggggtacacaccagtaaatcgacgacggagattgccaccgcagacgacgggctggtgctgcgttttgccgagggtgaacagctggaaacggacatggtcgtcttctctgccggtattcgtccgcaggacgcgctggcgcgcagcagcgggctggctattggcgagcgcggcgggatctgtattgacgacggctgccggacctccgatccggacgtgcttgccatcggggaatgcgcgctgtgggaggggaaaatctttggcctggtggcaccgggctaccagatggcgcgcgtggctgccgctgtgctggcgggtgaggagaagcgcttcaccggcgcggatatgagtaccaaactcaagttgctgggggtggatgtggcgtcgtttggcgatgcccacgggcgcacgcccggggcgctgagctaccagtggacgcacgggccgcagcaaatctacaaaaaaattgtggtcagtcacgacagcaaaaccctgctgggtggcgtgctggtgggcgatgccagcgaatacgccacgctggtgcagatgatgcttaacggcatcagtctgccaaaagagccggaaacgctgatcttacccgcgtcgtcaggctgcacgccaaaagcgctgggcgtggcggcgctgccggaaagcgcgcagatctgttcgtgtcataacgtcagcaaaggggatatctgcctggcggtaagtgcgggcgcaacggatatcggcgccattaagcagtgcaccaaagcggcgaccggctgcggaggttgtagcgcgctggtgaagcaggtgatggagttccagcttgcggagcagggcgtggaggtgaaaaaagatatctgtgagcacttcccgtactcgcgtcaggagatataccacctggtgcgcgtcaaccatatccggaccttcgaccagcttatcagccgttacggacaagggcacggctgtgagatctgtaaaccgctggtgggatcagtgctggcctcctgctggaacgaatacctgctgaaaccggcgcatctgccgctgcaggacaccaacgaccgctactttgccaatattcagaaggacggaacgtattccatcgtgccgcgcatgcccgccggggaagtgacggccgacgggctgatcgccatcggccagattgcgaaacgctatagcctttacagcaaaatcaccggcggacagcgtattgacctgtttggcgccacgctcgaacagttgccggaaatctggcaggcgctggtggaggccggatttgagaccggacatgcgtacgggaaatccctgcgcacggtgaaatcctgcgtcgggtcgacctggtgtcgctatggcgtgcaggactccaccggccttgcggtcaaactggagcatcgctacaaggggttacgtgcgccgcacaaaatcaaaatggcggtctccggctgtacccgtgagtgcgcagaggcgcagagcaaagacgtgggggtgattgccacggacaagggctggaacctttatctgtgcggcaacggcgggatgaagccgcgccacgcggatctctttgccagcgatctggacgacgaaacgctgatccgcaccgttgaccgtttcctgatgttctacattcgcacggcagatcgtctgcaacgcaccagtacctggatggataacctggaaggcggcctcgactatctgcgcgaggtgatcctcaacgacagccttgggatcgcccacgagctggagcaggagatggcccgggtggtggagacctatcagtgcgaatggcaaaccaccctcaacgatcctgatcgcctggcgctgttccgcaccgcggtgaatgtccctgccgcggcggagagcaagcgctggcaggaaatttgcggcatcgatgatatccccgagcaggcgggcatcggcgcgcggcttggccgaaaaccgattgcgctgttccgctttggaacgtccgtttatgccctggacgacctggagccgggcagcagcgcgaacgtgctttcgcgcggcatccttggcgatgcagcgggcgagccggtggtgatttccccgctttacaagcagcgcatacgtctgcgcgatggatgtcaggtggagaacggcgaacccgtggtgcgcgcctggccggtaaaaattgaaaacggcaaggtttgggttggaagccaagagctggtgatgcgtgcggaggcctcatga

SEQ ID NO: 118977 - DNA, 651 bp, Enterobacter cloacae
atgactaatcaggaaccggcatctatcctgttgattgacgatcatccgatgctgcgcactggcgttaaacagcttgtcagcatggcgcccgatatcaccgtcgtcggggaagccagcaacggcgaacagggtattgaacttgccgaatcgctcgatcctgatttgatcttgctcgatctcaacatgccgggcatgaatggcctggaaaccctcgacaagctgcgggagaaatccctctctggccgggtggtggtcttcagcgtctcaaaccatgaagaagacgtggtcaccgccctcaagcggggggcagacggctatctgctgaaagatatggagccggaagatctgctcaaggcgctgcaacaggctgccgcaggcgagatggtgctgagtgaagcgttaacgccggtactggccgccagcctgcgtgcgaaccgcgccacgtctgaccgtgacgtcagccagttgaccccgcgcgagcgcgacattctgaagctgattgctcagggtctgccgaacaaaatgatcgcccgccgtctggacatcaccgagagcacggtcaaagtgcatgtcaaacacatgctgaagaaaatgaagttaaaatcccgcgtcgaagccgccgtctgggtgcatcaggagcgcattttttaa

SEQ ID NO: 118978 - DNA, 168 bp, Enterobacter cloacae
atgaaaatagttctcatcaacttgtttaatgccgcaaaatataaggccggaaagtaccaaatggtgccaactctcgccaatacattttgcaaatttgttaagcatttctcttttacggagtcaggcgtagctatgccgccgacgacctttcacaccaaaaacaagtaa

SEQ ID NO: 118979 - DNA, 636 bp, Enterobacter cloacae
gtgtttgcggagtttggtgtactgaatttctggacctatgttgtcggcgcattttttatcgtgctggttccaggaccgaacaccttgtttgtgctgaaaacagggattggccacggcgttaagaaaggctatctggcagccaccggtgtgtttattggtgatgccgtgctgatgtttctggcctgggcgggcgttgccgcgttgatccagaccactccggtattatttaatattgtccgctatcttggggcgttttatctgctgtggctcggcggaaaaatgctctggtccgttatgacacgtcaaaaaaatgcgcacgaaagtagcgccgaaccggcaagcgcgatccttaagcgttcgctggtgctgagcctgacgaacccgaaagcgattctcttttacgtatcgttcttcgtgcagttcattgatgtcaatgcgaagaataccggcacgtcgttcctgatcctcgccacaacgcttgagctaatcagcttcatgtacatgagcttcctgattttctcaggcgcgtttgtcacgcgttacctgaaaaccaaaaagaaactggcgaagctggggaatgggttgataggcctgctgtttgttggatttgcggcgaggctggcgtcgctgcactga

SEQ ID NO: 118980 - DNA, 2187 bp, Enterobacter cloacae
atgaataacataataagatttgccccggctacacttacactcgccattctttcaacgctataccagagcgcgcacgcagcggaagatcctctcgccgatggtgaaacaatggtcgttcaggcaaccgctgaagaggccctaaagcaacagccgggggtttccatcatcacggcaaaggacatagaaaaggatccaccggttaacgatctttcggaaattattcgcaaaatgcccggggttaacctcaccggaaacagcgcgacaggcagtcgtggtaacaaccgtcagatcgacatccgcggtatggggccagagaacacgctgattctgattgacggtgtgccggtgacgtcacgtaactcggtgcgctacagctggcgcggggagcgcgacacccgcggggacaccaactgggttccgccagagatggttgagcgtattgaagtgctccggggaccagctgccgcccgctatggttcgggggctgccggcggcgtcgtcaacatcattaccaaacgcccgtccaacgactggcacggctccctctccctgtacactaaccagcctgaaaatgataaagagggggcgacgaaacgcgctaattttgatctgagcggccccctcgcgggcgatgcgttaacgatgcgcctgtacgggaacatcaacaaaaccgacgcagatgctcaggacatcaacaccgcgcaaaacggctcttacgccgccgggcgagagggcgtacgtaacaaggacattaatgccctgctctcctggaaactcacgccacagcagattatcgatttcgactacagctacagccgccagggcaatatctacgcgggtgatactcaatacagcaacagcaacgtcagccctgacggtctggtgtcgtccctgtatggacacgaaaccaaccgaatgtaccgccagtcttatggcattacgcacaacggcatctgggactggggtcagtcaaagttcggggtttattatgaaaagaccaacaacacccgactggaagaaggctctacgggcaaagttgaagggatgatcaatagcgataaatacgataccagccggctggagtcataccgttcaacgggtgaactgaacattcctttcttctggctggtagaacagacgctaaccgtgggtgcagaatggaaccgtgatgaactgaacgatccggcctcaatgcagtcgacaaatgtgtcgggagaagtgattaacggcgttcccggcacggcttctgagcgcaacagcaaaaacagcgctgacctcaccggcatctatcttgaggacaatattgaagcgcgtcagggcaccaacctgatcccagggctccgctttgattatcacaatcaatttggcagcaactggagtccgagcctgaacctctctcaggatttgggtgacatgttcaaggttaaagcgggtatcgctcgggtatttaaagcgccaaacttgtatcaatccagcgaaggctatctgctttccacccgcggcaatggctgcccgaataacgtttccgaaggaagctgttatctgttaggtaacccggatctggatccggaaataagcgtgaacaaagagatcggcctggcctttgccctagaaggctacgaggccggaattacctggttccgcaatgattacaaaaacaagatcgtttcaggaacggacgtgctggggcagacaagcagcggcgcaaatatcctgcaatgggagaacggcggtaaggccgttgttgaagggctggaaggcaacctcaccgtccctgttattcgcgacacgctaacctggcgtactaatgcgacgtatatgattcagtctgaaagtaaagacaccggtaatccgttgtcgattatccccaaatataccgtcaacaccatgctggactgggaggttaacagcaagctttcagccaacgtaagctggacgatgtacggccgccagaagcccagagaaaacgctgaaatccgcaaagaggaaaatgcgatgtccaacagagagatcggcgcgtattccatcgtgggtatcggcagtaactatcagctgaccaaaaacctgcgcctgaacgccggcatcagcaacctctttgacaagcagatttaccgtgaaaatgacggtgcatctacctataacgaaccgggccgcgcctattacgctggcgtaaccatgtccttctga

SEQ ID NO: 118981 - DNA, 1185 bp, Enterobacter cloacae
atgatgctcacagatacaaaacttcgcaaagcgctcggaaagcgcagagagagtgtggaagttctctcagattcgaatgggcttaacgtcaggttaagcataactggtggcgtgactttcttctaccgttatcgctggcagggtaagcccgtgcaactcagtataggtgattatcccacctactcattagctcaggccagagaccgcaggcagcagttccgcgcctggcttagtgaaggttacgacccgcggcagaaggtgctggtggagaaagcggaaaggatagaggccctaacggttgatcaggcatatgactactgggtgaaacattactgcatcccggaaggcctgataaaaatcgacgccaacaccagaagcttccacaagcacattagcccgcgtatcggcagagttatggttgatcaaacggtcaaagctaactggctcgatgttttcgatgagatggggcgtttggttattaccggcgagatgctttcattaatgaagcgcgcattccggttctgtcataaccgaggggtgattaaaaacaacccactcgaatcactgcgcaggtctgacgttgggattgcggcaaagatgaaggagaggcgactttccgatgaagagataaaagttgtgtgggatgctctgtttgctctccctccgtcgcagcaactggttatcaggtttatgatcctgactggttgcagggctgcagagataaggaaatcgcgatgggactggtacaactttaatgaaaagacctggacagtgcctgctgaggattacaaaacagggaagacgatcaggagggcattgcctgaagtggcaatcagacttcttcaggagcataaaagagggtcggtgacatcgcacgttttaactccggctcagttccgagacaaagaagatattccacctacccaagctctggtctcgacctattccatgcaggtgattagaaagacaggcatgaaacagtggtctctacatgacctgagacgaactgtggccaccaggttgtcagaacttggcgcgccaccgcatgtgattgaaaagctgctcggtcatcagatgggtggtgtgatggccagatacaacctgcacgactatatggatgaccagcgcgagtggttgggtatctggcagaatcacctgcagagcattattgggtatcaactttag

SEQ ID NO: 118982 - DNA, 216 bp, Enterobacter cloacae
atgaatgatagcatcctgcttaccagtgacgtgctggctcgctacaagatatccaggagcaccctttatttctggagtacgccggaacgcatgccagctgcattcacctgtcccttcccgaaaccgacaatccctggcaaccctaagcgctggagagagtcagagattgtttcgtgggaaatgcaggttaatgccactaaagttgatacccaataa

SEQ ID NO: 118983 - DNA, 240 bp, Enterobacter cloacae
atgttccagctaattcaacggggtcagatttacgttgaccagcacggttggcccgtcatcatccacagttgcacttctcaaatagtccgctactggcgacagggccggatcaacaccgcttcaatcgaccgattcaccaatgactttgagcacctcgatcaccgtgaggcggcgcagatacgcgccgaactggagacgagcgagcacattaaatcgctgcgcgctatgcgtgcggcgtga

SEQ ID NO: 118984 - DNA, 513 bp, Enterobacter cloacae
atgcagcaggcaattttagacatgtgctgcgggtcgcgcatgttctggttcgacaagcaggacgagcgcgcggttttcagtgacatccgcgccgagcagcatgagctttgtgacggtcgccaactagtaattagtccagaccttattgctgatttccgcgccctcccctttgccgataacactttccctgtcgtcgtgttcgatccgccgcacctcgagcgtgtcggtgataacgcatggatggggaaaaagtatggtcgacttaacaaagaaacatggcgcgatgatctgcgtgccggcttcgcagaagcatttcgtgtgttgtggccacacggcgtactcatcttcaaatggaacgaaacacagatcccggtaagcaatatcctggcgcttaccgatgagaagccgatcatctggcagcgcaccggcaaggctgacaaaacccactgggtgattttcgtcaaaggtggtgcacatgttccagctaattcaacggggtcagatttacgttga

SEQ ID NO: 118985 - DNA, 219 bp, Enterobacter cloacae
atggccgacattatcgataccgcagcagagattgaagagcttcagcgtaacgctgccctttccgctcaccggatcaaccgcaacgccgtatcagctgaacattgtgaagaatgcgacgaaccaactcccgagccgcgacgcgctgccgttcccggccgccagacgtgcgcggaatgccagggtgttatcgaattgaagaaaaagcaaagggggctgtaa

SEQ ID NO: 118986 - DNA, 612 bp, Enterobacter cloacae
atgaatatgaaaactgaaaaaatcgtgatgatggacagcgatgaagcggccagcatccagactataaccggctgggtggaccgccacggccgtttctggggtaaagatgaacaccaggcgcgttggtgtggcgctactcatcgcaagtgtaaaaacaaacctgatgagcatcctattcatagcactcatggctattgcgaagaatgccaccgcgaaagccgccaggcgaagttcgccacctatgaacgcgcggtatgggccggagagccgctcgttatctttgatgatgaccagtactttttcgatgctgaatcgctggccgactattgctatgagcactccctgctgccgagcgagttgcagttaatgatctgcgaacctaactacccgccggagttcgaccttgagcagcactgcgaagagatcatgcctgatggcgatgactattactgtttgccgcaagctgtgcgcgatgctgctgaggcgctgaataaggcgctgaaagaaagtgctccagtatcgtggagcgccagcaaccgtgtggcaatcgtctctgacgacatgctcaacgacgagcaaaaggccgaaataatggcggagcgcgccgcatga

SEQ ID NO: 118987 - DNA, 219 bp, Enterobacter cloacae
atgacgccagcaaatgaaaacgccatccgcgccgcctgccgccgctgcaccgaggaaatccagcaagccatgcgcaagaagccaaagcctaactggaacgaaacggtgcctcccatcatcaacaagcatcacaagaaaattgaagctctgggagttagcctcctggagttcgtcgtcaaaactggccgccttaacgggcggtttggagccgagcaatga

SEQ ID NO: 118988 - DNA, 552 bp, Enterobacter cloacae
atgaccgattacaccggaagtaataccccagcggatcagcgcgacctctggcgcactccaccagcccttttcgcctaccttgatactgagttctgcttccaactggatgccgccgcggcgccgcataacgcactgtgccggaagttcatcaccgccgagcagaacacgctggaaacgccgtgggctgattacctaaatgttccaggctacatctggctgaaccctccgtacagcgatatcacgccgttcgttaagaaggctgccgccgagagctccaatcagatcggcacggtcatgctggtaccggctgacaccttggttggctggttcaaagaggctatccagaccgccagcgaggttcgcttcatcaccgccgggcggctggcatttatcaacccggtcaccggcaagccagtcagcggaaataacaaaggtagcatgctcatcatctggcgaccgtacccgcgtacacactgccacttcgcaactgtggaccgggatgagctgatggctttcggggcgaaacttctcgcccgtcgggaggccgcatga

SEQ ID NO: 118989 - DNA, 168 bp, Enterobacter cloacae
atgaaagcgtggtcactcgaagagctggcgctgctgtggcgacactcaaacgctgaagtcgcagagattaccggccgcagcattgaagaggtcggagataagcggctgcaaaccaataatgagcgtaatggctgggatgtaaacgatccggagcgggaggaatcatga

SEQ ID NO: 118990 - DNA, 429 bp, Enterobacter cloacae
atgaaacgtacacccttctaccgcaggcccgggcgaaccgggcaattctctggcctccgtgagcgcgttatctggatgattcagacgcggggccgtccggtatccggcagcgaaatcgccgagaagttcggcgtaacgctcatcgagtttaaccgggttgccaacgggattacccgcggctccggacagatagcgcagatcgttgagtcaaaaaaatggcttaacgaggacggcatctgcgaccgagcattcgacctggtaacgaagccaaaggtcatcacgcctcaaggcaaatcgtggctgttcacccggcgcgccattgagcaatctcaggaaggtagacggcaggaatgcattgaacgtgccgcccgccgtagccgactgattgctcagggcctctacatcgacgaaatggagtcagtgctatga

SEQ ID NO: 118991 - DNA, 285 bp, Enterobacter cloacae
atgaacgcatacctcacatacgaccgcatcgaagatcggcgttgggctgagcagcagctcaccgacgagaaagagaagtggatcgacgaccgggcgcagcaaatcatcgacatgatgccaaaagagccctccggactcttccacttcacggtcccgattgactccagcccatacgaaggacttcgcagcgataaagctggcgaggcctacaacgatttcatttcggcagttgcttacgcccaggcggaatacgactgggaacaccgtaccggctgcccgttttaa

SEQ ID NO: 118992 - DNA, 198 bp, Enterobacter cloacae
atggaaactttattcgcgctcgtcctgaccgtggcaatgaccaacggtgattaccaggacgtcattctcggcgtttacgacagcccgcaggaatgcagccaggcagctacagagcagaaagtgtcagctgagtgctggccggtagaaagcatcctccgcaacggcgagttcccggcgaaatccatcgcgcagcactaa

SEQ ID NO: 118993 - DNA, 210 bp, Enterobacter cloacae
atgtccatgaatgtatttgcaggaaagagaactgaggaatcagtggcatatgatttagcgctggcgcttgcagtaaaagacccatccgccaacacgccagaagctttaattgagcgcattgctgatttgcttcctgcctgtcgtgaagcagcaaaggaaaagtacaaagcagaagcacctacgccttttgggatcgctataaaacgataa

SEQ ID NO: 118994 - DNA, 198 bp, Enterobacter cloacae
atggacttggatgaagaaagagtgaacatgatggttcacgccatggggcgggcggtcatggagttgtcactggcagatttacctatgacccagcaaaacatcatcgacaagctggaacggtaccggaaggaaacgggaaacgtgataggtaagggtgtgaacagggatgcagctgagatagtgcggaagggtaaataa

SEQ ID NO: 118995 - DNA, 408 bp, Enterobacter cloacae
atgacgattgacagggttctttcaattatagcaacaacagtatcatttattgcaattcctgcaagcggattcataagttacagatacgcaattttaggtgagcgccgtaaggaatttaacgcagttgcggataatattcgccataagttgcgtgaacaccagaggcatatggagcaaaacatctatccatctggtgagtatttagaaatatcacaacaagaatttgacaccctggcagacgttgcatatgaaagggatagaaaaacgatccgcaccttgtgcgacaagtatcaaaaatcccttaattccagcataacgactgatgaatatggagactatgacattgtagattttaatgaggcattggcattcttaaaagaactcatgcctctcattgaaaggaaataa

SEQ ID NO: 118996 - DNA, 711 bp, Enterobacter cloacae
atgagcagcatttctgaaagaattaaatttttactggcaagggaaggcttgaagcagcgggatttggctgaggctttgtcgactagcccacagaccgtcaacaactggataaaaagagacgcgttaagtcgtgaggcggcgcaacaaatatctgaaaaattcggttattctcttgactggttattaaatggagagggttctccaaagaaggctctggagagcaacatcccgccagagtctgagtggggaactgtcgacgcttgggacaaaaatacccccctacctgacgatgaggtggaagtaccgtttctgaaggatatcgagtttgcgtgtggtgatggacgagtacacgatgaggatcacaacggttttaaattgcgcttttcaaaagcaacgctccgtcgagttggagccaatagtgatggttctggagtgctttgctttcccgcttctggtgacagcatggagcccgttattcccgacggcgcaacggtagcagtagatacaggcaacaagcggattattgacggcgaactctacgccatcaaccagggagatctgaagcgcatcaagcaactttatcgcaaaccaggcggaaaaattctaatcagaagcattaatcgtgattatgacgacgaagaggccgatgaggcagatgtcgagataatcggttttgtgttctggtactcggtattgcgatatcgccgataa

SEQ ID NO: 118997 - DNA, 222 bp, Enterobacter cloacae
atgatcaacaaaaaatccaacgccagcaccccgcttgagaaagccattaatgcagtgggcggctctcaaaaggtgcttgctgaaaaggtcggcgtaacgcctcaggccatcaatatgcttaaaaagcgaggtggcagccttccagtaacaaaaatgcgtaaatacgaagaagtaaccggacttcctcgcgaagttctatatccaggtatctttgccgcctaa

SEQ ID NO: 118998 - DNA, 543 bp, Enterobacter cloacae
atgcattcacttgcgtatcaacacaataccggaatacacccgggagcggtgataaaccgcgctcaagctaaggcggtgccagaccacgaaaagatccgcgatgcggtccgggcatggtcgtcggcgctggacaatcaggacgtcgtttctgcgctgatcatcaacgaataccgggagcagggcgggaccgccatcagcttcccggaagacatcagccgggcgcgccagaagttgttccgcttcctggataaccgtttcgactccgaacagtaccgcgagaacgtgcgccagctgacaccggcaatcatggcggtacttccactggaatttcgcaaccgcctggttccacagaacgacacgatgtcgctgatcgcatccgcgatgaaagagtgtgccgaagctaaacaggccgtgctcctggacgctccagagcatcagaagctgaaagaggtaagcgaaggtatagcgtcgctgttccgactcatgccggagcaggtagggccgctgatgacgatggttacgtcgatgctgggggtcatgtga

SEQ ID NO: 118999 - DNA, 1374 bp, Enterobacter cloacae
atgagccgttttattgatttatacgttgagcaggccgtcattggcggaataatgcttgcagcaggtcgcgcagatggcgtggacatggctaccgatgcgattgaggggcttactgaggaccacttcacagcaacgccccataaagtggctctgcggtcatataagcgactcaacgaatccggttcgaagatagacctgcttacgctgaccagcgatcttgaacaactcggggtgcttgagagtgcgggtgggttcgcttacctggctgaatgcagcaaaaacactccctctttcgcaaacctggcagcctactgcgaaaagcttcgtgaaatgtaccttggtcgccgtatgaccctggcgttacaggtcgggatccagaagctttctgaaccaacgaccgagggtattgctgacatcattggcaacattcaggccgacatctctggaattgagcacagcgctgactacggaactgaacacatcaccactggcatcgacatgtcgctggaaacaatccaggcgatcatcaatggcgacatctggaaatacaaaacagagctgggtatgtcgaccatcgatagcgctttcggaggattcaacaatacggattttatcgtcgttggcggacgtcctggcatggggaaaaccatgtttagcaccacagtgacagaaaccgtaggcctgaaaaacaaaaagccggtgctgttcttcagtctcgaaatgccagtggaacaaatctctgagcgagtcgctttccaccgggcgcgggtaagcaaagaagatctgctgagcaaagttagcgggaaaatggacgaggcatgggggaaggttagtcactgcatgaaggagttcatcgactctccaatctacatcaatgacaagccatccctaagcgttcaccaggtgcgtgctgaagcgcgcagaatgagcaagaagctgggcggactgggcgtggtcatcgtcgattatcttcagaaaatgcggatgtcagacccggagaacatgaaccgcagtgtaggggagatcgccactggactgaaaaacctggcgaaagaattgcgttgcccggtcatcgctctggcccagctgaaccgaaaccttgaacagcgcgctaataagcgtcccgttgcggcagacctgcgagagtctggcgtcattgagcaggaagcagatgtgatcttcatggtttaccgggatgagaagtacaacgaaaacaccgaactgaaaggcatcaccgaaatcatctgtgtgaagtcccgccatgcgccgggggcagaaaagacctaccacttcagcagccgctactccggcctggacccggtagatttcacctacagcggccagatgcaacaggaggctgactatgagtgctaa

SEQ ID NO: 119000 - DNA, 315 bp, Enterobacter cloacae
atgagtgctaagacgatgaaaggcaaacaggcaattctgcgttatctcgaaacgcaccggaccttcaccgcgaaggatgtggccacagagtgcggcatgaccatcaactgcatcacgaagaacgctatcgatctggagcgggcccgcaagattgtccgggtgagcaaggtctggcgaacggtgacttatcgcctgtcgactccggaagagcaggacggcaccgcgcgcagctgcaccaacggaatatttcaggagtgccggaacagtcctgcgatgaagcgagtattgatggtttgggggagggtaggggtatga

SEQ ID NO: 119001 - DNA, 297 bp, Enterobacter cloacae
atgaaaatttacatcgcaggaccaatgacgggttacgaaaactacaaccgtccgatgtttaacgcagtagcacagcagatgttatcaggaggtcatgtggcattaaatccggccacgctcccggatggtttatctcagcgtgagtatatggacatctgcctggcgatgcttcgctgcgccgacgccattcacatgctgcatgggtggcaagagtcggaaggtgccgtcgctgagcatgccatggctaaaaagctgggaattaaaatttcttaccaatttgaaggagctgccgcatga

SEQ ID NO: 119002 - DNA, 363 bp, Enterobacter cloacae
atgaaaccaacatacgaagaacttgaatccagatgcgcagagctggctgcggagaatacggggctgaagtcttccgtagctgaagtgcgacgccaggcattcaatgctcgaagaaactcacataactgcggaccttttcagtattcagatttatgcgattcaatcattgacgaaaccaaggttgaaaccccggccaccgacgctttcctggctgaagtgcgggccgccgcagtagatgaagtttgcctgaaaattagcaacgcaattattaattgctatcaggacgaacaaattgggcttgatgcagcagcaactatctgcggtgacttcgcatcagggcttcgcaaaggagtgcagtcatga

SEQ ID NO: 119003 - DNA, 417 bp, Enterobacter cloacae
atgagcaacgtcgacaaacttatggaaaagctgaaatcggctgcgctaaagcttaactgcgagcaatggcaaacacgcaatggctttagcggcgttgaggtgattgttaaaggcagtgtggaaaaggggcatggttgtgtgagttatcagccggtcgcttctgaactggttgataccaaaacggcaaaggcaatcgctttattttgtccggccaacattttggcgctgctggatgagctggaagccaaggaaaagcggattgctgagctggaggcgcgggaagttgtacttccacagcgctatagcatgttgcatcgcgtcgatttcgatgagccgtatcacacggaaatggtttacaagcagcatcaggtgcttgaggcactgcacgacgctggcatttgcatcaaggtggagtag

SEQ ID NO: 119004 - DNA, 681 bp, Enterobacter cloacae
atggctgaactaaccaaagaatggctcctgaagaccataacggagcttgaagaagagcgcgatgcgacgccaggagctgtaaacgaagatgcggccatggcgcttgcggcgatgaagctagcgctggcatcgctcgacgcggagcctgttgggttcatcgcaaggcacaaagaaactggcaaatttggtagctatctgcatccaaaggcggattggtttaagaatgatgattacgaagtcttgagcgcctacacagcccctccagcgccggtatctgtgcctgatgcaatgacaccaaaacaagcatcacgcgcatattgcggagaagtacgcggatgccgagatggctggaacgcctgccgcgccgccatgcttcagggtgccgaacatgtaacgacggcttacaagttgcctgatgattttatttgcatgcttactggtagagctaaatatcttcgagaaaaaggagagatcaaatcacctgagcttttggagcgagctgctgccgcgcttcagggggaaagcgttaatacctcctccattcctaatggatggaaacttgttccgattgacccaacaaaagatatgttgcgtgcggggcaatcggtggttgggttctggctgaatacagtgcattgctactcgaaaatgctcgccgcagcaccgcagcaggaggcatga

SEQ ID NO: 119005 - DNA, 240 bp, Enterobacter cloacae
atgtacgacaattacaccatcaaccgctgcgacgccatggagtggcttgcagagcattacccaaccttcccggacaggatgccagatgtgccgcttaaggccgactggtgtagcgccagcctgttcagagggtggagtttcgttatcttgctcaatggttcactggtctttgctgactgcctgtcacctcccatccgggcagaagacatggctggcttcaaactgcctgagttgacatag

SEQ ID NO: 119006 - DNA, 450 bp, Enterobacter cloacae
atgaagcagcactactgcatcgttaacgacaccgttaaagacaacctcatcgcatacattcgcaccctgccagtgaaccctcgcgcgccgatggtggtcgaggcccgggaagaaacccgcactgataagcagaatcgtttgatgtggccgctgctgaaggacctgtctgaccaggttgtctggcacggcgaaaagctgacccgcgaggaatggaaggacctcatcaccgttctggtgaatcagactcaggaccaggagcagaaatccgcgccgggcatcaacggcggccgtgtgtatttcggcgtccgcacatccaaatccagcaagcgctacatggtcgacgtcatcgaggcgatttactggttcggtaccgaccgtggcgtgaagttctccgaggcatccagtaagcgcattgcctgggcgcaagagtggagggcttcccgtgggtag

SEQ ID NO: 119007 - DNA, 171 bp, Enterobacter cloacae
gtgggtagtcctctcgcacgtgtcatcaccaatgaaattttccgcgttccggcgcgccgccagcgtaagccagcggttaagccgtcggatatcccgacactgaaaggctacaccgcccgcctggtggatcagaaatggctgcgtctcgcggcacggaggaatcatgcgtaa

SEQ ID NO: 119008 - DNA, 1104 bp, Enterobacter cloacae
gtgaacctattcgatacgtttgctgaactcaccagtatttttttgttcactacttgctttctttttttagcacgtaaggtagcaaaatatgtcggtttagtggacaaacctaacttccgtaaacggcaccaaggtatgattcccttggtgggaggaatctccgtttttgcaggtgtttctttcacttttgctgtcgcggattactatatcccacatgccaggctgtacctgtgctgtgcgtctgttctggttgttgtgggggcacttgatgatcgctacgatatcagtgtaaaaattcgagccttcgtgcaggctgcagttgctcttgccatgatggtggcggcaaaccttcaccttagcactcttggatacatttttggttcctgggagatggtacttgggccatttggttacttccttacactctttgccgtatgggtcgccatcaatgcatttaatatggtagatgggattgatggtttattgggcggactatcttgtgtttcatttgctgccattggcataatcttatggtttgatggtcaatacagcctggcaatgtggtgttttgctatgattgcggccattctgccctatattcttttaaatcttggcgcgctgggccgtcgctataaagtctttatgggcgatgcgggtagcacattgattggtttcactattatctggatcttattggaaaccactcagggtaaaacacatccaatcagcccggttacagcgctttggatcattgccattccgctgatggatatggtggcgattatgtatcgtcgtctgcgtaaaggaatgagcccattttctgcggaccggcagcatattcatcatctgattatgcgcgccggcttcacgtctcgtcaggcgtttgtgctgattacgctagcggctgctattctggctgcgattggcgttgccgcggaatacgcccatttcattcctgaatgggtaatgttggtattattcttgctagcatttttcatgtacggttactgcatcaagcgtgcatggaaagttgcgcgttttattaaacgtttaaaacgcaggatgcgtcggaacagtggcaaaaacacaactttaactaagtaa

SEQ ID NO: 119009 - DNA, 1212 bp, Enterobacter cloacae
atggaaaaaataaagttaagaacttaccagttaacactcgcattgagccttatctctttagctcttgtgcttgttaattcagggaaacaacgagagtttttctatattgcaatatatgcaagtatcttgggtttggcatttgagtataaaaaaatctcctggcatccttttagtatcgcctatcctattatgctgatagggttacttaatcttatttggtatgtcacttatgaattgcataatgagggattaaacgcatacagtgattatcttggatcgagtaaaaaattaattctggcaagccttttgattttttaccttgaccgtttcaaaaattatgtaacaaaagataattttgtgaaatacttcttaattagtacagctgtaggttatacccttgccacagcttatggcctttatcaggctgtacaaggtattaatcgcgtagagatggctataaaccgtccaactatcgcagcgtatgtatattctgttctatcattagcctttgtttacagcttatacctaaagaataatgtgaaattataccttttggcaggcgtcgtagtcctgatatctttcttcctgattcttttgacagccacgcgtgccgccatggccctttacctgttactggctattattcttacactttatcatttccgaaaaattcaccttaaatcattaatgatttttttatgcatcgttgcagggatcataattgtaagttataaaccattgatatcacctaaaattcaacaaacagtgactgagataactaaatatcaggaagggcatgatgcaacttctctgggggctcgtttttcaatgtggaacgtgggtcttatgactggcattgcgcatccactgggacagtctattgaaagcagggaatcatgggttcgaaattatgtcgcaaatggacatcaacatgttgcagcagcgctcggttacattcgaattcatttgcacaatgagtttattgaaaaatattcactgcaaggcattcctggactgctaattttgtgcttcttttttgtttcgataatagcttactctattagaagtaaaaacgcactgctgctaacctcgatgctacttttgcttttgtatggactgacggatgtcatactgctcagttcagaagccttaatcttctttatggttttgtttgcattaagtacacctttcacccaaacaaagcagcaatag

SEQ ID NO: 119010 - DNA, 1671 bp, Enterobacter cloacae
atgtggcgatggataagcgggtttgcgctgttgtggtgtagcaccgggttagcggtatgcccggtatggtcccaggcaaaagcagaaaaggaaattgcagcgctgagcgcgcagatcaaacgctgggacgatgcttactggaagcagggagtcagtgacgttgatgacggagtttacgatcagcttaacgcgcggttgaaccagtggcagcgctgctttggtcatgtctcttccgaagagagaccgccacctctgacaggtagtgtgacacacccggttgcgcatacgggcgtgcataaggttgccagtaaagctgagctcagccagtggatgcgagcccggcaacatctctggatgcagcccaaagtggatggcgtggctgtgacgctggtgtaccagggcgggaagcttgtccgggccattagccgtggcaacggtgtaaaaggtgaagacttgacggcgcaggttcgatcaatcccctctgttccgcaaaacctgtccggccccctggcaaatagcgtcttacagggtgaactgttctggattcatgaaaaccacatccagcgtcagatgggggggatgaacatgcgggcaaaagtggcgggcgccatgatgcgtcataacgatagcgcacttctcaggcagctcggcgtgtttatctgggcctggccggatggacctaaagagatgcaggtatctctggatgcgttgtcaaaagccgggttcaccctgacggcgcgttatacgctgcccgccgcgtctgtgaatgcggtcgaagcgcagcgttcagcgtggcatacaacagcattgccctttgccacggacggcattgtggtgcgttcagcggatgaacccgcgggcgacggttggttacccggtgaaggccgttgggttgtcgcatggaaatatacgcctgtcgctcaggttgctgaagtgcgagggatacagtttggcgtcgggcgaacgggcaaggtgtccgttgtagccgaactggatccagtaaagcttgatgataaacaggtgcggcgggtgagcctggggtcggtcacacgctggcagcggctggatattgttcccggcgatcaggttctgataagcctcgccgggcaggggatcccccgattcgatcgagttgtctggcggggagcgaacagggaaaaaccagaacctccggccctgcagtaccactcgctgacctgtttttatgcctcaccagcgtgtatggaacagttctttgcccggttgacgtggcttagctcaaaacaagggctagggatcgaggggttaggcgaggcgggctggcgaacgcttcatcagacgcatcgtttcgagcatattttttcgtggttaacactgacgcaggcgcagctacagtccacgcctggcttttccgccgggcgcgggttatcgctctggcatcgttttaatattgtgcgcaaacaaccttttattcgctgggtcacagcgatggggatcccgctgacaaaagccacgctgaatgcggttggggcggcgtcgtggcaggcgctgaatcagcggagcgccgctgactggcaggctttgccgggaacaggtgaggagaaggcgcagcaggtcgttaactggctgcatgcgcctcccgttgataggctggcaaggtggctggctgagcagcacattaacgggttctga

SEQ ID NO: 119011 - DNA, 342 bp, Enterobacter cloacae
atggctgattcgcattctacctcagacgccgaccaatccggaaccgagcgttcggtaattgtgggataccgcccgaatgttttcgacaaatccacgccgaaaatcatcctttccggcaaatggctacgcgccgcaggttttgataccggacagcaggtcacagtaaaggtcatgaaaggatgcatcgttctggtggcgtataacgagcaggagcagcgtttgcaggacgattataaacggacgaaagcaaagcttattgagatagaggacgcgcttgcagcgatccaaattccacatgctggaaagcgcctcgcaaaatcaaatacaaaccacctggcttag

SEQ ID NO: 119012 - DNA, 300 bp, Enterobacter cloacae
gtgaaaaccttaaatgaagtgattgcgtcacgctcaccggaaagccaacagcgcattcaggagatggcagaggaaatgttcctcgaaaccggtctgcaacttctgcgtgaagagctccagctctcgcaaaaacatgtcgccgatcttatgggcgtaagtcaacctgcggtaacacagctggagcagcgtggaaacgatctgaagattgctacgcttaagcgttacatcgaagcgatgggcggaaaacttagcattaacgtggaactacccactggcaagcaggttgcgtttcatctctag

SEQ ID NO: 119013 - DNA, 960 bp, Enterobacter cloacae
atgacaacaaaacctgtgctgggtattagcggatgtttgaccggttccgccgttcgctttgacggcggacataagcgtatgggctttgtgatggatgagctggcgcagtgggtcgctttccgcccggtatgccctgaaatggctatcggcctgcccacgccccgtccggcgctgcgcctggtgatgaccactggcggcgagacagaaatgcgattcagcaaagcgccgcacgatgacgtcacgcagaagatggccgcatttacggcagattatctgccgaaaatcggcgatctgtcagggtttatcgtctgtgcaaaatcccctagctgcggcatggagcgcgtgcggctgtacgacgaaaacggcaaccggggccgcaaggagggtgtcgggctgttcaccgccgccctccttgaaactttcccctggctgcccgtcgaagaagacggtcgcctgcacgatccggtactgcgggaaaactttgttgagcgcgtttttgctctccatgaactgaacgtaatgcgtaaaaatggcctgacgcgccgtgccctgctggactttcacagccgctataagcttcagcttctggcgcactatcaggcaggctaccgtgaaattggtccgtttgtggcatcactgcatgagtgggacgatctggacgcgtttttcgtggcctatcgcgacaaactgatgaatatcctgaaaaaacccgcttcgcggaagaatcatactaacgtgctgatgcacattcagggctatttccgtaaccagctgaacagccgccagcgcggagaactgcgtgatgtgatcctgcattaccgggacggactgctgccgatcctcgcgccgctgacgctgcttaagcattatctggctgaataccctgaccggtatctgatgacgcaaaactactttgatccctatcctgatgatttgggtctgcgtctggccgttacctga

SEQ ID NO: 119014 - DNA, 1089 bp, Enterobacter cloacae
atgatcaaaaatctgcatattcagaactaccgctcaattcgcgatatgtcgcttgagctggaacagctcaacatcgtgttcggccccaacggcaccggaaaatccaatatttataaagcgatttacctgatgcacagcgcggcgcaggggcaattctcccaggcgctggcaaacgagggggggattttgaaagtgttctgggcgggcaaaacccgcagcgatcagctgcggcgcatgaacctggcggtggaaacggaaacctatgaatatgagcttcaggtcgggttcgtggaaaagctgccctatccctcacagtttcagctcgatccggtgatcaaagaggaagctatctggctgagcggccagcaccgtcgtccgtcgtcacagctgatgaagcgtaagaaccaggcggttttcctgaacaacgtgcatcacgaaaaagtgacccacagcggtacgctgtatgagaacgagtcggtgttcgggcagctcggtgaaccgcacctctaccccgaagtatcgcagatgcgcgagtccctgcgtaactggcgcttttatcatgagttttccgtctcatccggctcggcgatccgtgcgccgcaggtgggttttcgttccccggtgctggccagcgacggcgcgaacctggccgccgcgtttcagaccattgtcgaaattggcgacgagctgctgctgatgcgcattctcgaccaggccttccccggctgcgtgttttacagcgacaacaccggcgggcgcttccgcatgatgatgcagcgcgaggggctgagcaggccgctggaaccggcagagttctccgacgggacgctgcgttttctgtgcctggcggtggcgctgttaagcccgcgccctcccgcattcatcgccctcaacgaaccggaaaacagcctgcatccgcagatgctgcccgctctggcaagcctcattgccgaggccagccgctactcgcagatctggctcaccagccactcgccggagctggcgcagttgattgagaagcaccgatcgttttcgctgtatcagctgtcgatgatggagggggagacgcggatggagcggctggggtaa

SEQ ID NO: 119015 - DNA, 804 bp, Enterobacter cloacae
atggatattgtacttttccctggtcagaacgcccgcgcatgggctgaaacaatgataaatcttgaagcccgcaagctcatcaatactgcgaatattgtcggagggcaacatctcagcgacggactcgcacggattaaatttatggatgatattcggcagtttgtgatgcaacaatttagtgctacccgggcagccagaagtgatgaagagtgcatggaatgcctgaaaaacatccgggctgagaacgaaagtcttcttgagcaaagcagaatgcttcgctcccgtactgctcagctttttgctcagattgaactggttaaagaaaataacaaagtcgtcggttacgttatctcatcgattaaggttgtgctttcagggttacagattgttgcaggtgttggtgcaatgatgacaatgaatccagtgggtgcgcttgcaggagcgattctggttatggatggtgcaaatgccatttcaaaagaaattaacagaacgcttcaacatcaaccaaactccgaaggtatgctggcagatggcgtcatggatatcgctcagtttatgggatttaaacgtgaatcagcacttggggtattcaatagcgtaagcctggcagcaagcgtctatacggtatttggcgccatccggaaacccgaatcatggcgtctgtttcgttatctcccgctggatttctaccgcaaagtcgacggaatgaatcgcgcagcgctcactatgaaaattgtcggctggggtgtctctgcaaaagtctcgtttgatttaatttctaatgcgtctggccagaactaa

SEQ ID NO: 119016 - DNA, 330 bp, Enterobacter cloacae
atgaacaatattgaaacgcagttacttgaatcaggtttcaccgtaaaggaattagcgtatctgaaccggaacattagccgttatggttcatccctgctcgaggtggtgcttgagttgggcaagcgtttcatcatggtactgtgtattactgcggctgtggctctgattttcctggcgcttctttttttcgctgaacattacaatattgtttccggcggtatttctcttttcatcgtattgattattgcctggttttttcaacccccaatcattgcttacaaagcctggcgcttcagaaagaaatacattagttctggccagacgcattag

SEQ ID NO: 119017 - DNA, 987 bp, Enterobacter cloacae
atgccgcttgttaacgttgctattgtcgcggtggacgggtttagcccgttccactactccgtcccctgcattctgtttggcgatacggtatccggggaaaagcgctttaacgtcacgatctgcgctgaaaaaccgggattcctgacctcgaaagacggttttgccctgcatgcgacgcaggatttttccgcgatcgcatcggctgaaattgtggttgtaccctactggcagcacgtactggagcgcccgcctcagacgctgctcgacagcctggttaaggccagagacaacggggcggaaattgttgggctgtgtctgggatcgtttgtgctgggctatgccggcatactcagcggcaaacgggccgccacccattgggagtttgaacaccagtttcagacgctgtttccggacgttcgactggacatcaacgcgctctacgtggacgacggcaatgtgatcacctcggcaggtaccgccgccgcgctcgactgctgtttgtatatcatccgccagcgctttggcagcgtcgtcgccaatcagattgcccgccggatgatcgtcccgccgcaccgcgagggcgggcaggcgcagtttattgcgcagcctgtgccgaaagatacccgcgacgggcggattaactgtctcatagactaccttcagcagcacatttccgagccgcataacctggattcgctggcggacgtggtgtcgatgagccgacgcacgctgacccgccattttatcaaggcgacgggcatgagcgttgccgactggcttaccgccgagcgactgcggcgcagccagatcctgctggagtccggcagtctgccaatcgaaagcgtcgctgagcaggtggggtttttatcagcggtgacgtatcggcagcagtttaaggcgcgctttggcgtcagtccggcggagtggcgtaagacgtttcgcgttaagccgtttgcagcgaaaaataatgctggcgagatggaataa

SEQ ID NO: 119018 - DNA, 1251 bp, Enterobacter cloacae
gtgaaattaaaaaaccgaagccgacagcgtcgggcgctaatcccgcaccacttctcaaaaagctatcaaatcaacgcgccgcggctgaaaaccgtgctgacgctgttcatcgccttttttctctgcctgctggtctttgcgattgctttcaacttttcggaaaccacgctggcacgcggggtgctgatcccggcgcagggcgatgtggaggtgcgcgccagagagtccggaacccttgttgattttgccgtccggcccggccagtacgtgaaggaaaacgatccgctgttcaccgtgtcgcaggactatggcggcaagcagggctcggtggtgcagtttgaccgccagcagatggaagcggagaaaaagcgcagcgagcagcgcatccaggccattgaggactcgattgcgtcgtatcgcaaaaatctggcacagcagctggctctcactgacaagcagatcgccgtttcccgcgataaggtgaagaagctgcgcgcgctgttaaaaaacagcaccgacacctacgaggcgtggaaatccgtctccgggaagggctatgtctccaaagtggatctcgataaaagccataacgatgtgctcaacgcccagctcaacctgacgctggaggagagcactattcttgagcttgaggcgcgcaaaaccagcctgaccgacagcacccagtcgcaaattgactcgctgagcgaagagcagctgtacgtgaaaaaccgcatcagcgaaattgatcgcaacctgtccagccgggggagttccaccatggcgatgctggccccttcagatggctacgtggtggcgattaacttcccgccaggccgggccattacgcaaaacagcgaggtggtggtggtgatccgtaaaaataccgcggcgacgatggaggggtacctgtatgttccggcaacgggggtggggcgcgtggcgaaaggcgataaggtcaagctgcgcttcgactcctggcccgtggacaaatacggttccgtggaggcgacgctgtccgatttctatgaggtaaacattgatgcccattcggcgctgatcccgctccaggaagggcagaactactacctggctaaagtgcgcgtcccctcctggtttaccgacccggacaagaaaaagcgcatgctgatgggcgggatgacggtgaacgccgatatcgttatcgatcgtaagccgcttatcaatctgctgattgcgccgctggaaagggtgcgcaagcggtttatcgattga

SEQ ID NO: 119019 - DNA, 231 bp, Enterobacter cloacae
gtggatgtggccatcatcagtaccacctatcttcagcaaacggggctgtctccggtacatgacagcgtctttattgaggacaaaaactcgccttacgtgaatatagtggtcacgcgtgaagacaacaaagacgccgaaaacgtgaaggaatttatccagtcctatcagtcgccggaagtggcgaaagcggcagagaccctttttaacggcggtgcggtgccgggctggtag

SEQ ID NO: 119020 - DNA, 1506 bp, Enterobacter cloacae
atgagtcccgttttttcacggctgatcgccgtcgtcgccagcttttttatcttctccgccgcatggttctgcctgtggagcatcagcctgcatctggtggaacgcccggagctggcggtgctgctgttcccctttggcctgcgtctgggactgatgcttcagtgcccgcgcggctactggcccgttttgctgggcgcagagtggctgatgctgatctggctggcgcaggaagtggcgctggcgcatctgcctttattgatgaccggaagcctgctcacgcttatcccggtcgccctgatttcccgctaccgtcaccagcgcgactggcgcacgctgctgcgtcagggggcagcgctgattgccgccgcgctgttgcagtccctgccgtgggtgggcgaaaaggaggtgctcaacgccctgctgctgaccctcaccggcggcctgacgctggccccgacctgcctggttttctggcattacctcaccagcaccgtctggcagccgctcggcccggcgctggtctcccagccggtgaactggcgcgcccggcacctgatctggtatctgctgctgtttgtagtgagcctgtggctccagcttggtctgcccgctgaattatcacgcttcacgccgttttgtctggcgctgccgatcatcgccctcgcctggcactacggctggcagggggcgctgatcgcgaccctaatgaacgccatcgcgctgatcgccagccagacctggcacgatcatccggtagatctgttgctctcgctgctggcccagagcctgaccgggctgctgctgggggcgggcatccagcgcctgcgcgagctgaaccagtctctgcaagccgagctggcgcgcaattgccgtctggcggagcgtctgctggagacggaagagagcgtgcgccaggaggttgcccgcgagctgcacgatgacatcggccagaccatcaccgccatccgcacccaggcgggcattgtccagcgcctggcggcagaaaacgcgggtgtgaagcagggcggggcgcatatcgaacagctttcgctgggtgtctatgactccgttcgccgcctgttagggcggctgcgcccgcgccagcttgacgatctgtccctggagcaggcggtgcgttccctgatgcgcgagatggagctggaaagccgcgggatagtcagccatctcgactggcgcatcaatgaagctaccctgagcgaaggtcagcgcgtgacgctgttccgcgtctgtcaggaggggctgaacaacatcgtcaaacacgccagtgccagcgcggtcacgatccagggctggcatcaggacgagcgcctgatgctggtgattgaagacgacggctgcggcctgccgccgggatccggccaacagggctttggcctggcgggcatgcgcgagcgcgtgaaggcgctcggcggcacgctgacaatctcctgcacccacgggacgcgcgtcagcgtcagtttgccgttaaggacgcaccatgtttaa

SEQ ID NO: 119021 - DNA, 480 bp, Enterobacter cloacae
atgtcaaacccagcttatttgtttttaacagatgaaaatggttctcccatggttggcccttgccttgtgtcagagcgtgaaggtgcaattgaactcaaatcgttcactcataatgtcaacattccagtcgacggaaataccgggaaattaacgggcacgcgcatacacatgcccgtcatgtttcagaaggaatttgatcgtgtaaccccgattttatttcgggcgctgagtacgggaagaatgctcaagtcagccactattaagatgtatcagattaatgaggcgggtttagaacaggaatattttaatatccttctggagaatgtgaaaataacctcaataacaccagacctgtatcccggcgcaaacaccggaacacaccttgaaacggttcttatacgctacgagaaaatcacctggaagcattgtgacggcaatgtcatctatagtgatgcctggaatgagcgagcaacgtactga

SEQ ID NO: 119022 - DNA, 183 bp, Enterobacter cloacae
atgtttaagagtctgttatcaattctatttacggatattttatttcctgtttatatttttgcgtgcgcctccttgttcctgtggttggtgcctgaccgctgggtattactaacattcatttctatcattgtatttattattgttcatccgataattttcggccaccttgataagtacgattaa

SEQ ID NO: 119023 - DNA, 714 bp, Enterobacter cloacae
atgcaagcatctgattatttaaagatgaagttccagagtgacaggcagttggctatttatggacagcaaggtgttgcaggaacatggagagcattaaaggggatcggctctgatatttactcaggaattgagcgtgtaagttggtactcatcatgcttaatccccagctatcacgatgtatgtgacgagcttctctcagaagaaaagagaatgtacctctcaattctctcgctttaccgttatcgcgatgtaatagcacacatgctctatctttattttgaacgtgttatttccgattcagaaaatgggaatgaacacaatcgcgttcgtaagatagattcaaaagtaacagggcttgttaataacataccgaccagcaaggccgcacgtttagcaatagcatggggtctggccaaatccctttccgaatcaggcctgctatctgaaatcgtcgtcgaacggcttgcacgccgcgtacctaacgttgtcatggcacttcaattgattggaacggaacagaagtgcgctcttgctgctcgtcgcctgaaaacattggaccctaagtattacgccaccctctatgccgcacaactggagatgctttactacttttttgagcctttcctgtctgaactcattaagaaggtgcagttgggattctataaggatttcgatgcaatttataaagacttaaagggcaaggagcatgtttaa

SEQ ID NO: 119024 - DNA, 834 bp, Enterobacter cloacae
atgtccatcaccgttttctgcattttactgttcgccgcactgctacatgccagctggaacgccatcgttaaagccggaacggacaagctctactcggcgatcggggtcagcggttcagccgcgcttattgcgctgattttactgcctttctctccccagccgacggctgcaagctggccttatttgttcgtctcctgcgcgttacaggtggtgtatacggtactggtggcaaaaacctatcaggtctccgacatgagccagacctatccgctgatgcgcggtaccgccccgctgctggtggcgctgatcagtgtgctggcgcttggcgaccacctctcctggcttgcctggtccggtatcggcgtcatttgcctgtcaattctggccatggcgatgaatggccgcatgcagtcgcgcaaggggatctggctggcgctgctgaacgcctgttttatcgccgggtatacgctggtggacggcaccggcgtgcggttatcagactcggcgctgggctacacgctctggaccttcttcatgaacggcttctgcctgctgagctgggcgatggtagcccgccgccgcgaagcgtcagcctatctgcgcttgcactggaaaaaagggctgctcggcggcgtcgggacgatgggatcttacggtctggcactctgggcgatgactcaggcgccgctggcggtggtcgccgcactacgtgaaacctctattctcttcggcgcattcatcgcatttgtgcttttaaaagagaaggttgtgggcctgcgcatcgcggcggcgctgggtattgcagccggtgcggtcctgctgcgcctggcgtaa

SEQ ID NO: 119025 - DNA, 1623 bp, Enterobacter cloacae
atgctcagtcaaatacaacgttttggcggcgccatgttcaccccggttttactgtttccctttgccgggatcgtggtcggaatcgccatcatgcttcgcaacccgctgtttgtcggcgaagctttaacggcccccgatcatctgttcgcgcagattgttcacatcatcgaagagggcggctgggcggtgttccgcaatatgccgctgatttttgctgtcggcttaccgattggcctggcaaagcaggcgcagggccgcgcctgtctggcagtgctgattagctttctgacctggaactactttatcaacgcgatggggatgacctggggtcacttctttggcgtcgacttctctgctgaacccactgctggcagcgggctggcgatgattgccggaatcaaaacgcttgataccagcatcatcggggcgattatcatttccgggctcgtcaccgccatccataaccgatttttcgacaagccgttgccagtcttcctggggattttccagggcacctcgtttgtcgttatcctcgcgttcttcgtgatgatcccctgcgcctggctgacgctgctgggctggccgaaagtgcagatgggcattgagtccctgcaggcgttcctgcgctctgccggtgcgctaggcgtatgggtctataccttcctggaacgcattctgatcccaaccggattgcaccactttgtctacggcccgtttatcttcggcccggcggcggtagagggcggcattcaggtctactgggcgcagcacctgcaggaattcagccagagcactgtgccgctaaaaacactgttccctgaaggcggcttcgccctgcacggcaattcgaaagtgtttggctcggtcgggattgcgctggcgatctggtacaccgcgtcgccggaaaaccgcgtcaaggttgcggggctgctggttccggccacgcttaccgccgtgctggtgggtattaccgaaccgctggagttcaccttcctgtttatctcgccgttgctgtttgctatccacgccgtgctggccgcaacgatggcgacggtgatgtataccttcggggtggtggggaacatggggggcggtctgctggaccagttcctgccacaaaactggatcccgatgttccataaccacgcctcgacggtattcacccagattggcatcggcctctgcttcaccgctctctatttcgtggtcttcaggacgcttatcgaacgtctgaatctgaaaacgccgggccgggaagagagcgaaatcaagctctacagcaaggccgactataaggcggcgcgtgggcaaaccaccgccccggcagcagccagccagcaggtcggacaggccgctgggttcttacaggcgctcggcggcgcagcaaatatcgaaagtatcaataactgcgccacccgcctgcgtatcgccctggtggatatgacgaaaacccaaagcgacgacgtcttcaaagccctgggcgcacacggtgtggtgcgacgcggcaacggcattcaggtgattgtcggtctgcacgttcctcaggtgcgcgaccagctggaatcgctgatgaaaacccctttaacaaacgaacaaaccactctgacagaggctatatcatga

SEQ ID NO: 119026 - DNA, 879 bp, Enterobacter cloacae
atgacatcacgctacatcgcaattgactggggatcgaccaatctgcgcgcctggctctaccagggggagcagtgtctggaaagcaggcaatcagaagcaggtgtgacgcgcctgaacggtaaatcccccgaagcggtgttagcagaggtgacacaaaactggcgcgacggtactacgccagtggtgatggccggaatggtcggcagtaacgtgggctggaaggttgcgccttacctgtcggttccggtgcatttcaccgccgttggcgatcagttaacgtctgttggcgacaatgtctggattattcccggtttatgcgtctctcgcgacgataaccataacgtgatgcgcggcgaagagacgcagctgctcggggcgcgcaccctttctccttcttctgtctacgtcatgcccgggacgcactgcaaatgggtccaggcggatgctgagcaaattcatgatttccgcacggtgatgaccggcgaactgcaccacttgctgcttaagcattcgctggtgggggccggtttgccggagcaaaccccttcgccggaagcgtttgccgccgggcttgagcgcgggatcgcatcccctgccgttttgccgcaactttttgaggttcgcgcctcgcacgtgctgggaaatcttccgcgcgagcaggtcagcgaatttctgtccggcctgctgattggcgccgaagtcgccaccctgagcgacgcattcgccgggcagcaggccatcacgctcgtcgcgggttcatcgctgacgtctcgttaccgccaggcgttccacgctatcggacgggatgttgctgcggtggaaggcgacacggcatttcaggcaggtataaggagcatcgttcatgcagtggcaaactga

SEQ ID NO: 119027 - DNA, 1026 bp, Enterobacter cloacae
atgacagaaacaatgcagcgctggtcaatgaacgcccttgggcgcgagagccttcagcttgttcaggtgcctgtgtcacagccaggtccgggggaggttcgcgtaagggttaatgccgttgcgctcaactaccgggataaaatggtgattgaaggcacgatgccgattccgctttccttcccgtttaccccagcatctgacatggcaggcgtggtggacagcattggtgaaggtgttacgcgcttcaaacccggcgcacgcgtcatctcaaccttcttcccggaatggatcgacggcaagccgcaggcagacgcgcgcgatttgccctataaaacgtccggtggatacttccagggcatgctggccgaatatgtgattgtaagtgaaaacgcgctggtggcgtccccggaaagcctggatgacgctgaggccagcacgcttccttgcgcggggcttaccgcatggttcgcgctggtggagcgcggtcatttacgcgccgggcaatcggtgctggtacaaggcacgggcggtgtggcgctattcgctttgcagatagcaaaagcgcacggcgcagaagttattgttacgtcggggagtgatgaaaaactggcactagccaaaaagctgggagccagccagggcatcaaccgactgaaaggcgactgggctgaaaatacgctggcactgacgcaggatcgcggcatcgaccacattatcgaaaccgtgggtggggagaacctgagacattcccttcgcgcggtagccgttcacgggcgtatctccgttattggcgtgctggccggaacggacatttccctgcctgctggcgagctgctgctgaaatccccggtcattcaggggattggggttggacaccgccgggcgctggaagatttcgtccgtgctgttgatgtcacggagttaaaaccggtgattgaacatcgctatcgttttgacgaactggaacaggcgcttgagcatctggatcgcggtgcgtttggcaaaatcgttctcacccgcgagtga

SEQ ID NO: 119028 - DNA, 936 bp, Enterobacter cloacae
atgaccgatacgctgaaggatatacctgtatttgtggccgccgttgaggcgggaagttttgcgcaggccgcagtccgtctgcatttgtcgcgctcggcggtaggaaaaagcattgctcgtcttgaagagcggctgggcgtacgtcttttccagcgtaccacccgcagccagaggctgaccgacaacggcgctctgttttatgaacgctgccttcgcgcgctggaggagattcggggcgcggagtcgctgcttgaaacagggaagcagcaggtcagcggccgcctgcgcgtcgccatgccggttctgtttggtcgccagtgcgtcgcgccactgctgatagaactgacgcaggaacatcctgggcttgagcttgaaatgtcattcagcgaccgcgtggtggatctggtagaggaaggctttgatatggcggtacgtaacggcacgctgcaggacagcagcctgctggtcgccagaaggctgggcgagcatcgcatggtgctgtgtgccgccccggattacctgatgaagaacggccagccagaaaacgttgctgatttaccccaccacactgccattaactatctgcgatcaggcagagtgctgccctggcagctaatggatagcgaagggagatcgcacacctttactccccgctcatcgctcaatatggatgatttacaggcaatctgcgacgctgcgctggccggacacggccttgcgtggttgccctgctggatggcccgcagagaaatacatcagggaaaactcatcccgcttttaaagcaggcaccggacgtgcgcttcgacgttcatgcagtctggcagcagacgccgcatctgccgctgagggttagaattgctgtcgctatgcttgccagccgtttaccgtcagtgatgtcgctggatatgcctgcgcccataaaaaagccgcgctaa

SEQ ID NO: 119029 - DNA, 132 bp, Enterobacter cloacae
atggaaagtatgatgatggccaataacatgctcaaacacatttttatttcagctgccctgtatctattgcttatttcggtcggggtctggatcggcattatgtacgtttcttattatttgtgtcgtttttaa

SEQ ID NO: 119030 - DNA, 423 bp, Enterobacter cloacae
atgatccggccctggcaggaggacgaccggccatttctgcgcacgctgtacctgcatgcacgacgcgtggcctggccatggctggacaattctgaatggcagcttgaggattttgacgccgcaacgcgtgacgagcagatctgggttgcgattcacgacggtcaccgggtaggttttgcctccgtctgggaaaatgataactttttgcacaatctgtttgtcgacccgctgtatcagcgtctgggagttggccgtttgttactggaacaagtacagaggacgtttaccagtacaggcgcgctgaagtgtctggtgaagaatgagcgggcggttgcgttttaccagcgccacggctggcacattgaggcgacgggggattctccggaaggagagtattatttgatgcactatcggcttgggtaa

SEQ ID NO: 119031 - DNA, 1050 bp, Enterobacter cloacae
gtggcaggcgcagcaaatgcggctgaaatttataacaaagacggcaacaaattagatctgtacggtaaagtggatggcctgcactatttctctgatgacgacagtgcagacggcgaccagacctacatgcgtctgggcttcaaaggcgaaactcaggttaacgaccagctgaccggttacggccagtgggaataccagatccagggtaactctggtgagaacgaaaacaactcatggacgcgtgtggcgttcgcaggtctgaaattcgctgatgcgggttcattcgactacggtcgtaactacggcgttgtttacgatgtgacttcctggaccgacgttctgccggagttcggcggcgatacctacggttctgacaacttcatgcagcagcgtggtaacggcttcgcgacctaccgtaaccaggacttcttcggtctggttgatggtctgaacttcgcgttgcagtaccagggtaaaaacggcagcccaagcggcgaaggccagaccaacaacggtcgtgacgcgctgcgtcagaacggtgacggctacggcggctctctgacttacgatctgggcgaaggcttcgcactcggtacggcagtcaccagttctaaacgtactgctgaccagaacgctgcgggctactacggtgaaggcgatcgcgcagagacctacaccggtggtctgaaatacgacgcgaacaacatctacctggctgcacagtatactcagacttacaacgcgacccgcgttggcgatcagggctgggctaacaaagcacagaacttcgaagtggttgctcagtatcagttcgacttcggcctgcgtccatccgtggcttacctgcagtctaaaggtaaagacatcgaaaactatggcgatcaggatatcctgaagtatgttgacgtgggtgcgacttactacttcaacaaaaacatgtccacctatgttgattacaaaatcaacctgctggatgaaaatgacttcacccgtcagacaggtatcggtactgacgatatcgtcgcgctgggtctggtttaccagttctaa

SEQ ID NO: 119032 - DNA, 210 bp, Enterobacter cloacae
atgacaaaaaaattcccgtcaacaccactagtcaacaccactaaaataaccctcgctatcatcattaactttatttattaccgtcattcagttctgaatgtctgtttatccctaattgaaccggatgctccgcattcggtttttttttacctttctttacgtcaacagacattttatgtgctacccgtctgtaatgataacgactattaa

SEQ ID NO: 119033 - DNA, 1695 bp, Enterobacter cloacae
gtgaccgttaaacgccccgtatcgggaagcctggctcgggctttcttttcgatgattgtcttgtccgttctgatcagcgccattgcgctggttacactcgccagcagccagcgcgacgccgaggcgattaacatcgccggatcgctgcgcatgcagagctaccgcctgggctacgaaatgcagcgcgccagcccgtcactggcagagcaccgcgcggtctggcagaaaacgctgagcgcgcctgcgttgcagaagctaaaccgctggtatgtgccagaggacgtcaaacagcgttaccagcagttgcagcttggctggcaggagatggacacgcgtatcgccagcggcgataccgggtggtatcagagccacatagaggatttcgtgggccggatagatgcctttgtgctggcgctacagcactacaccgaacataagatacagctggtgattttcatgtcgctgacgggcggcctgggcatcctgctgctggcggtgatgaccctgcggcgcatccgccgtcaggttgtgctgccgctgaataatctggtggcagcgagcgagcgtatcgaacaggggcagttcgatacccccgcgccggatattatgcttcccaacgagctgggccagctttcccgcgccttcaaccatatgtcggcggaattacacaccctgtaccgttccctggagcactccgttgccgaaaaaacccgccacctgaatgaagcgcatcagcagcttgaaatgctgttcaaatgctcacaggcgttgaataccgggcagatagacagccactgcttccggcatattttgcaaattgtgcatgactatacgcagatgaattacctgcaattgcgcaccagtgacgactggcagctttacgaaggacaggagtccccgggcgagaaaatgcacaatttaccggtattaatgcaggacaccctgtacggcgaactgcgctggcaaagcgcgaccggggatgttccgctgccgcttatggaaagcgtggcgacgatgctgggccgggggctctatttcaatcaggcgcagaaacattatcagcagttgctgctgatggaagagcgcgccaccatcgcgcgtgagctacatgattctttggcgcaggtgctctcctatttgcgtattcagcttacgctgctgaagcatgccgtgccgggcgacaatgccccggcgcagaccatcattacggacttctcccgcgagctgaataacgcctggcatcagctacgcgagctgctcaccaccttccgcctgacgctcaaccacgccaatcttcctgccgcgctacaggagtctctcgacggtttgcaaagccagaccagcgcgaagctggtgcttgactgccgtctctcatcgcttgcgctggacgcgcaaaaacaggtgcacctcttacagattgtgcgtgaggcagtgctgaatgcgattaaacatgccgacgccagcgagattgtggtcagctgcgtcaccaccgcggacggtactcacacggtcacgatctgtgacaacggtattggtatcggcgacgccagtgaaccgccggggcattacgggctgaatatcatgcgcgaacgcgcgggacggctcggcggaacattacacttttctcagcccccacagggcggtacacaggtcagcgtgacgttccggacacctgcggcgcaggctgaaaaatag

SEQ ID NO: 119034 - DNA, 3114 bp, Enterobacter cloacae
atggcgaattttttcatcgatcgccccatttttgcctgggtgcttgcaatcctgttgtgtctgacgggtgtcctggcgattacttcccttcctgttgagcaataccccgacctcgccccccctaacgtgcgtatcacggcgaactaccctggcgcctcggcacagacgctggaaaataccgtcacgcaggttatcgagcagaacatgacgggtcttgataacctgatgtacatgtcctcgcagagcagcgccacgggccaggcgacggtaaccctgagctttacggcgggcacggatccggacgaagcggtgcagcaggtgcaaaaccagctgcaatcggccctgcgtaaactgcctcaggcggtgcagaaccagggggtgaccgtgcgtaagaccggtgacaccaatattttgaccatcgcgtttgtttcaaccgatggctcgatggataagcaggacatcgcggactacgtcgccagtaatattcaggacccgctcagccgtatcaacggcgtgggtgatatcgacgcctacggctcgcagtattccatgcgtatctggctggatcccaacaagctgaacagcgtgcagatgaccgccaaagatgtcaccgacgccatcgaatcgcagaacgctcagattgccgtggggcagctcggtggtacgccgtccgtggataaccaggcgcttaacgccaccatcaactcccagtcgctgctccagacgcctgaacagttccgcaatatcactctgcgcgtgaatcaggacggttcggaagtgcgtctgggggatgtcgccaccgtggaaatgggggcggaaaaatatgactacctgagtcgctttaacggcaatgccgcgtccggcctgggggtgaaactggcctccggcgctaacgaaatggcgaccgcgcagcgggtgttagagcgtctggatgagctgtcgcattacttcccgcacggactggagtacaaagtcgcctacgaaaccacctcattcgtaaaagcctccatcgaagatgtggtgaaaaccctgctcgaagctatcgcgctggtgttcctcgtgatgtacctgttcctgcaaaacttccgcgccacgctgatccccaccattgcggtgccggtggtgttgctgggaacctttgcggtgctgtatgccttcggttacagcatcaacaccctgaccatgttcgccatggtgctggccatcggcctgctggtggatgatgccatcgtggtggtggaaaacgtcgagcgcatcatgagcgaggaagggctttcgccccgcgaggccacgcgtaaatcgatggggcaaattcagggtgcgctggtcggtatcgccatggtgctgtcggcggtatttatcccgatggcgttttttggcggcactacgggcgcgatttatcgccagttctcgatcaccatcgtctctgcgatggtgctctccgtactggtggcgatgatccttacccctgctctgtgctcgacgctgctcaaaccgctgcataagggcgaacaccacggtcaaaaaggcttcttcggctggtttaaccgcatgtttaaccgaaatgcggcgcgctatgaagcgggcgtgggtaaagtactgcaccgcagcgtgcgctggatggtggtctatgtcctgctgctcggcggcatggtcttcttattcctgcggctgccaacctcgttcctgccgctggaagatcgcggcatgtttatcacctccgtacagttaccgagcggctcgacccagcagcagaccctgaaagtggtgcagaaggttgagaactacttccatactcaggagaaggataacgtggtctccgtcttctccaccgtcggctctggccctggcggtaacgggcagaacgtggcgcgtatgtttgtgcgcctgaaagactgggaccagcgcgacagcgatagcggctcctcctttgccatcattgaacgtgcaactaaagcgttcaacaaaatcaaggaagcgcgcgttttcgccagcagcccgcccgctatcagtggcctgggcagctcagccggatttgatatggagcttcaggatcacgcgggtgccgggcatgacgcgttgatggcagctcgcgataaactgctcgagctggccgggaaagagccgcagcttacccgcgttcgtcataacggtctggatgacagccctcagctacaggtggatatcgaccagcgtaaagcgcaggcgctgggcgtctccatcgacgacattaacgacaccctgcaaacggcatggggctcaagctacgtgaatgactttatggatcgcggtcgcgtgaaaaaggtctacgttcagtctgctgccaaataccgcatgctgccggacgatatcaaccgctggtatgtgcgcaataacaccggcggcatggtgccgttctcggcgtttgcgacgtcacgctgggagaccggttcgccgcgtctggagcgttacaacggctattcggcgctggagattgtcggtgaagccgcgcctggcgtcagtaccggtactgcaatggacattatggaaaaactggttcagcagttaccgaccggctttggcctggagtggacggcgatgtcctaccaggaacggctttccggcgcgcaggcgcctgccctgtatgccctgtcgctgctggtggtgttcctctgcctggcggcgctgtatgaaagctggtcagtgccgttctcggtaatgctggtggtgcctctcggggtcatcggcgcgctgctggcaacctggatgcgtggcctggaaaacgatgtctatttccaggtcggactcctcaccgtaatcggattgtcggcgaaaaacgccattctgatcgtcgaatttgccaatgagatgaatgccaaaggtcacgaactgatggccgccacgctgcacgcctgtcgtcagcgcctgcgcccgatcctgatgacttctctggcgtttgtgtttggcgtcctgccgatggccaccagctccggcgcaggctccagcagccagcacgcggtgggaacgggcgttatggggggaatgatttccgcgacgattctggctatctatttcgtaccgctgttctttgtgctgatacgccgtcgtttcccgctgaaggataagccggaataa

SEQ ID NO: 119035 - DNA, 306 bp, Enterobacter cloacae
atgaaagcattgtctgtattaacagcggcgctgctggcagtttccaccagcgcgctggcagagacgaaagccagcgtggtgctggtgcacggggcgtttgccgacgggagcagctggaataaggtgatcacccggctgcaaaaacaccataccgaggtcattgcggtacaacttccgctcacgtctctgaaagatgatgtcgccgccacgcagcgtgctattgcccgggctcatggggatgtggtgctggtcggtcactcctggggcgggacggtaatcagcgaggcgggaaacaatgcccgctga

SEQ ID NO: 119036 - DNA, 837 bp, Enterobacter cloacae
atgagaaactgcaaactgcgtcacaggttcccccgttcactcatcggtcgcagcgtgaaaagcatcctgtcgggggccgtcctggcgttactggctaccccggcgctggcggccgggcagcgccagggcaacgttttaaccctggggggcggcgtggatgttgcgccacgctattccggttcggataagagccgcgttactgcggctcaggtggttgattacgcgatggcaaatgggttctttatcagtaccacccgcgggctcggctacggcaaccgcgttggcaacctggattacagcgctgcgctgagctatcgcgcaggacgtaaggatcgcgacgtaagcagcgattcaatcgcctccggcagcgactacctgcgggggatgggtgacatcaaaggctcggtcgtcgttgtgccggggctggggtacaggataactgactggcttaacgtgcagctgcaggctgaggtcccggtttcggaaagagacaacggtgaggctgtgcactttggcattgccagcccgctctacacctctcctgaaaactcggtgacgctggcgctgaccggcagctggggatccagcaagtacatgcaaacgtactacggggtcagcgccgcccagtcggccgcatcgggatttgcccgacatgatgccggatcgggcatatacgcctattcgctgaacctggactggacccataagctcacctcccgctggagcctgcttgccgcagctggcgttacgcagctgacgggagaggcgggcgatagccccattgttcagcgaaaaacgtctcctgtgggaagtttgaaggtgacgtatagcttctga

SEQ ID NO: 119037 - DNA, 480 bp, Enterobacter cloacae
atgttagattaccgcttcccgacagctttgcagatggttctcagcgtagcgatggcggagcaatcgggtgaacgttcgacgagtgcaatcctggcttacggcctggaagcgaatccgagctttatccgcaaattaatggttcctctcgcccgcgacggcattatcgtctccacgcttggccgcaacggctctattcaccttggccgcccggctgaagagatcaccctgcgtgatatctacctttccgtcactgaagataaaaagctgtgggcgtcccgtcctgacgtcccggcccgctgtgtggtcagcgccaacgcctgctggtacttcaaatcaatcgctgatgaagcggagcaggcttcgttagcggttttagcgcgccataccgtcgccagcgcgctggaagaggtgaaaaaagccgataccagcgggtgcgatccggtgccggaactctgtacgcagcataaaaaagcgccttaa

SEQ ID NO: 119038 - DNA, 1176 bp, Enterobacter cloacae
atgagcctgcaaaaaacctggggttactttcatctgagcgcgacgggggtggttttactctccgcgcttctcgtcgggtgcgatgacagcgtcgcgcaaaatgccgcaccgcaagcgcccgtcgtcagcgcagctgacgtggtggtgaaatccattagccagtgggacagctttaacggtcgcattgaagcggtggaaagcgttcagctgcgcccacgcgtctccggctacattgataaagtgaattacaccgacggccaggaggtgaaaaagggcgaggtgctgttcacgattgatgaccgaacctatcgcgcggcgctggaacaggcgcaggcgaacctggcgagagccaaaacgcaggccagcctggcgcgaagcgaggctaaccgtaccgataaattagtcaataccaacgtggtatctcgtgaagagtgggagcagcgccgttccgccgctacccaggcgcaggccgatattcgcgcggcgcaggcggcggttgatgccgcgcagctcaacctcgacttcaccaaagtgaccgcgcctatcgacggtcgcgccagccgggcgctgatcaccagcggtaacctggtgactgcgggtgacagcgccagcgtgctcaccaccctggtctcacagaagacggtttacgtctacttcgacgtggacgagtccacctatcttcactatcagaacctggcccgcagcgggcagggggcgtccagtcaccacacggcgctgccggtggagattggtctgacgggtgaggagggctatccccatcagggcaaagtggatttcctggataaccagctcacgccgagtaccggtacaatccgcatgcgcgcgctgctggataactcacagcgtcagttcacgccgggactcttcgcacgcgtgcgcctgccgggcagtgcggaatttaaagccacgcttgttgacgataaggcggtgctgaccgatcaggatcgtaagtatgtttatgtcgttgataaagacgggaaagcgcagcgccgcgacattacgccggggcgtctggccgacggtttacgtatcgtacagcaggggctgaaacccggggataaagtcatcgtcgatggtttacaaaaagtgtttatgccgggtatgccggttaacgcgaaaaccgttgccatgaccgccagcgccgccctcaactga

SEQ ID NO: 119039 - DNA, 516 bp, Enterobacter cloacae
atgactttgcatggaaagtttattataaatgatgctgattactcaccacttgaatttgatggtgttggagtctttatggctttttctggtaacggtgcatacagaaacaaaggagcatgtggcatcattcctaacgttggaccgctaccaaaaggtaaatattatatagtagacaggcctaaaggaagtatggctaacagatttagagcctggggagtcgatacatataaaagcacttttagttatcatgttgatcattctgaatggtttgctttatttcgcgacgatgggaatatagatgattctacattttacaaaagcgtagccagaggtggatttaggctacatcccggtcaggtatcagaagggtgtataactttaccaagccaatcagattacaatagattaagaaacgcactattaagaacaaagacagcaaaggttaaaggtcttgatttagaatcctatggaacaattgaggtcattattggtggttatcagaaaacttgtccttag

SEQ ID NO: 119040 - DNA, 270 bp, Enterobacter cloacae
atgcctatccctccctatctttggctaaaagatgatggtggtgcagatatcaaaggctctgtagatgttcaggatcgtgagggctctatcgaggtaatcagtatgggtcatggtgttaaccttcccgtcgatactgccaatggaaagatcaccggaacacgccaacattcatcatttaattttgaaaaagaagtcgacagttccagtccctatctctacaaagcagcagctacagggcaaacattaaaaagtgcagaagtaaaattttaa

SEQ ID NO: 119041 - DNA, 4098 bp, Enterobacter cloacae
atgactgatgattccctcccccttcatcccggttcctatgttcggaaaaacgtccttgatcctcgtgggctcacggttactgaggtggcgaagttgatcggcgttagccgcccgggcctatcgaattttctcaatgggaaggtatctgcaacgcccgatatggcagcacgtcttgaacgtgctttcgggatttccgccaaggccattctcgatttgcagacagaatatgacgcgcagggtgataaaacggcaggcgcagctcaaaaggcgcgtacttacgtgcccccttttttaaatgtccaagccaacgatctcgtaaattggttcacaacgacaattcttgcgcgcactaagctgtcggtgctgctgcgaacgctcattcactccacgggacgtgatcttcagaaagtagatttccccggtaacgacgatgccgagcgtgccggctgggatggcttcattgaggccagttccggcacaccttggataccttctggtgcctctgggtgggagttcggtgtcaccgcggacatcaaggccaaggcagacggggattttgcaaaaagcgtccgggctatcaagagcgctgaaagggcaaatattacgtttgtctttgtcactccaaggcggtggccgggtaagacggcctgggtcgcggatatgaagagcaaaaagctttggaaagacattcgtgcatacgacgccagtgatcttgagcagtggatggagcaatcactcgcggcccagacctggtttgcgaaccagacggatcgtccttctaatggtgtcagaaccttagagcgttgctggagcgattgggcaaacgtagcggcccccgcgcttcatccttctctttttactacggcgaatgaggcgtggaacggcaagatcaaatccttcctggcgaaagacgatgcgaatcccttagtaatagcggctgactccgttgaagaggcgctggcgtttttaaatcaagtcttggccccccccgagtttgaacagtatagggatcgggtgttggtatttgacaaggcaggagtactcccgaaactcgcccaaggcactaccgatttcattgcagtagcccatacgcgggaagtggagcgtgagcttgggccctacagcacatcgctgcgaaccattgttgtttatccccgcaatgctactagcgtggagcctcatgtcgtgttggagccgctcgggttcgagccgttcactaaagctctggaagcgatgggaaaatcgcgcgatgacatagcgaaactaactaacgcctcggggcgttcgttgacggttcttcgacgtcaactctcgaatattccggcaatccacacacctgcttgggctgaagatccaagaatcgcatcggggattgttccgcttgttcttgtcggcgcatgggacgctcagaacaaggcggatcaaactatcctgtcccatctggctgaggcaccttttgaggtgttggaaaagcgcattcttgatttgttgcggctcaacgattctccagtctggtcaattggtgggtatcggggggtgatttcgaaaattgactccctcttcgcaattgcgggcacggtctccaaggctgatcttgaccgctttcttgacgttgcgcggactgtactgggtgaagatgatcctgccctcgacttgcccgagaaagatcgttgggcggcggccattcatggcaaaagacgagagttctcgggggctgtgcgagaaggcgtttccgagactttggttttgctggctgtgtacggcaagaatctcttcgggaagcaccttggctttgatggggaatttgaagccgcgaaaatcgtgcgtgatcttcttgtgcctgtaacgactagaaagctagaggctaatgggcgcgaccttccactttatgcagaagctgctcccgccgagtttcttgatatcatcgagcgtgatctgcgagcagaaaagtccgaagtcatgggcttgctgaggcctaccgataccgggctttttggctcatgtccgcgcactggactgctttgggctctcgaaggacttgcttggaatccgaccacctttccgcgggtagtgaagattctgggccagctttctgaggtagagattaacgataactgggcaaataagcctatcgaatcgcttggctccattcttcgtgcatggatgccgcagacggcggcaaaccacgagatgcgcctgaaggcggtcagcatgcttttggataagcacccggcggtcgggtggagggtttgcctccagcagttcggtgattacggcagtggcgtcggcggctatagccataagccgaagtggcgtcctgacggctacgggtttggggagcctttcaaaacatggggaccaatccatgcattcgtcagagagatggtaaaagtcgcgctaagcaggccgtcctacactgtcgagatgttatgcgaccttgtgtcaaggctgcatgcactcgcggcggaggatcaggcgcgcgtatgggagattatcgacgagtggcgcaactcgggcgcgcttgacgaggaagttgcgaagatccgcgagaaaattcgtgtgactgttctctctcgccgggggcgtaaaaaggtcaatgaggaaggccaagcgagcctgacggagaaagccaaggcagtctatgcggagttgcagcccaaggacattgtgaataagtatgaatggctgtttcggcagggatgggttgaggagtcggcagacgaactcgcaggagacgagatggacttccgagcgcgtgagcaacgcatagaaaagctccgcgttgaagccctgacagacattgtgcaagaacgaggtattccgggcattctcgcactctctgaaaaaggaaattcccaacgccaaatcggtgctcacctggtgtccggcatacttaccgacgagcagattgaagatttgatcttgcaatgcctgcgtccggcagaaaattattcgggtcgtgatggcattgtcgccggcgcgctctggtcgttggacgaggataggagaaaggccatatatgcgggcctgcgggataaagtggtcgaagaggaaacgctccgtctcttgttgctttcaccttaccgggtttctacgtgggtgcttgtagatcaactttcggctgaagctcggagtcgttactgggttgaagtagttccacaatatgtttttgactcgcctgaggaaaacaatgagagcgttcgccgcctgcttgaagtcgaacgtccgagggcagccttcgcatcaatacatttcaagcttgaagaaatacacccatctctcctagtgcagactctatctgccatggcgaaaaatagtcaggataaagctggggagtaccagctgcacgactacgatgtgcggcgcgccttccagcttctcaatcgcaactcagacctcactctagaggaaaaagctggactggaattcgcatatttagaggttctggctcgctctttccgagggggagaccagcagcagattccaaaccttgagcgctacattgaggaacatcctgaactattcgtgcaggctgtagtgtgggcctataagcgcaaggatcgtggcgaagatcccgccgagtttcgcattacagaaggtcgcgagcatatggcacagcgcgggtaccgcctccttgaagccattgaacgtatccctggtcaagataaagcaactaaagaggaacagcaggaaaagctcgcagaatgggtggcaacggtaaggcggtcttgtgctgaacttgaccgcgcggagatcgcggacgtgtgccttggaaagctattctctaacgcaccggctggcgaggatggcgcgtggccgaacgaagctgttcgcgatgtgatggaggatctacggtctgaggacatcagcagcggcgcacatacgggtttatacaacgcgcgcggcgtccattggcgcggggaaggcggtggtcaggagcgggagcttgcagacaagtatcgcgtctgggccgacaccttgcaatttacgcatcccttcgtggcgtcatcgttgctgatgtcgatggtcaatacgtatgagcgtgaagctgagcaacacgatactgaagccggtatccgtcgtcggttaaggcattaa

SEQ ID NO: 119042 - DNA, 1008 bp, Enterobacter cloacae
atgcatctaataatgctcgatacatgtgtttggcttgatatttcctctaaaaaagctgaattgccaatgcttactgccatcgagcatctggtagaggatgggagtatcaaaatactactgcccgatctgatacgtgccgagtacgaacgaaataaagaaagggtgattgaggctacgcgaaaacgactctccagtgaatttcgagtaattaaaggggtagttgagtcttttggcggtgaaggtaaagatactgcgctcaggaccttagatgatgttaatcacagattgcctattctttccgaagttaatcaaaatacagtaaatcgtgttaccaaactttttgacatggcccacgaagttataatctctgatgccgcaaaaataagagcggcagagcgggctatcgctaagaaggcaccgttccataagcagaagaatagtgtggctgatgcaatgttagcagaaactttccaagagtttcggctgtcgcatataagtgagtacgagacctttagatttgtcactcacaatgtgacggatttttccggcaaagaccacaggcagccacacgacgatttcgcagatatttttgacggcaacagctctttattctttaacgccacgagcgctgccatcgaggatctgctcgatcttgaagaatttcactatgagaatagctttgcttgggaggacgaaactcgtgggcttcaggaaatcatgtctgcgatggacgagctcttcgataaagtttggtacaaccgccatatgaacatgatgtatcacctagataatggtgatatagaggtaatccccgctggcacaaaacgccacggcaatgatgtgattcacgaagataccctcgaccaagcaaaaattgcagctcaacgagtcagggataaatatgaagatactgggccttggagcgactttgaatggggggtgctcaatgggaagctttctgccctgcgatgggtcttgggtgatgagtgggacatgctcgatacgtaa

SEQ ID NO: 119043 - DNA, 864 bp, Enterobacter cloacae
atgttgactgacaccaggctgcgtcaccttaagccgaaggagaaactctataaagttaatgaccgtgatggtctgtatgttgcggtcactccggctggaactatttcatttcgttataactattcaataaacggaagacaggagaccgttacttttggccgctatggtgttggagggatcacgcttgcagaagcgcgtgaacggctcaatgaagccaaaaaaatggttgccagtggaagatcgcctgctagggaaaaagccagagataaagcgcgtatcaaagatgctgagacttttggtgcgtgggctgagaaatggttacgcggttatcaaatggctgaatcgacacgtgatatgcggcgttcggtatatcaaagggagttgaagtcaaaatttgcccagcagaaacttagcgagattacacatgaagacttacgtgcattaaccgataacattgtcgagagaggggcaccggcgacagctgtacacgccagagagattgtattgcaagtctatcgctgggctattgagcgcggtcagaaggtggagaatccagctgatctggtacggcctgcaagcatagcgaaatttgagcctcgtgacagggcattgacgccagttgaaatcggtctgatgtatcggtatatggaacgggtaggaacgacgccatcaatcagagcagcggttaaacttttgctgttaacgatggtacgtaaaagcgagcttactaacgcgacctggagcgagatcaattttagtgaagcattatggacgataccaaagcccctcaagtgtcatgacagtagttcttcaagtcatagcatcttgaaacaccttcgattatcaggtaacgatcttatatag

SEQ ID NO: 119044 - DNA, 324 bp, Enterobacter cloacae
atgggatttgcatcaccagcagctgattacgttgagcgccagctcactcccgaaattctgtgcaacatgggcgccgatagcagggttcttgaaacagatatgggattcgcggttatcgagcctgtagtgatgaagacgccaggagatgtgttgctgattttgtgcgacgggcacacacagtttgccaagctgatgggacgatcgctcataacagacgacggcgaagcgatcgaaggggctgctctggaagaagttgaggtattgggtagagtgacgttcttcatcaaccgtgcgctgggcgatgatgactgcccaacaatttag

SEQ ID NO: 119045 - DNA, 240 bp, Enterobacter cloacae
atgcgacgcacagcagacatacatgccgccttcgtcgcggcaatagaggttaacccaaaagggtaccgttatctgagaacagatagcttcatcaaaaagttgcgggggtttaactggcacttcagccgtgcagaagcaaactcatggatagaacgctatcaacccggttttgcagataagacaactgacggcagtgataacagatactggatcctgcgtaacatggggagggttcactga

SEQ ID NO: 119046 - DNA, 480 bp, Enterobacter cloacae
atgagcgggacggtagcgaaccggccagcgcttaaaaagcttcttcgaacgctgaatgagggcgatacgctggtagtgtggaagctggatcgcctcgggcgaagcatgcggaacctggtactgctggtcgacgaactccggcagcgcggcatccacttcaaaagccttacggacagcatcgacacttccagcccaatggggcgttttatattccacatcatgtcggccctggccgaaatggagagggagttaatcgtggagcgtaccagggcgggattagcggcagcgcgtgagaaggggcgcataggaggcagacgaccaaagctaacaccggagcaatgggcgcaggctggacggttgatcgcaaacggagtagacaggaagcaggtggcgattatctatgatgtggccgtatgcactttgtataaaaaattccctgcctccaaatttatcaataatttgcccactgaagtaaattga

SEQ ID NO: 119047 - DNA, 741 bp, Enterobacter cloacae
atgcaggtaggcgcattcaaccttggcgctatccagggggacggtccaaccctcgataatatggacgagttcacgcctaccggatttacctcacatcaaaatgatggtctgactcagttgggcctgacatcgaatacaggactaacttccatcattctcaatcggggcaacaggccaaccagaatacatcaggcatactctctacgtcgtacctggttttcatattacagcgggatcgcatgggcctatcacgaagcttacacgactggtaatacgacaaaatcaagcgatggtactttgaaggcggcgtcccctgtcgcccgtattgtaaaatcccgtgaggactgccagcgtgaggacattgattctgacggtttcagctggtgtggaggtggaactgccaatgaagaagctgaagggatcaagatttcaagactggatgttggtgtttatgtcctgactggttcagcgggactggcctctgagggctggcagttattgccaccaatggaccctggcggcatgggggaactgggtgtagttgaagctgagcagacagaaggcggtgggctgacgattcggctttttaagcggaaatacatactcaacgaagaaggcgaaattgttaaaacgaaaggggctcctatagatgttcctgccaacagctggatcgacgttcgcctcgatatgcctgatgattctgcctttaatcagaggatgagtcagggacttgagccatag

SEQ ID NO: 119048 - DNA, 921 bp, Enterobacter cloacae
atggagataacggcgggcctgcggtgcccgtcgtttggagccaactttgacagtggctaccagaaagccaagtacgctgatattgccggttatgtttccggggcgcaggtgctgtttatcccgcatgcgacagcttaccttgattcagggctgcttcataaaatgaactcggtcaccatatccggtggccgtgtgacgcagaactccacgatgaaggatgtaagcatcagtgagcgtgagagtacttacacgtttcccggaagcatctggcagatatttccgccaggccaacgtaaaggcgaaggcctgcttattggtgacagcaccgacttcctggcgattaccaatgccacgcagtcagggcagtgtatctggaagggtaccgtcaatgtccccacaggcggctgggcagttcccacgatagcggggtacgacaagtccaaatatatcgtctttgggcgctgcaatagcggtaacacagtcgatttcgatggcaacacggtcagattcttcagccctccttccacgaatgatgacgctccgacgaccggcacgatagatattgtcattttcgccagtggcgtggcgccgcagccgggcgcggggctcaatatcttcaatgctgccggagtctgcacgttttcaacgacgagacggcctttcgtctacctcaatcagctctggacgccttcaaaaaatgccgtgagcatcggcagcgggtatgttccgctgggcagattcgggctgatggctcacgaagttaatggcatgtacgtgtatcgaatgttcggaataaaaatacagaacggcagtgcttcagttcagggtgggaaatatctggggcgcgagcggtatgcaatttttggtaatgacacggtaacgccactgaatcttcccgttcttcccgatatgtacgtctga

SEQ ID NO: 119049 - DNA, 3612 bp, Enterobacter cloacae
atggaagcgatcactggtgcaaagggtggcagccagaagcagcacacacctgtagaacaacctgattcggcgcagtcaatggcgcgctgccgcatgctgctggcgctcggggaaggtgagtttgctggtggtctggatgcgaccagcattttcctggacggtacgccgctgggaaactcagacggaacgatgaactttgaaaacgtttcctgggactttcgtccgggaacgcagacgcagacgccaataccgggattccctgctattgagaatgaaactacggttggcgtatcgctgacaaaagccacgccctggacgcgcgcgctgagtaacacccagattgacgctgtgctcgttcgcattggtattccgggtttgcagcaacaggaaaacgacggggatattgttggcactaccgtaaagtaccatatcgatcttgctgtagatggtggtgcgttctctacggtcatgacaagaaccgtgacagagaaactcagttctctctatgaactgacccatcgcattaatcttccgaaagccagtacgggctggcagattcgcgtggtacgcgacaccgacgacagcaccagccagatgttgcagaataaaacgcaggtacaggcaatcactgaggtgattgatgcgcgcctgcgttatccccatacggcgctgctgtatgtgtcgttcaacgccaaatcgttcaacaatatcccgaaggtttcctgtaaacctaaggggcgcattatccgcatcccttcgaattacgatccgatagcccgaacctatagcggcacatgggacgggacgtttaagtggggctggacgaataacccagcatggatctggttcgatgtgctcactgagccgcgtttcggacttggccgacgcgtcacggcgcagatgctggataagtgggagctttaccgtattgcccagcgttgcgatcagaaagtacctgacgggaagggtggcgacggtaccgagccgcgcttcatgtttgatgtctacatccagtcgcaggctgatgcgtggcaggtaatcaaagacatcgccgcagggttcaatggcatgacgttctggggcaacaacatgttcaatgttgtctcggacatgccggcggatacgtcgaagctgcaaatccttacccgcgcttcggtggtgggcaaaccggtttactcgagcggcagtgaaaagacccgcttctccagcgcgctgattaacttcagcgaccctgacaatcactatcaggaccgcacaacagcggtgatgttcccggacctggttaagcagttcaagtttaagcagacgcagatcaccgcaatcggctgtacgcgcgagagcgaagcacagcgccgtggcgggtgggcggtgtattccaactcactcgaccggattattacgctacagaccgggcttgatggctatgtctacgtgccgggtaccgtgtttgcatttgctgacgaacgcctttcagggcgtgtttatggcgggcgtataaccggatataacgccgggttgaaggctgtgacaaccgatcggggaaccagtgccgttgcgggtgacacactgatgatccgcacacggggcggtaccgttgaaagcagggtgatccaggccgtaaacggcacgcagctggtggtcgccacgcctttcacggcagagccgttacctaacgctgtattcgtcatcgatgcagggcagttgcgcctgcaatacttccgcgttacgaacctgagatttgatgatgaagaaaacaccttcactatcaccggggccgaatataacgcatcaaaatatgatgcggtcgataacaatgcccgcctggacacgccgccaattagtctgataccaaccggcctcgtcaaccagccgaccaatatcgtggtagcgagctatgacgcagtgcgccaggggcagcgagtggctaccctgacggcatcctgggatgcgccggtcgacaagaacggcaaaccacaggcggatgtcatagcctatcgggtgcagtggaagcgcggcgacaatgagtgggttaacgtaccggagaccggtcttcgcaatatcgaagtgcctggcatcttcgagggtgattatctggtccgtgtacgcgcgatcaactccggcggtgcatcgagtctctgggcaacttccgcgcttacacacctgaagggacgcgcgggtgaggtacccaaacctgtcgggcttaaggcctccgaagacgtcgtattcggaatcaacgtcacctggggattcccggctaataccggcgacaccctgagcactgagctgcaatacagcattgccgctgacggctcgaatccgatgcttttggcatctgtaccgtatccgcagaaactttatcaacagatggggctgaaggcggggaaggaattctggtaccaggcacggcttgtcgacaggatcgggaatcagagcggttggaccgactgggtgcgcggacaggccagcattgatgtatccgatatcaccgatgccattctggaggacatgaaaggctccgatacgttcaaagacctgatcgagaacgcggtagacagcaatgaaaaaattgctggcatggctgacgacatcaaacaggccaacgacgaactggcgcaacaggcgcaggaaatcgccaaaaacgcccaggatatcgggaaagttcagaccagcgttacaaacctgtcgagcacggttggagatgtgtcttcttctctgagcgagcttgagcagacagtggcgacggctgataccgcgctgggccaacgcatcgataacatcagcgtgtctgtggacggcatggcggggggagtgaagaactccgccatcgcgattattcagggcaacctggcgcaggtggccgcgcgcaaaacactgtctgcatcggtcgccggtaacagcgcgcagctggaccgcattgatgaggtgatcgtcaacgagaaggaggcaacggcgcgttcgctgctgagtttgcagactgacgtgaacggcaacaaggcatccatcaacagcctgaaccagacgttctccgattaccagcaggccacggccacgcagataaacggcatcacagcgaccatcaacgggcatacgtcagccattaccactaacgctcaggccatcgcgaacgttaacggggacctgaaggcgatgtacagcatcaaggtcgggttatccagcaacggccagtactacgccgcagggatggggataggcgtggagaatacgccgtccggcatgcagtcgcaggttatcttcctggctgaccgcttcgccgtaacgcaccaggccggagcgaccgttacgcttcctttcgttatccagaatgggcagaccataattcgggacacggtcattggagacgggacgattggaaacgccaagatcggcagctacattcagtcgacaacctgggacggcaccgggaacgttggctggcacatcaacaaatcaggctacgcgacgttcaacaacgtgaccgttcgcggctcgatttacgccacaaacggtaatttttctttcaatggctccggcaacacaacggtgatcaatggcaacggtgtaaccgtcaacattcccggtggtggtcggatcgttctggggacgtggacataa

SEQ ID NO: 119050 - DNA, 600 bp, Enterobacter cloacae
atggcgcgtttaaccactattcgtctgtatggcgccctgggcgcccggttcgggcgcgtgcacaaactggcagtacagacatctgccgaagcggtcaaagccctgtgtatcaacttcgatgggctggaagactatctgatgaatgccaaaaaaaatggcatgatcttcgcggtgtttcgcggtaagcgcaacataggcgtgcaggacttccaggagctggcaggcgatagcgatattcgcatagcgccagttatggaaggggcgaagaaggccggcatgttccagacaatcctcggcgccgtgatggttgttgctggtgttattactggtgtggcaaccggctggacgggcgttggcctaacctttggggccggacttatcatgtcgggcgcgtcaatgatggccggcggtatttaccagatgctttcgccccagcccaaagggttacaagggcgagacgaccctgacaataaaccctcttatgcctttggtggctcagtgaatacccttgcgatgggaaacccggtcgcgcttctctatggcgtccgcgagattggcggcgccatcatcagcgctggcatagtcgccgaagacatctga

SEQ ID NO: 119051 - DNA, 732 bp, Enterobacter cloacae
atgaataaaaccataatggcagctatccgggcgcatgcgctggaggagtccccacgcgagtgctgtggcttcgttattcagtctggccgtcgccagcgctacattcccgtgccgaatacgcacgaaaatccgacagaacattttcgcatcgacggcgagcactgggctaacgccgaagatatagggacgattattcgcgtcatccactcccacccgggcgacggtgcccggcctattccgtccgatctggaccgccagcagtgcaacaactccggcgtgatctggggtatttacgcgcctgacagcgatgaatacgccgagataatgccggaggcggtgccgcttattgggcgtccgtttatcctgggctcgaatgactgctgggggctgattatggactggcacgccattcagggcgtcacgctgaacgatttccgcgtcgattacccgtggtgggaaagccagtaccaggacaacctctatttcgaaaactgggagcgggaagggttcgctgagtgcgatccggcaccaggctgtatggtcatcatgcaggttgattccgataagtggaaccatgcgggcatcatcactgaagaaggtgaactgctccaccacctttacggacagccttcatgtattaccccgtatgcccgaggctatttcaaagaccgcacgatgatctgcgttcgtcacaaagacctgccacaggagataaagccatggcgcgtttaa

SEQ ID NO: 119052 - DNA, 771 bp, Enterobacter cloacae
atggcattagtcgatcaggcggcgatgctggcgccgggtggcagggtccgcctggttgaagttgacgcctcagagttcagtggcgggatccaccgattccactacgcacctttcccccatacacccgaagagatcgatgttgccaatggagatgaacaaaagctcggacccaagccaatcgtcttcggtggcaatacctacgatttttggccatttcaggtttcaggcctggagctatcaacagaccaggcggcggagcccaccctcagtgtctcaaaccttgacggccatatcactgcgctgtgcctgcaatttaaggacatggttaacgccaaagtgagcattatcgatacctatgcggtttatctcgatgccgtgaattacgctggcggtgtaaatcctacagctgattcgtcaatgttcacacttcagaccttctggcttgacaccaaaacctccgaagatgatgaggtggttacctgggcactcagcagcccggccgatttgcagagccttgtgatccccacccgacagatcacatcgctttgtgaatgggcgctgcgcggtcagtatcgtagcggcgatggatgcacctataacggcactgcgtatttcgacgcgaaagggaatccggtatcagaccctgcccttgatgtatgtggcggttgcctcagtgactgccgcaaacgatttggcgctggcctggcagaccctgacgcggcaatcctcgattttggtggcttcccggcaaccgttctcttcacccgataa

SEQ ID NO: 119053 - DNA, 351 bp, Enterobacter cloacae
atggcagttgaaacatatagctggcgctctcagctcggtgctggcgcgattgaatatagccaggcagttcgcgcggcgcagttcggcgatggctatgagcaagtagccgataacggtattaactccacggctattcaggtccctatgaagcacacgggcaacgagtcggaagtggacaggattcgtgattttctcctcgctcataccgtgaaagctttcatcattacgccgccaggcgaagagaagggactttaccgcgtcgtagccgattccgttcgtaaaacgcagatcagcagcaaagttgctgagttgacgttcaccatcaaacgggcttacggagtgtacgcataa

SEQ ID NO: 119054 - DNA, 393 bp, Enterobacter cloacae
atgattgtgttaaaaaaaatctttaagaagatactcaaaaccattggtttgctcattttacttttagttgttgtccttgtggcagcgagacttagtctgaaaactgatgacgaattgaaagctgaggaagccaaagcgttatctgataagaagctggatgagttgagaagcgcgtgtgaagcttacgtaaggatgtcagtcattaacaaaagcaccctggacatgtcggtgtttggctcgaacagatggctcggtgatgacggtaagttttacgccacgcaggagtttagcgccaaaaataaatttggtcttgagcagaaattcagggctgaatgtattgaagacaaggatgggaagactgattaccggcttgtagaaatgaatggaagttaa

SEQ ID NO: 119055 - DNA, 3156 bp, Enterobacter cloacae
atgacagaccagatcgcctcgattactttgcgggccgatgtttctgacctgaaaacagccagcaacgaactggataaactcggccaggcggcggccggtgctgtagataaagcagatgatctgaatagcgtgtttcgcgctggcgctgaatctgcgaagcaaggaagtgaagggctcaaggagcagcagaacgcgctcaaagggctgctggagaatatcgacccggttaccaaggccttaaaccgcctggatgagcagcaagaatcgctgcggaaattccaggccaaaggtttcctggataccgatacctttcaggcttacaacaaaatcctggatgacacccgtctcaagctgaccgacaccggagaagccgcggcgcgcgctcaggccgaattagccgctacccaggcggcagagaagcagtccgcagcgttaaagaacctgctgggttccatcgacccgactatccgtgcgttcaattcactggatgaacagcacgcacagctggtggcccatttcgaagcagggcgcattaacggcgctcagttcgagcacttcaacacaatccttaaccagacgcgtgagcgcctctctggcgtggctgacgctctcccagaggcactatcccgccaagaggcggcggcccgccgcgctggaatctccgtcggtcaatacagcgcagcgctgcgcacgcttccggcgcagtttaccgatatcgctacgcaactggcgggagggcagtctccattccttatcctgctccagcaaggtgggcaaataaaagattccttcggggggttaagtccaatgctccaagctttgcgggacgcattgtttgggtttaacgaggagagcagagaaacatccgagtcggcagcggggattagtgacgctgctgaaggacttaacaacaccagtgaggcagcggagaagctggggcgggcgggtggcctgttaaatacctttaaccttgcgattgctggctcggtgggtttgctggctcttctggcgggggctgcatacagttcatcccaacagttcgacaacgttgccagatcgctcattttgatgggcggggctggtttttcctccatgcagcaactgaacgatgcggcaaaagctgttgctgataacgcaggtgcttccctggctgagtccgttgataccctggtccaactaaatgacaccgggaagtataccgccgaccagatgtcgaaaatcgccaaatcaattctggctatgggcgatgctgggctggatacaaaggctgcgctggcggatttttcacgcctggcaagcgaccctattaaagcgctcgcaagcttgaaccagcaatatggctttgttgatgaagccatgatgaagcacatcattaccctggagaaaacgaaggggaaaacagcagcggcaaacgaagctataacgctttttgccgacaccatggaggatcgaagtaataaaattgtagaggccaccgataatatcgggcaggcgtggaacgggcttaaggctttctcctccgacattttcggtcaaatcggggttaccgtgcgcgcatggggaaaccagatcatcgatatcttcgaacttgttaaggcttcgattaaagacctgttcctcaacattacttcactggacgctaaattcaccggcacaattgctggctgggctgaaaaaatccctggtggtggggcactggctaatttcctcggcatggacgctgaggcaatgaaaaaggctggagcggaagcggacaaagagattgaggcgaacaaaaaacgctataacgagctttggaagcgtgtcactgctcctaacgcacaggcatattatgaagccgaagcgcgaggtgccagcgttaaaggggaggggggatcgatccgcgagtcgagggacgcagtatcgaagcttgccgaagactcagccaaaaagaccaaagaggccaaggccacgctggatgctggcgatcgcaccctggagaactaccgcgcccaggccagaacgttaactgaaacgctcgagaccctccgacaaactggcgaaacccacgctaaaaataccgagttcagtaaacagcaatctcggtttgctgaattggatgaggcagccaaaacccgcgcgctgactgctcaggaaaaatctttactgtcgagccgtgaggcgattctgaacgccgccaaggtggttgatcagaagaataaggaagtagaggcgcagcagaagattaacggcctggcgcagcaggcgaataaatacgtcacgcagatgtcggaaaagactgatgctttgcgcgctagtgtaggcctcagcagtcggcaaacacagcgcatgatggaggaagcgcaactccgccagggctggctcaacggtgggggtaaacttgaggatgccgggtatgaaaaagaactggcggctctcaggaaatattatgccgaagaggacaaattacggggcgactggaaagcgggtgcggtgagtggatggaacgaatatctcgatgctgcaaccaacacttacgacgccgttaaaaacgttgccagttccacgctgaccggcctgagcaacatgctgactgagcttatgacaactggcaccgcgtcagttaaagagttcggcaaatctatgctcaagatgatcctcgagataaccaaccaacttatagtggcctatacagtacaggccgcgatgggctggataagcggtggcagtaaaggcgggagcacaccagggggatcttacgcgaacgctgccgctggcctaacttttaacgctaaaggcggtgtttatgattcgccagggctcagtaagtacgttaatggggtatacgactcaccccagtattttactttccagggcgcatcgaagtttgcgaagggcggtgtattcgcagaggccggcgctgaagcaatcatgccacttactcgggattctgccgggcggttgggcgtacgcgcccagggcagtggcggtatggctccggttattaataccaccgttaacgttgatgctggtggttctgcaactgttcagtcttccagctcaggtgatgctatgggccgtgcccttgctgatgaaatgcagaacgctgcgttgcaggttatccagaagcaccttaagcctggaggcatgatctacaacttcagtaaaggcaggtag

SEQ ID NO: 119056 - DNA, 288 bp, Enterobacter cloacae
ttgtacacgccggggccgactctcgcggagctgagcgcttttggtttgacgcctgaggacgtggaggaagaggtggggatcctgccctcggtgtggcggtccttcaccatcttctcttccctggcgacccagtggcgagtcggcgcgagcggggcgaccggccttgattacaacgttctcccctggatgttcgagttacacggggttgaggatgcggcggcctgcatggctgaccttcaaattatggaaagcgaggctctcaaggtaatgcataaggagacgaaataa

SEQ ID NO: 119057 - DNA, 339 bp, Enterobacter cloacae
atgaccaaattttctctgatcccaaaccctacgttttccgtgaccgccagcatcccacgcgctggcgccgaagacggcatgctgacgttcactttccgccataaaacgcttgaagagctgcgctctatggacgaaaagctgcaaaaggatgctgaaggtaaaaaggctgctatcgagccgcaggccgactacctcatggaaattgtcgaggggtgggcgctgccggacgagtttaaccgcgagaacgttattgtccttcttcagaactacccgcgcgcgttcgacagcatcggtctggcctacaccaaagagctgatgggtatccgcgaaaaaaactga

SEQ ID NO: 119058 - DNA, 813 bp, Enterobacter cloacae
atgtcagaaccttcagtcgtcccttacgtaaaaaccactcccaaaccttttggtgtggacgtcgaatggaaatggccaggtggctgcgcggtgctagaactgcaatgccttcatgaagatggccgacttgtgaaagaacgcctctactggccaactatcggataccttatttccgggctcaaaactggtgagcgagtgcaggtgcgcctgcgtccaattgcagaggatggctcagcacgagattggcgagccggtgactggatcgaaggtgtttcttctgtcgatgccggagaaattgtagaggcgctggaccatgaaatccgcaacagcgatgcattcaaagtcctgaaagatggctggtctttcgaaaagaacggggtgctgattattaataacggccaggtgttcgttaccgatgcgaagatcgacgatgccgtattgtctaagagctatagcgttaaaatgaacgtcgcctacaaaggtaaaccgcacgaagctggtatgggccttagtgttgaaggcgaccagagcaaggttgagtttctggccgaacgctatacggtgcaggaagccgcttcatctatcatcgagaacgccgtcgcaacaagcgcgaagacgaagtttaggcttggcgatgaaatgaaacaggccatcattgatgccgtgcgtgaaagcgatttgttcgcatccctccaggcaaagattgatgcgcagacagcttcagtagttggcctgcaacaggcgatgcacgaagcggtgaacgatgctctcctcaatgcgctcaagccaggcggtctgctgtacaaacgataa

SEQ ID NO: 119059 - DNA, 933 bp, Enterobacter cloacae
atggcattcgcaatccctaacggctcgcgtgtgaacgtggccaaggcctatcaagccccaatcacctttaccgcagcctctaacgcgacggaatgcgaactgaccgttgcatcggcctccggcattctggctggtgacgtagttcaggtgagttccggctggttaaagctcgataacatggtgctgcgcgtaaaatcggtgaccagtaataaaatcgtgctggaagcattcgatactaccgacaccaccaaattcccggcaggcactggcgcgggcacgctgcgtaaaatcgactcatggatcaccatgcctcaggtgatgacactgtcaactgaaggtggtgaccagcagaccatcagcgtgcagttcctggaagatgataaagcgcgaaccatcccaacgtttaaaaacgcggtggttcaggtttacacctttgcgcatgaccctcaactggcgatctacaaacgcctcattgacctggatgactccagcgacaccaccgcggtctggttccataacccacgcggcaaagccgatcgtttctactcagccaaagtatcgttccagcgcgtaccgcgcacggaaatcaacgccgtggaaagtaacgaagcgcgtatgaacttcgaatcggacatgcagatttacccgatcgccgattcatccgtgacgccgctggcgttcctgactgacctgccgtcaaccaagtcggttgctacaggcgctgcactggatctggcggtggtaatgaagggcggctcagcaccttacacctacgtttggaagaaaggcagcaccgctattccgggcaaaaccgcatcgacgttcaacatttcatctgtcgcatccggtgatgctggcgtttacacctgtgaagtcaccgacgccgcgggcaaaaccatcacctcggctgcgtgtactgtcacggtcaactaa

SEQ ID NO: 119060 - DNA, 447 bp, Enterobacter cloacae
atggtcggtgatcagtccatgcgaatagctgacctgctggagagccgggtagccataatctcggcttctctcggcttgccgatcgcctggccgaatatcgtattcgatccaccggatgcgccatacgcccgtgtttatgttttacctgcacaaactgtaggtcaggacatagaaggtctgatgcgtacctatcaggggatcttgcaggtaaacatcattactcccgcaggctcaggcgtgagccaggcgagagggcttgcccagtcggtggcagatgcattccctgaaggactgccgctggtggacggtgatctgacggtttacatcaacgggccgccgcaggtgagacaacccatccaggaccggccaacctcggcgcccaacggttccagtggttccataacctacaccatccccgtcagcatgcagtaccgcgctgactactga

SEQ ID NO: 119061 - DNA, 600 bp, Enterobacter cloacae
atgtccagttccgtaaatcagccgttcctggctgccattcagttattcgtggatagctcaaagcaggatatggacgaggtggtgcgtaggacaggtatcaaaatactcggtcggctggtggaaatgtcaccgattggtaatcccgatctctggcaggtgaaccagacggcatcggcttacaacacggcggtacgggagcataacgcggcactgcgccaagacccggccaatctcactaaagccggacgcctgaagcacgggcgagccgtcaacgactcgatggacatcaaaaagcctgagggttatgtcggtggtcggttcaagaacaactggtatgtgggtttcgacagccagccgactcagtcaaacgatacaccagatgcttccggccagggatcaaattcccgtggcatggcggtgcttgaggtattcagagtgggccaggtcagctcgatttacttcaccaataacctgccatatgcggcagcgctggaaaacggtcattccacccaggcgccgggcgggatggtgggcattacagctatcgacgcggcgcagctgttccgagaggcaatgagcgaggtacgcaatggtcggtga

SEQ ID NO: 119062 - DNA, 354 bp, Enterobacter cloacae
atggcaatcgactatcgccggatgcgcgccacggcaacgcggctgctgacggagaacggcaaagcctaccaactgactcgcggcggaaccatcacccgcgatcagtacgggaaagaggttatcaccgagcctattacagcgaccgttaccggcgttatcaccgaatactccacgcgtgaaatcgacggttcactaattgctacgggcgataaaaaattggcggccacgtttgaaacggaagtgcgcattggcgacctcattgatatcgacggcaaaaagtggcgcgtggttcagccgaatccggttaagcccgcagatgtgctgatttcctataacatccagctaaggacctga

SEQ ID NO: 119063 - DNA, 483 bp, Enterobacter cloacae
atgctggttgccgatccccattcgccggactttaacagctacgccagcgtgtccgacctgcgggtctttgccgccgcgcgcggatacaccattcctgccgaagatggcgagtgtagccagatgctgatgcagtcgatggactttctggaaggaaggttctggcgtggtcagcgctacagcgcatctcagcctctatcctggccgcgctccggcgtacgcttcgatggcgtggacctgccggatgatgctattccacagcgcctgattgatgcccaatgccgcctggctatcgagtcgcaggagattgatctcacgccgtcggtctccggtggcggcgcggtcatagctgagagcgtacagggggccgtctctgtgcagtacgagccgggaacgaataaggccactccttcattcccctggttctattcctcgctgcgcgggcttgttgtgggcggcagccaggtccggatcgaaagggggtag

SEQ ID NO: 119064 - DNA, 234 bp, Enterobacter cloacae
atggccggattaacaaaagagcagcgcgcgcagcgtgaagcggaaaagcttgcagctcagcagaccgctgataataaccctgcccagcaggaacagcagcaggaacagccaggtattgagctggtggtcatggtgcgtgatatcccagagttccccggcggtccgctgcgcgctgatgttcaccctgctgaagtggataactggctggcgctggactggcgtctggaggaataa

SEQ ID NO: 119065 - DNA, 1137 bp, Enterobacter cloacae
atgtccaacactttgactggcctgatcccgaccatctacacggcactgaaccgcgtatcccgtgagcaggtgggctttatcccggcggtggcccgtaacgctaaagccgatgccgcggccaaagaccaaaccgtgaccgcaccggtagcaccaaaaaccaccaccgttgatatcactccggcggcaaccgcgccaaacgacggtgatcagaacattggtaccgtggacgtgaaaatcaccaaatccaaaatggccccggtcaaatggaatggtgaagagcagcttgccatcgggccatcaggcacttatgacattgtcctggctgaccagttttctcaggcgttccgcgcactgagcaacgaaatggatgctgacctggcatcgctggcttataagtcttcccgcgctgttggtgctccaaaagatacaccgttcagtgtcaaagacgacctgtctgatgcggcgaacgctcggcaggtgctgactgataacggcgcaccaaccactgacctgcgcatggtactgggcggcgaagcgatggcgtcaatccgtggtaaacagtccgtactgttcaaagcgaacgaagccggtaccgatcagctgctgcgtgaaggcatcattggtcgtgtgatgggctttaacctgcacgaatccgccaacatcaagcgcaccgcgaaaagcacggcggcgggctataaggtcaatggcgagaagaaagagggcgacatcattattgctatctctgctggtactggtggtattgctgccgggaccgcagtgaagttcgatggcgatgacaaccagtacatggtcgtagcggcaacctcttcgactatcaccatcggcgcacctggcctgcgtcaggatctggcagatcaggcgactgtcactgtgctgagcgagttcgtgccaaacgttgcctttgaccgtaacgcattcctgctggcttgccgtaccccggccatgccaaaaggcggcgataccgctgatgacgtgatgaacgtaaccgatccggtctctggtattaccttccagatcgcgctgtaccgccagtaccgtcaggtgcgttacgaggttggtgtggcgtggggtgtggcctccgttcagcctgaacattccaccatcatcatgggttaa

SEQ ID NO: 119066 - DNA, 753 bp, Enterobacter cloacae
atgaaactgaaacttgatgctaacggaaatgtggtcgttgaaaacggtatgcctgtgtacatccatgatgatggcaaagagatcccgtttgatgcggtcgcagcgatgaccaaaatcacctccctgaatggtgaggcgaaaactcaccgtgaagcgaaggaagcggcggaagccaacctcgcgaaattctctggcatcagtgacccggccaaggcgctcgaagccctggagatgatgaccaaaatcgaccagaagaagctgatcgatgctggcgctgtcgaccaggtaaaagctgagatcaccaaggtcttccagcagcagttggacgaagcgaacggaaaaactcagcaactggaaagccaactgtacgacgagatgattggcgggcgcttcggtggctcaaaattcatttccgagaagatggcgatcccgagtgagttcgtgcgttcatacttcggacagaatttcaaaatcgaagacggcaaggttgtggcctacgacggccagggcaataaggtgttctcccgcaccaagcccggcgagctggccagcttcgatgaagcgctggaatctctggtcgagtcgcacccgcagaaagactacatcctcaaagcgtccggcaacagcggcggtggttctcaccagtcgcagcatcaggctgggcagaaaaccatgaaacgcgctgcttttgacgccctgccaccagctgaacaacaggctgcgattggcggcggcacgagcatcgttgattaa

SEQ ID NO: 119067 - DNA, 210 bp, Enterobacter cloacae
atgcgtaacgaagattttcactacgttggagatggtcgtggaaggcgaagggtgttcgttaatggcaatgagataaagagctgtgtatgggctgatgtcaaacgtggtatcgcctgtattcatccacacccgttacggatccacaagcgaaagcggggtgaaatttactcccgcaagctgcgcggttacataaccatcgaatttatctaa

SEQ ID NO: 119068 - DNA, 1107 bp, Enterobacter cloacae
atggctcgttcggtaaacgacaggttgcaggacgagaccatagctcacggactttacgtgacgcgctacggtacgggcgttgcccgacgaatggtgacgctgcttaacaggatggatgctgaactggctgcccgactgcttgtactgctggagggtaagcgcgctgacacctacagcgcgcgtcgccttgcatcgctactggctggtgtgcgggatctaaaccagcaggcctacgaaccggtcaatgctgctctgatgcgcgaactgacgcgttacgctgattatgagaccgggtatcagtttgacctgttcagcagccttattcccggtcaggtgcttaagcacgtcccgctgcaaagcattgtcccggaacaggtctatgctgctgcggtggcgcagccgttccaggggaggttgctgaaagagtggggcaagaaactcgaatcggatcggctggaaaaaattaccagtgccgtacgcacaggatttcttcagggagaaaccgtcgagcagattgtgaagcgggtcgccggcacgccgcaacttaaacgccaggacggggttatcaatgcctcacgtcgagaccttgcggtagtaacccgcacggcggtgaaccatgtggccgctacagcgcgccaggagttcgcccaagccaacagcgatatcgtgaaggcgaaacagtggtcttcgactctggacacccacaccagccagtggtgcatcatccgcgaccgcaaactctactcgctcgatggcaagccgctgggccatgcaatcccatatctgcgcgggcccggcaaaattcatttctgctgtcgctcatgcgaaattctgatcactaaatcgtgggaggaattgcagatagcatctggcgaactgagcagcgccacacgcgcttcgatggatggacaggtgccatcgcataccagctatgccgaatggctcgtcaggcaaccgtacgcacggcaggagcaggtgctgggcgttacgcgcgcgcggatgctgaacgacggcaaaatcaccgtgcctgagatgttcaatgatgccggggaatttctgaccctggacgaactgcgccgcgtggatgcgtcggcgtttgaggaatag

SEQ ID NO: 119069 - DNA, 1404 bp, Enterobacter cloacae
atgcctgacatctcaacacccaatctggactatgggaacatggtcgaggcgtgggatatcaacgatgccctgatgggcggcacgctctatatgcgacagctgggcgagcaatatctaccgcgctggccgaaagaagacaaagaggactacaaaaaacgcctcgccgtggccacgcttctgccagcctacgaagagaccattaagcaaaacatcgggcgtgtattcgcagagcctattaagcttgccgagaatgtgccggatcagctgcgagagtatgcgaaaaacttcgaccttgaagggacgcgcctggacgtatgggcgcaggccttcttcggtttggcgatgcagtatggcctctcccacgcgctggtggattatcccagggtggacaccgaaaaggtgaaaaccaaagctgaagagaaagctaccggcgcgcgcccctatgtcaccatgctcaatccacgccaggtaattggctggaagtcgaaaatggtggacggcaaagtggtgctgactgcgctgcgtatcaaagaggttgtggtcgaagacggcgacgacttcgggcagaccaaagtcgagcaaatccggtacctgacacccggaaaggtggaaatttaccgcaaggctaaagatgctgacggtgccgcgaactgggcgctattcgatgggtggcagacatcccgccaggatatcactttggtcacgctctacaccaagcgcaccgggtttatgtgtggttcaccgccgcttctcaacatggctctgctgaatatcaagcactggcagagccagagcgagcaggacaacattctgcatgtcgcccgggtgccgatactgacagtattcggtctcgagcaggatcaggaactagtgattggctcttcctctgccacgtcattctccgatcggaacacccagggtctggaatacgtcgagcatacaggctcatccatcggtgccggcaaagagtcgctggcagagctggtggagcaaatgcgacaggcaggtgcgaagctgctgcgcaccgaaaatacctctaccaagtcggtagaccagacctctgaagagaaaatgcaggagcagtcaccgctctacaccatggcgacaagcctggaagatgcgatcgacaacatcctgcaaattatggctgagtacatcggcgagaaggagggcggcaacgtagatgtgcgcaccgagctggatgttgagtcgaaagaattcaacccgcctgctgcgatggctattcagtcgctgcgtcagggcggtgaccttcgccgtatcgatgcaatcaaagccctgcaaaaactcaacctgattgatgccgacgcggatcccgatgtggttctgagcgagttgcttgctgagtcagcatctctgactgaaccgccaccgggtgaggtgtga

SEQ ID NO: 119070 - DNA, 1305 bp, Enterobacter cloacae
atggggatcagcccgacacttaacattcctcaggcgcgtttcctcgcgatgcagcacaaattcaaagcctacgttgccgggttcggttccggtaagacgtgggttggttgtggcggcatctgtaaggggatgtgggagcaccctaaaatcaaccagggttatttcgcgccgacgtacccgcagattcgtgacatcttctacccgacgattgaagaggtggcctttgactggggcctgagcgtcaaaatcaatgaggggaacaaagaggttcacttctacgaggggcgacggtaccgcgggacaacaatctgccgctcaatggagaagccaggctcgatagttggtttcaaaatcggtaatgcgatggtggatgaactggacgtcatggcggctgccaaggcgcagcaggcctggcgaaaaatcatcgcccgtatgcgttacaaagtcgacgggttgcgtaacggcatcgatgtaacgactacgccggagggcttcaagttcgtctaccagcagttcgtgaaggcggtacgtgaaaagcctgagctttctgctttgtatgggctgattcaggccagcacgttcgacaacgcgaagaacctgcccccggattacatcccctcgctgatgaactcctacccgccggagctaattaaggcgtacctgagggggcgttttacaaacctgaccagcggaacaatttatcatcagttcgatcgccacctgaataactgtaccgatgaagagcaggccggcgagccgctctatatcggcatggactttaacgttggcaagatggcagccatcgttcacgttcttcggaacggccagcccagagcggtacgcgagttgataaaggtttatgacacaccggccatgattaagcgcattcaggaagaattctggcgctacgagggcggacgctacgtgtcttccaggcagatttatatctttccggatgcctctggtgattcgcgcaaatcgaataacgccagcgctacggatatcgcccagctcaaacaggccgggttcagcgtggtggtaaacgcagccaacccgccagtgaaggatcgcattaactccatgaacgccatgttctgcaatggcaacggcgagcgccgttacaaagtgaatgttgctcgctgcccggtctataccgacagccttgagcagcaggtatgggcggcaaacggcgaaccggataaatcagccgacaacgatcaccccaatgatgctggtggctatttcatcgtgaagcaattcccgatcatcaagccgaccggaaaagtcactcaactacggatttaa

SEQ ID NO: 119071 - DNA, 999 bp, Enterobacter cloacae
atggcaaaaccggactggggcgagcttcagcaacggttcctgtccgaacatgccgcaaccggcgtatcaccaaaggaatggtgtgaagcgcagggactgaactacgctaccgcccgtcgatatatcaaaaaaccttctgcgcaaactgcgcaaaaacctacgcagaaaaaaatgcgcactgcgcagaaagataaaagcgcaaatgagctgatggatgatgatggacttactgctcagcaacgcttatttgttgcggagtacctaaaggatggtaacgccacacaagcagctatcaggtcgggttacagcaaaaaatccgctgaacaaatcggttatcaactccttcagaaaacttcagttgcccaggctattgcacaacagcagaaagcctccattgcgcgcacgcttggcggtgctgatgaagtccttgcgcagatgtggcagcttgccaccttcgatgcaaaccagctctcgcagtatcgccgcggcgcgtgtcgttactgctggggcttcggtcaccagtaccagtggcgcgatatggtggaattcgaagagaagcgcctcgaagctacagaacgcgataagcgtgagccagtcgatgttggaggttacggctacgatcacacccgagagcctaacccaggctgtccgcgctgcaacggcgatggtattggtcagccgtatttcgccgacacccggaaactctcccctgttgctgctctggcttattccggtgtgaagctggggaagaatggcgtcgagataaccgctatcagccgtgagcgaatgtttgaagcggtaatgaaacggctcggcctggcggatagcgagttcgctcagcgtctccagcagatcgaaatcgaacgccggcagctggagattgagaaactccgcaaagaactggccggtgatggtgatgatgacgaaccgaccccagtgcaaatcaatatcaacgtagtggacgcgagggcggaagatggggatcagcccgacacttaa

SEQ ID NO: 119072 - DNA, 261 bp, Enterobacter cloacae
atgtcagatgcagaacaaaagatttcccacctcgaagacattatcgagaagatgcagttggacgcacacgcatcccgtgttgccattgcggttttatcaaccgctttaagtggcttggcggggaaggatactaagcttggtgatatatacctcgaaagtattgctcagggggataaaatcgagtttgatcatcccgttccagatggttaccgagcaaaattagatgagaaggtcgcagctctgttgggcacgcaaaagtga

SEQ ID NO: 119073 - DNA, 282 bp, Enterobacter cloacae
atgagcgaagctaaaccgcaggatggcaccaccgttaaaggctatcgaaccttaacgccgggtgatattgagcgcatgaatcgcctgaagggtgtcagccgacacttctgtaatttacttgatacagagcgtgagcatgtcaacgatgagcaatctgctaccggcaaccactcagctgaagcacacgaagctgcccgctgtctcgccattgcgcgcaccaaaatgcaggaagcctgcatgtgggcatgtcgtgccgtagcccgtccagacgctgactgttaa

SEQ ID NO: 119074 - DNA, 516 bp, Enterobacter cloacae
atgaaaattaattctggtcttatcggcgttgtcattattgctggtctgtctatagcgctcgcaaagagttgctcaaacgccagtagcctacagagcgataacgacgttctgcgaagtgacaactctttgcaggggcaggtaatcgccacccaggcattcaacttcaatcggttcaatcaggttgcagaacatgcctataagcttaactccctgatcgacaccagcaccgaagaaaccgtaatcgaataccgggagattctccgccgtgaaaaaacctgtgatctgcctgttcctgctgatgtcgctcgtgggctgctcgaatacgcgcaccgtttacgtgccagcgcagtgcacgccgataccgacggacctgacgcagccgatgatagtaccgatgccgccggctcaataacgtactgccaggctgtgctctggattaagccgctgctggccgtgattgagaagggcaacaataacctggctggcatacggcagattgaaaaagagcgccagtaa

SEQ ID NO: 119075 - DNA, 537 bp, Enterobacter cloacae
atgggaaccagagcaaaattgagtactgctgttctggggctggtgctaactggtgcgccggcatccatcattctcgatcagtttctgaatgagaaagagggtaacagcctcacggcgtacaaagatggaagtggtatctggactatttgccggggcgccacaatggttgatggtaaatcggtggtccagggcatgaagctgacacaggcgaaatgcgaccagataaacgccatcgaacgggataaggcgcttgcgtgggttgatcgcaatattaaggtgccgctaaccgaaccgcagaaagccgggatcgcctctttctgcccgtacaacatcggaccgggtaaatgcttcccgtccacgttctataagcgcatcaatgctggtgaccggcaaggggcatgtgaagctattcgctggtggattaaagacggcggccgtgattgccgactaaccaaaggccagaagaatggctgctatgggcaagtcgagcggcgcgatcaggaaagtgcgttgacatgctgggggctggaccaatga

SEQ ID NO: 119076 - DNA, 303 bp, Enterobacter cloacae
atgaaaatgaatgattcagggaacatcttcacgcagttcttcgcgtgggtagcagctctggcgtcagccattggatttaccactcaggatctggtgttcatgttctttggcgctgctggtctgcttatctcgcttgcttcctacataaacgggcgggtggatgcaaaccgcaggcgtagagaggatgagaagcggacaaaaatggtcaatgactacctgaaaggcgtaggtgataaaccccttcacgagcgtcctgctgctgcaagcgtggtcgtggaggcattacaaaaggaaagtgagtga

SEQ ID NO: 119077 - DNA, 294 bp, Enterobacter cloacae
atgggggtgagcatggctatttatcgcagcaaaaaatggctcgccgccgtcgggcagatcgagcgttgtgttctttgtggagcatgggggacgcaggtggcacaccgaaacgaagggaaaggcatgggattaaaaaccgatgactgtgcgacagctgcgctctgcgtttgctgtcatgacagcattgataacgggaataagctgaacagagaggagcgtcggcagcttatggaccgcgcgattgttctgacagtgattgaagttgcccgccgcgggctggtggtacccgcatga

SEQ ID NO: 119078 - DNA, 210 bp, Enterobacter cloacae
gtgacgggaatgaagaagacctggttccatcataccgattgcacaacccagcaggccgaagaactcatggcggaataccagcgccgcggcgtgaaggtagagcgcaacctgaactccgattatctcacctggatcgtcagcgcccggctgcctgaaggtaataaaccaccgcgtataaatcgccggtggcaaaaccggatatgggggtga

SEQ ID NO: 119079 - DNA, 543 bp, Enterobacter cloacae
gtgtcgcccaacaggctccagcgacagttcaatccggatgctccggataagcgttgggtaacggacataacctacatcaggacccacgaaggctggctgtatcttgccgtggttgttgatctgttctcacgcaaaattatcggctggtccatgcaatcccggatgacaaaggacattgtcctgaacgcactgctgatggctgtatggcgccgtaatccccaaaaacaggtgctggttcattcggatcagggcagtcagtacacaagccatgagtggcagtcgttcctgaaatcacacggcctggagggcagcatgagccgtcgcggtaactgccatgataatgcggttgcagaaagctttttccagttgttgaaacgcgaacggataaagaaaaagagctacggaacgcgggaagaagcccgcagcgatatttttgattacatagaaatgttttataacagtaagcgtcggcatggttccagcgatcagatgtcaccgacagaatatgaaaaccagtattatcaacggctaggaagtgtctag

SEQ ID NO: 119080 - DNA, 774 bp, Enterobacter cloacae
atgaagtcagagcaggttatccagcggctgagcactacgcctgaggcaagtattgagaacttgcaggagcatcgctactggctgcaatgtgagcgagcgtacacctatcagcctatctaccgtactgacggtcggttaatggcaattgaggtgttaacggtcgtcactcatccatcgaacccttcgcagcgtatcgcgccggaccgctattttgcggaggttgccgtgcgtcagcgcatcgacgtgctggaagagcagttgagaatgctggcgacgaagcaggcgttcttcgagcagcacggtattctggcttcggtgaacgtggatggcccaaccctgatggcgttacgtcagaatgcgacgctgcaggcgctgattgccaccttgccgtggatgcgcttcgagctggtggaacatgttcagctgccgcaggactcctcatttgcctcgatgtgtgagtttggcccgctgtggctggatgatttcggtaccggtatggccaacttctccgccctgagcgaagtgcgttatgactacatcaaagtggcccgcgatctgtttatcatgctgcgccagacaccggaaggacggaacctgtttacgatgctcctgcaactgatgaaccgctattgccagggcgtcattgtggaaggcgtagagacgctggaagagtggcgcgacgtgcaaaattctccggcagcggcggcacagggttatttcctctctcgtcctgtccccatggataccctggaaaaggtgataaccaccctctga

SEQ ID NO: 119081 - DNA, 603 bp, Enterobacter cloacae
atgcgagtaatcatgtttgacaggcagtcattatttattcatggagcgaagtgcagtttgcagaaattaattccggaaatagatttgacaggaactcgtcagactgatgaattatgggcacacttatccgcgtcgccttccgctatcgtcatgatagatgggtatttaattcatgataacggtgtggctttaccggaagagattatgaatcgttttccaacagcgcgcgtggtgctggtgttaacgaaaaaagagcctcgctgggttgagcaaatgctacagcgcaacgtggtagcaataatccctcgtaatgcgaatcccgaacgcttttccgccgtgctggattctgtatcgcgagggatggtctgttttcccggcgagtggatgaaccagcactcctctcatgatgagctgtcattgttaagtgagcgccagcgtgaggtattgaaattactggcggccggagagtcaaataaagagataggtcgtaatctcaatatcagtgcggcaacggtaaaagcccatcttgagacgcttttccgtcgtcttgatgtcaaaaaccggacgcaggccgcgatgtactatacccgggcgacggcctga

SEQ ID NO: 119082 - DNA, 945 bp, Enterobacter cloacae
atggaagataaacgcgttgtactggtcacgggatgcgacctggcggaccaggctgtcagcatgctgcgagactttgacgtggtgtatgccggtcaccagcccacagaagatcagctggttacgctgtgcgaacggcacaatcctgtggccatcctggtgcgttacggcaaaataaccgcaaggatcatggatgcagcccctgcattacaggttatatcgaaacacggaagcggcattgacgtgatagaccagccagcggcagcggcgcgtaatatcgccgttcgttccgcccccggcgccaatgcggcagcggttgcagaacatacctgggcattgattctggcttgtgccaaatccgtggtcaccctcgataaacgcctgcgcgacgggcactgggataaagccacgcacaaatctatcgagctggaaggcatgacgctggggcttatcggtctgggggcgattggctcgcgggttgcgctggtggggcaggcattcggcatgcagattgtggcgtatgatccttacgctaaaacgatgccatctggttgtgaacgggcaaacaccttacccgaccttttatcccgtgccgatgttatctcattgcattgtccgctcactgacgacaacagaggaatgatcaacgcagacacgctcgcgcactgtaaacgtaacgcgattctggtgaacacagcgcgcggcgggttaattaacgatgaagccctgttacacgcgctgaaggatggaaccttgcacagcgcggcactcgacagctttaccagcgagccactgaccgccccgaacctgtggcagaccgtcgataacgtcatcatttcgccgcatattggcggcgtcagcgcagcgtcatacatcaagatgggaaccgtggccgccagcaatattctggacgttgtacacctgactgacgtcgccgtcagcccctaa

SEQ ID NO: 119083 - DNA, 693 bp, Enterobacter cloacae
atgtccgtttctgaaaaatcattgattaatcgtcaggtcgaacgcgtatcggctgaacaggttcaccaggctgccgagtatcaggccgccattctggcggatgttgccggtcgccgcggtacactccatggtcgtatcaaaccgctcgcgcctcacatggccgttgcgggcccggcagtcaccgtggaggtgcgcccgggagataatctggccatccatgccgcaatggccgtagcacagcctggcgatgtgttggttgttgacgggaaaggcgacctgacctgtgcgctgctcggtgagattatggcgacgcaggcccaggcaagcggtattgcgggcatcatcattgacggggcggtacgtgatgccgataccctgagtaaagggcactaccccgtcttcgccgccggtcttaacccctgtggcccgacaaaatcaattcctggccgggttaatcaccccatctctatcgctggtgcaacggtacgagccggggatctggtggtcgcggatatcgacggcgtggtggtgatcccgcgtgatgaagtgcaggccgttatcgccatggccaaagggaaactcgaaacagagacccgacgtcttgctgctattcgtgagggcgatttacgtccacactggcttaacgacgcgctgcgtaaggcaggcatgttatctgacggggagacgctgtaa

SEQ ID NO: 119084 - DNA, 738 bp, Enterobacter cloacae
atgggtaacgaaggcgttgtagcggtcgaaaaggcgctggctttactggattgcttccgtcccggcgatgagagcctgacgctgaccgcgctggcgcagctatcgggttatcacaaaaccacggtttaccggttaatgaattcgcttgagcgaatgaactatgtcgtcaggcatgatgacggcaattatgcgcttggcccacgtctgctttaccttggcaaactttatgaacaatctttccatctttcccgggtggtgcagcctgagcttcaggcgttatcacaggcctctcaggagagcgccagctggtatgtgttagaaggcgggcaacgtctgtgcctgttccgggcagaagcatcgcacgggttgcgtcacagcaatctgccgggtactcagtttccgctggacgattctgccatcagtaaagtgcttcgccactggggccttaatgacgcgctgccagagggggagcccgctgttccgctctataccgcaggcgcccgtgacccgcatactgcggcgttcgcaatgcccgtcttcggcgtcaatgacaagctggttgcggcgctggcgttgaccgggcccatctccagactgactgaagatcgccgtgaacaggggatcagccagctaatgcatgccaccgccagccgcctgtcacagaaaatgggggccagtaagcctttttgccagcagttttatggggaaacgcaggatactgcggaagagagtctctaa

SEQ ID NO: 119085 - DNA, 1335 bp, Enterobacter cloacae
atgacagaacatattcgtaatggcactgccgccactgaggacatagaaagagagactatgcgcaaggtgatctggcgtatcctcccgtttctgatagtcagttatctggtctccattatcgatcgcggcaatatcggcatggcttcgctacagatgaatgaggatctcggtctcagcaaagcggcgtttggcttcgccagtagcctctatttcgtggcgtattttctgtttgaagttccaagcaatctggcaatgcagaaagttggcgcacgtctgtggatcccccgcattatgatcagctggggggtggtatccatgtgtatggcactggtacaaaacacgacgtcgctttatatcgtgcgttttctgctgggtgccgcggaggcgggcttcttccccggcgtcgtactctttctgacctggtggatcccttcccgctaccgtgcgcgaattatcgcgtcctttatggtcgcgatcccgctggccaattttattggctcgccgctgtccgggttgattctgtcgctggatggatggctgggtctgcgcggctggcatctgctgtttatcattgaaggtttacccgccgtcctgctgggtattgccgcctggtttgttcttcgcgatcgtccgcaccaggctaactggcttaacgcggaacagaaaaaatggctggaaacgacgcttgaaaccgagcgtcaacagcaaaaaaatatcggacaccagacgacatggcagctgctcaggcatcgtcaaatctggctgctggcgctgatttacgcaggcgcgtcatcagcgggcaccaccatcagcgtctggtcaccgcagctgctgaaatcgttccacctggataatctggagacgggtctgttcaacgccattccttacggtctggcatccgtactgatgattgtgtggggacgcagttcggaccgaaccaacgaacgccgctggcataccgctctgacccttttcattattgccgcaggcgtatttgccgcctttgtcagcgtctctctttccgccaccattgttatcctgagcatcatgctgataggggcgtattcaatgaaggggcctttctgggcgctggcgtcaggctggatgagcagcacgtcggcggctgcgggcctggctgcaattggcgccatcgctaaccttatcggcggtgcggtgatggtcaacgcttacggtattatcaacgaacggacgggtagccacacgctggccatgcttcctctggcggcgttatgcgtcacggggggtatcgcggtattggtgatgggacgccaggccagcaatgctcagttgcatgaaaagcaggtcacccattag

SEQ ID NO: 119086 - DNA, 1230 bp, Enterobacter cloacae
atgacccgccgggtagtgattacgggcatgggcggcatcaccgcattcggcgaagactggccgaccatctcgcgccgtctgcgcgagtatgaaaatgcggtgcgtaccatgacggagtggcaggcgtatgacggcctgcaaaccctgctcgccgcgccgattgaagatttcaccctccccgctcactatacccgtaagcgcattcgcgccatgggccgcgtgtcgctgctctcaacccgcgccaccgagctggcgctggagcaggcgggactgatcgacaacgcggtgctgaccaacggtcagaccggcatcgcctacggctcgtcgacgggcagcaccgggccggtcagcgagtttgcctccatgctcaccgaaaagcacacccacaacatcaccggcaccacctacgtgcagatgatgccgcacaccacggcggtgaataccggactgttctttggcctgcgcggacgggtgatccccacctcaagcgcctgtacctctggcagccaggcgattggctacgcctgggaagcgattcgtcacggctaccagaccgtgatggtggcaggcggcgcggaagagctgtgcccgtcggaagcggcggttttcgataccctgtttgccaccagccagcgtaacgacgcgcccaaaaccacgccgtcgccgtttgacgttcagcgcgatggcctggtgattggcgaaggggcgggcacgctggtgctggaagcgctggatcacgccagagcacgcggggcgacaatctatggcgagatcgtgggctttgccaccaactgcgatgcggcgcacatcacccagccccagcgtgaaaccatgcaggtgtgtatggagcagtcgctggcgatggcgggtcttagcccgcaggacattggctacatttctgcccacggcacggcaaccgatcgcggggatatcgccgagagtcaggcgaccgccgctattttcggcgacagcgtgcccatttcatccttaaagagctatttcggccataccctgggtgcctgcggcgcgctggaagccttgctgagtctgcatatgatgcgggagggctggttcacgccgacgctcaatttaagacaaccggatgagcaatgcggcgctttagattatattatgggggaaacccgcccgattgattgcgaatttattcagagcaataactttgcctttggcggcattaatacctcgataatcattaaacgctgggcgtaa

SEQ ID NO: 119087 - DNA, 1758 bp, Enterobacter cloacae
atggaaaaccgtgagacgttatctccttcaacgcgcgtagccgtcgtgctggcgggggctctacagggcgtaatttgctatgtaattacgtggtatatcgagtacgcaaaattgccatcggatacgctgtggctgatgtgtgtagtacctgccaccgtggtaatgacaaccacgttgtctcttgccatgacgtcattcagaaagccatttttgtggctgtcactcgggatgatcggcgcggcagtcgcgggtatgggcggctggcttaagtggagcgttgcaggactcgaaagctggaatctcagagatgagatgctcgttttcggctttcatctgctgctgatgacgctgttcgtgttgccatggcttcagcggcgtctggatcccgtcccgactacctcgttctacagcgacttttatcaacgaaactggcataacgcgctgacgctgctcattatttttgtttcgaatggtctcttctggctggtgcttttcctctgggccgagcttttcgaacttatcggcatcggcttttttgatcggcttttctttcattctgacggatttatttcagtggcgattggcgtggtttcagccagtgcggccgtgctcacgcgtatgcaggtaaggttaatccttgccctgcaaaatctgctgaccctcatcgccaccggtctgcttcccctgatggcggcgctggcgctgctctttattggcgcgttgccttttgtcggctttgaatccatttcagccagaatatccgccgcgggcttgctgaccaccttagcgctgctgctgttattcctggtgacgatagtgtggcatccacagcgtcaaacgctgccttactatgccccgctgcgagggatgattcgccttgctgtgactatcgtacccgcgtatccggttctggcggggtgggcgctgtggctacgcatttcgcaatacggctggtcacccgagcgtctgtacggggtattgataaccatcgtggcgctggtctgggcggtcggtttttgcgccagcgttctgattcagcgccgtgaaccgcagaagatccatgcgtacgtcatcccggcgaccgggctgctttccctcatcttcctggcgttgctccatacccccgtgctggatccgtggcgaataagcgttgcaagccatatggcccgctatcaggacggcagaataacggcggatcaagtcagcctgtatatgctcagtaacgctggacgaaaggggcgggaggcaatgctcacgctgcaaaacgatccgcagtttatctctaacccaaaacggcagcgtgaaataaatggtcttctctccaggaacgctggcggagcaggtaagatgaccgccgcgatgctggaaaaacaggtccagctcgcaccgggaatggctcgtcctgataaggcattgtggcaagccatgctcagcaatcagtatcgctttgagagctgcgatagcgcccagagtaactgtttactcatgccgctggatcttaacggcgacggcaagcctgaagccgtgctatttcaatttaccgatcgcacgatcgtggcttacacacaaaccaacacgggctggaggatcgccggggacgcgtggaaaatgccggaggcattgaccagagaagaacttgaccgcgcattaaggcagaggaaagtgaaatctgtcgtgaagccctgggcggatattgagatttttggggagcgtgtcgatatgagctacgacagttacaataatgcgcggcggcgttag

SEQ ID NO: 119088 - DNA, 1170 bp, Enterobacter cloacae
atgacgcttaaaaatcgtcaggttgttgaggacgttatccatttcagaaaaattgttctgagcccggactggaataataatgttttaaatcaatattatcttaataatacggcgacgaggaatctcttccctgcggaatttgctgcacaggctgttgctcacatggtgctccatggtaactatgccggtatcgagtcgtacagtgaacatattggtgaggaacggtttgacctggctttggctgcatatcttcgttatctacgtactgccgagagtatctttatagcacttaaggataaaaatgttctgccgtacatcaaaaatgctgttggcaggattgttgatttaggtcttctggtgaatatacctgtcctgagctttgttaaaggtcagtatgacgtcatcaaagaagctacaaatgcaacctctcttttaatatttgtgcgagagcgtcaaaaagcactgtcagagaaaataattgagtctgatgtgaatgctatgggtccagtatttctccatgacgtatatcagtcaggtgagcagtttgatattttgaagaaaaagctgaacgccctggcatgtggagtatttagttcttctgaaaggcttattgagtgttttacggttcttcctgtgaacatgcgctttatccttgaacaaatgcaacttcaggggcagcatatccggatggaaggtagtgtgggtatctttgcatcatggttccgtgatgcagagccagacgttgtcacaaatgccgagaacattcatttcctgtggtcttgcctcgacgatacccagagagagactgtacttgatgagttgcacgatgtcttacttgaaagacatattcgtattgacagccgtattgcgattattacccgttttcataatgagttgtcgtttattgaacctgagaaggccgttgaacgcagggctattgcggcgctgtttagcgcttctgttgataatgtattattgtctcaatggcttgaccgtcagacgttttcattttcatcatggtctccggaggacgcccgtacggcaacgagttgtataatgaataactcggagatttttcctctcatctgcaggaattcacagtatattaaaaacagaatgttaccagagaaagcggacgttacagaagatagtgatacgtttccggactga

SEQ ID NO: 119089 - DNA, 330 bp, Enterobacter cloacae
atgacagaaagtgctttgcttttgcgagaggcatttaatgaatcggttaactatatgacatggtctttttattcactgataactgcttacgtttcgatggctttttatgatagagttgaggttaagacccgaataaataattatctgaataagttacttttcgtgattgctatgtccgtttttatcccaaatatgtactttgtttcaatggtgttcagtcagaagttaggcaccgcagctggcgttgcgtcattcattattgggctacttttcatgatgttaaactcggcgcctgtaattactggtatcgtacagcagcgcaaagattga

SEQ ID NO: 119090 - DNA, 888 bp, Enterobacter cloacae
atgacgcgcctgactgccaaagattttccgcaagagctgcttgattactatgactattacgcccacggtaaaatcagcaaacgcgaatttctgaatctcgcggcgcgctatgccgcaggcggcgtaacggcgctgatgctgtttaatatgcttaaacccaactacgccctcgcggagcaggttaaattcaccgatcccgatattcttccggaatacatcacttatccctcgcccaatggtcacggcgaagtgcgcggttacctggtgaagccggccaaagccaccgcgaaaacgcccgcggtagtggtcgtgcatgagaatcgggggctgaatccgtatattgaagacgtggcacgacgcgtggcgaaagcggggtatatcgcgctggctcccgacggcctgagctcggtggggggataccccggcaacgacgacgaaggaaaggttttgcagcagaaggtcgacccgacaaggctgatgaacgacttttttgccgccatagagtttatgaaaaatcatccggaagccaccggtaaggtggggattaccggtttttgctacggcggcggcgtatcgaatgccgccgccgtagcgtatccggaactcgactgtgcggtgcccttctatggtcgtcagccgcgggtggaggatgtgccaaaaattagcgcgccgctcctgcttcattatgccgagctggacaaaaatattaacgagggctggcctgcctatgaagccgcgctgaaatcaaataataaggtttatgaagcgtatatctaccccggcgtaaaccatggatttcacaacgattctaccccacgctatgaccagcccgcagccgagctggcctggtcgagaacgttaagctggtttaaaaaatatctggaatga

SEQ ID NO: 119091 - DNA, 1548 bp, Enterobacter cloacae
atgaagatgcttcgtaatttcaccatccgtttcgtcatgctgacggtactggggatcttttgtgtcatgtgggcaggcgtggggctttacagcacctggtctctgtctcgtgtttctgatggtaatgacgttgaccgccagctggtcaggcaaatgacggtgctgagccagggcaacgatcagtatttccgtttcgtcacccgcctgagccgggcgatggaagctaaagcagcgggcggcacgccggacctggctcctgctcagcaggcgctggataacatgagtaaaaagctggaagagatgaaggctatctccccgggcccgatggatgaaaaggtctctgcgcaggtgatttccacctggcaggcgctgctcgatcggggcgttacgcctcagatggtgcaggcaaagcaggcgacgctcgaaggctatcgtcagcatgccaacaatgttacgccgccgctaagccgcgcgtttggcgccgcggttgagaactttaacaattctgcggtgaaggcgctcgacagtacgcgcgttgtggtcgacagcctgaccagcatgacccggacggtgattatcaccgccacgatcgtgggtctgctgatcctgctgttcaccgaccgctacctggtggcgctgctggtaaaaccgctggagcgtatccgtcagcagttccgccagattgcgcagggcgatctcagccagccgattgagcctattggccgcaactgcgtggggcaactggttccgctgctaagcgccatgcaggacagcctgcgggaggcggtcagcacgattcgttccggcagcgagaatatctggcgcggggcaacggagatctccagcgggaataacgatctctcttcgcgtaccgaagagcaggccgctgcgctggaagagaccgcggccagcatggaacagcttaccgcaacggtgaagctgaacgccgaaagcgcgcgccaggccagccagcttgcggatgtcgcctccagtacggccagccgcggcgggtcgctggtagatgatgtggtcacgaccatgagcggcatttcggacagctcgaagaaaattgctgaaatcactaccgttatcaacagcatcgccttccagaccaatattctggcgctgaacgccgcggtggaagcggctcgggccggggagcaggggcgcggctttgcggtcgtggcgggtgaggtgcgtaatctggccagccgcagcgcgaatgcggcaaaagagatcgaagggctgattgcggattccgttgcccgcgtggagcagggggcgcagctggtgaacgataccggcacgacgatggaagctatcctgcgcgacgtgacggaggtgaccgtcattatgaagcagatcgccaccgcgtcagaggagcagagcaaaggtatttctcaggtcggcgttgccatcacgcagatggacggcgtgacccagcagaacgcctcgctggtggagcaggtttccgccgccgccgccgcactggaacggcagaccgaagaactccagcgctcagtgcagaagttccgtctcaccgcgtaa

SEQ ID NO: 119092 - DNA, 1863 bp, Enterobacter cloacae
atgcgtaaaggaacgttaagcagtgacgcacccttcgggacgttattaggttatgcgccgggtggcgtggcgatttactcttcaaattacggcagtctcgatccgcggcactacccggaagacgcggaattccgcagctatatcggcaacgaatacatgggccataaatggcagtgcgttgagtttgcgcgccgtttcctgtttctcaaccacgggtttgtctttaccgacgtcgggatggcgtgggagatcttctccctgcgttttttacgccaggtggtgaatgacaacatcctgccgctacaggcctttgctaatggctcaaaacgcgcgccgcaggccggtgcgctgctcatctggcaaaagggcggtgagtttcaagagaccggccacgtcgccgtcatcacccagttgctggacgacaaagtgcgcattgccgagcagaacgttattcactctccgctaccgatggggcagcagtggacgcgcgagctgcgtctgagcgttgagaacggttgctatacgcttcatgatacgttcagcgataccgagatcctcggctggatgatccagacggaggagacggaacacagtattcctcagccggagatcgacggtgagctgctgaaaatcagcggcgcgcggttgaagaacaaccgtcagttcgacggaaaatggctcaatgaaaacgacgccctgcaacaggcgtacgttcgcgcgaacggccacgttattaacaacgatccctgccagtacttcaccattaccgaaagtgccgagcaggagctgatcaaagccaccaacgaactgcacctgatgtaccttcatgccaccgacaaggtgctgaaagacgacagcttactcgcgcttttcgacatcccgaaaattctctggccgcgtctgcgcctctcctggcagtggcgtcgtcaccatatgatcaccggtcgtatggatttctgcatggatgagcgcggcattaaggtttacgagtacaacgcggattccgcctcctgccataccgagggcgggctgattcttgaagagtgggtgaaaaacggctatcgcggcaccggccacaatccggcggaaggcttgctggaggagctgaccggcgcctggaagcacagccacgcgcggccgttcgtccatattatgcaggacaacgatatcgaagaggattaccacgcgctctttattcagcgctcgctgatccaggccgggtttgaaaccaaaatcctgcatggactgggcgcgctgagctgggatgccgccgggcaactgattgatgatgaaggccgtcacgtcaactgcgtatggaaaacctgggcgtgggaaacggcgatcgagcagatccgcgaggtgagcgaaaccgagtacgccgccgtgcccatccgtaccggtcacccgcaaggtgaagtgcgcctgattgacgtcctgctgcgcccggaagtgctggtctttgaaccgctgtggacggtgatcccaggtaacaaggcgatcctgccggtgctgtggcagctgttcccgaaccaccgttacctgctggataccgattttgaggtgaatgcgctgctgaaacggacaggctatgccgttaaaccgatagccggacgctgcgggagcaatatcgatctgatcggcgcccaggatcaactgctggaccagtccagcggcaagtttgttgaccgcaaaaatatctaccagcagctatggtgcctgccaaaggttgacggcagatacatacaggtctgcacctttaccgtgggcggaaactatggcggaacctgtctgcgtggggatgactcgctggtggtgaagaaagagagcgatattgaaccgctgattgtggtgaaggataactaa

SEQ ID NO: 119093 - DNA, 1332 bp, Enterobacter cloacae
atgactgatcgcattatcgccttctctattttgtgtctggtattcgggttgccgttaggcgtagccgcgctgtttaccggcgaactgattctggactttgtctttttctggccgctgtttatgtccgtgctctgggtaaccggcggcctctatttctggtttcagcttgaacggcactggtcgtgggataacgcaacacccgcgcccgccttagccggcgaaccgttaatctcgattcttattccctgctttaatgaggaacgcaacgcacgggagaccattagcgccgcgctgggtcagcggtactggaatgttgaggttatcgccatcaacgacggctcttcggacaataccgcgcaggtgctgcatcaactggcgcaggagcagccgcgcctgcgggtgattaatctcgcggagaatcaggggaaagccgtggcgctcaaggctggtgcggcggcggcccggggcgatctgctggtctgcattgacggcgacgccctgctcgatcgcgatacggccgcgtatctggtggcaccgctgattcagtatccccacgttggggccgtcaccggaaatccgcgtattcgcacgcgctcaacgctgattggtcgtattcaggtgggcgagttttcttccattattggtcttatcaagcgaacgcagcggatctatggccgggtctttacggtttccggcgtcatcgccgcctttcgccgacaggcgctggcggatgtcgggtactggagcccggatatgatcacagaggacattgacataagctggaagcttcagctgcgccactgggatatttttttcgagccgcgggcgctgtgctggatcctgatgccggagacgctcaaggggctgtggaaacagcgtctgcgctgggctcagggcggtgcagaggtgtttctggttaacctgcgcaaaatggcccgctgggagcatcatcggatgtggcccctgtttctcgagtacgcgctgtcaacgctgtgggcgtttgcctatggagcgaccgtggtgttgttcattcttagccatattatccctcttcccgcgaacctggccgttgcgagtctgtttcccccggcgtttaccgggctgctgctgggggtgatgtgcctgctgcaattcctcgtcagtttgtatatcgagcggcgctacgagcggaaagtggcaggctcgctgttctgggtgatttggttcccgatggtgtactggatgattggcctgtttaccaccctcgtggcatttccgaaagtcatgcttaaacgtaaacgcgcccgcgcgcgctggatcagtccggaccggggaaaagggagcattcaatga

SEQ ID NO: 119094 - DNA, 1938 bp, Enterobacter cloacae
atgctgaatacacgtttttctgtaagcctgatcgtcatcggctggctctgcctcagcgcgagtctctgcgcgcagccgctctcctttatggctcctgaagagaggccgcagctggaggccagcaaaccctggccggagaatcagtttctggtcctggcctaccacgacgtcgaagatgatgctgccgatcagcgctacctctccgttcgcaccagcgcgttaaacgagcagataagttggcttttgcacaacggctatcacgccatcagcgtgcaggacattgtggatgcgcatgaaggaaaaaaagcgctgccgccgaaagccgttttgctcagcttcgacgacggctacagcagtttttacacccgggtctggcccctgcttcaggcctggaacgttcctgcgctgtgggcgccggtgggcagctgggtggatacgccggcaaatcaaaaagttaacttcggcggtctgatgacgccccgcgatcggttcgcgacatgggacatggtgcgcgagctcagccgctccccgctggttgaaatcggctcgcatacctgggcctcgcattacggcatcccggccaacccgcagggaagccgtgaacccgctatcgccaaccgttttttcgataacgcgacggggcattacgaaaccgatgaacacttcaaccagcggatcgccgcagacgtacggaaagtcaccgaaaaaatcacccaggtgacgggaaaagcgccgcgtgcctgggtgtggccctatggggctgccaacggtacatcgctcgctatcgcccagaaacagggctatcagctggcctttaccctggaggacgggctggcaaacgtgcgcgacctcggcaacatcccgcgcctgctgattgccggaaatccgtcgataaaaacctttgccaacacggttagccgcgttcaggagtttgacccggtgcgcgtcatgcatgttgatctcgattatgtctacgatcccgatccggcccagcagacgaaaaacatcaacaaactcgtccagcgggtctacgacatgaaaatcagccatgtgtttctccaggcgttttcggatccgcggggcgacggcaggatcggcgcgctctatttccccaaccgccggcttccggtccgggccgatctctttaattttgtcgcctggcagctacaaacccgcgcgggagtgaaagtctttgcgtggatgccggtcctctctttcgatctcagtccagccctgccgcgcgtgcagcgccgggatcgtcaaacgggagagttgaccgtggccgccgagccctatatccggctctccccctggagtccgcaggttcgccagcaggtgacggagatctatgaagatctggcccgctatgccagcttcaacgggatcttgttccatgacgacgcggtgctgacggacgttgacgatgccgggcagaagacgacgcgccagaaaagccagcagcttatcggctttacccgcaccctgagccaggcggtgaaaaacatccgtggcccgcagatcaagaccgcgcgcaatatgttcgccctccccattctgcagcccgaaagcgaagcgtggtttgcgcaaaatctggatgattttctggcggcctacgactggacggtgccgatggcaatgccactgatggagtccgtcccggcagaagagagcaatgcctggctgacgcgtttagtcaacgccgtcgccgcacgccccggcgcgctgaataaaacgatttttgagctacaggccagggactgggcgcagaaaccgcagcgtgccgtagccgatgaacgtctggtggggtggatgcaggtgctccagctgaacggcatcaaaaattacggttattaccccgacgacttcctcaacaaccaacctgatatttcgcgtatcaggcctgaattttcttcgtactggtatcctgacaatgactga

SEQ ID NO: 119095 - DNA, 156 bp, Enterobacter cloacae
atggaagagattgcagataagctgaatatgtcggttaaaagcctctatcgcaagcgaacggcgctatcggagcggttaggggcagggaacttcaacgaggcgtgtttgtttatcttcaaaaacaaactgctggacgcggctgggaacgatccctag

SEQ ID NO: 119096 - DNA, 1788 bp, Enterobacter cloacae
atgaggtttttccagagcttacaaaacgaaggtatctctgctccggcgcagatccgtttgctaaacaacacctttctgcggctggtatttagctttagtgcggtgccctttgtgggtattcctttcgccatctggatttatatgcttggggacgacctcggcccaacgattatctggataattatttatctgctatgtgccgtggcgataagactattgcaccgacgctatcagcgtgaagcgaaagaaaacggtgatagggacgtcctgcgacgctggcttccgcgtattaataatatcgcctttattcacgggctgggcatttcttcgctctatttaattactccacagacgcagaattttgactttttcctgttacttaatatcagcatcgccgctatcgtcgccgccaatgcgacgcatctgacgccggtcatcagcacctttacgcgctttttcttcgcctcctggggggtgctgaacctcggtattatctggcggctggatgagttgatgttcatcgtgctcatgctgaatctgctttacggcttcgcaatttaccgccatgcgttaacttcccatgcgttctttattcagcaggcactgcttgaggaaaaaagctcacgcctggcggaacagtttcgtcaggccaaagaggacgcggagcaggcactgctggataaaaatcagtttctgaccaccgccagccacgatctgcgccagcccgtacacgctatgggctttctgatcgaagccatcctccaccgaaaccgggacgacagcctgacgccacagcttcttgacctgcagcagagcgttcgctcggtacatttaatgctcaactctctgctcgatctcagcaaaatagaatccgggaatgtcctctctgtcccgaccaaagtggatatcggtgctctgctcgactcggtcatcacgctgtttcgcgaagaggccaacagccgcgcgcttaggctgtgcatccggcggcctaaacgccgtatctacgtgatgggcgattcgctgctggtacgacagtccctgattaacctgattcaaaacgcccttcgttacacgctccagggcggggtgctggtcgccatccgaccgcgcggtgacgagtgtatggtggaggtgtgggacacgggagtcggtatcgccgatgaagagaagggcaaaatcttctcaccttactaccgccccgagctggcatggaagatcgacagcgccggacacgggctgggactggccgtagtggcccgttgtgccaagctgatgaaggtgaaatacgggatgcaatccattgaaggtaaaggctcacgcttctggatgcgcttcacccaatatgctggcgaagatagcgccctggatatcccgcccgccgctgacaacaccgccacgccggtacgctatgccccgctgcacggttcctgcctggtcgtcgatgacgacccgctggtgacgtctgcctgggagagcctgatgagcgtctggggaatcgacgtacgctgtgcggcctcggctgaagaagcgtttgccataatcgacgacggctttacgccgttcgccgtgctgtgcgaccagcgtctgcgatccggcgaaagcggcttcgatatcctgaaagcgctttttgaccgtctgccggatatgagcggcgccatagtcagcggcgaatttaattcaccggttctgctggaggcggagcaggaagggtatctggtgctgcgcaagcctctggagccggctaaactgcatgcgctgctgacgcaatggtcagggtgtcgtggatag

SEQ ID NO: 119097 - DNA, 327 bp, Enterobacter cloacae
atgaccagcgaagaggcacttttaaaatcaggttttagcaaacgagatcttcaaaagttaaaaaacaatattgaaaattacggtggttcgtttgatagcgtaactcatgatctggccaatcgttttaaggctatgaagtggataactattattgccttcatcatactggctttaactcttttacttgcatccaaggatacaagcctgacacttgcgctcacattattgattgtactacctttcatctggtatataacgccagcaaaacttggctacaaatcctggcgttatcgtaaaatgctgactaattctgggacgggtcgctga

SEQ ID NO: 119098 - DNA, 594 bp, Enterobacter cloacae
atggaatgcgttaaaattctcagagaagaaaacagtaacctgctggaacaagcgcgtttattaagaacgaaggcagcgaagctttacgctaaagtcgagtttatccgagagaataacaaaattgttgggtatgtgatctcggctgttagtgttgtcctggccggtgctgaattagccgcaggatttaccctcataggcactatgacccctctcggggttcttgctggtgcgattctggttactgacgggacaaacagcatcagtaaagaagtggctcgctacgcaactaacaacactaccagtgaagggctggtcgcgaatgccgcgatgtctacagctgagtttatgggctttagtcgtgagaatgggttaggtgtctacaaatcaatttcactggccgctcatgcgtacaccatttttggcttgttacggcgacctggtacctggcgactgtttcgttatctccctgctgactattaccgaaaggtgagcacactgagccgcccgcagcttacaatgaaaatagcgggttatggcgtgaaagctaagattatttttgatctgttgtccgtcagcgacccgtcccagaattag

SEQ ID NO: 119099 - DNA, 210 bp, Enterobacter cloacae
atggatgcagcattacttaacatgatgcgctcagatggaagaaataaagcctgggcggaaactatggtgaatatggaagccaggaaactggtaaatacagccaacactctgtcggcttttcatctcagcgatagtttgactcgaatgaagtttgttcaggaaattcgggacctcatagaacatcagtttacgttagctcgtcgggcttaa

SEQ ID NO: 119100 - DNA, 339 bp, Enterobacter cloacae
atgagcgtaactataaaagacgatcgactccgtaccatcgctacctttgacggtaaaaccctgaaagacgaccgactcaggaccatcgcaacgtttgacggtaaaaccctgaaagacgaccgcctcagaaccatctcaacttttgacggtaaaaccctgaaagacgaccgactccgcaccatcgctacctttgatggcaagaccctgaaagacgatcgactccgcaccatcgcaacatttgatggtaaaacacttaaagacgatcgactcagaaccatcgcgacagttaatggtaatgtcagtattgttgttttggcgtttgctgctcggctattttag

SEQ ID NO: 119101 - DNA, 3117 bp, Enterobacter cloacae
atgacacaacagacacacaccattgctgaatcaaataactttatcgtccttgataaatacaccaaagttctggataccggtgacagctaccagagcgaatcggaccttgagcgggagctgattcaggaccttcttaatcaggggtatgagtttatctccgttaagtcaccgactgcgatgctggcgaatgtgcgggaccaacttcagcgtcttaatggtgtggtgtttaacgaaagtgaatggcggcgtttcgcagagcagtatctcgacagccccagtgacagcagcctggacaaaacccgtaaaatccatatcgactatatctgtgatttcacgtttgatgacggtcgtctggaaaacatctatctgatagataaaaagaacctgctgcgcaataaggtgcaggtcattcagcaatttgagcagactggctcacacgctaaccgttatgacgtcaccattctggtcaacggccttccactggtgcaaatcgaactcaaaaaacgcggtgtggcgattcatgaagcctttaaccagatacaccgttacagcaaggaaagctttaacagcgataactccctgtttaaatacctgcaactcttcgtgatttccaacgggactgatacccggtactttgccagtaccactaagcgggataaaaacagctttgatttcaccatgaactgggcaaagtcggataacactctgattaaggacctgaaggactttaccgccactttcttccagaagcatactctgctgaatgttctgtttaattacagcgtgtttgacagcagccagacgctgctcgtcatgcgcccctatcagattgctgccactgagcgaatcctctggaaaatcaacagctcttttaaagcgaagaactggtcaaaacccgaaagcggtggatttatctggcataccacagggtcaggaaaaaccctgaccagctttaaggccgcacgtctggctacggaactggactttattgataaagtcttcttcgtggtcgacaggaaagacctcgattaccagaccatgaaggagtatcagcgcttctctccggacagtgtcaatggttccgataatacagcaggcctcagaagaaacctggataaggacgataacaaaatcatcgtcacaaccattcagaaactcaataacctgatgaaagccgaagctgacctgcccgtctatcagcagcaggtggtgtttatctttgatgagtgtcaccgcagccagtttggtgaggcccagaaaaacctcaaaaagaaattcagacgcttttatcagtttggttttactggtacgcctattttcccggaaaatgcactgggggcagaaaccacaaccagcgtgttcggacgtgaattacattcttacgtcattactgatgcgattcgtgatgaaaaagtgctgaagtttaaggtggactataacgatgtccgcccacagtttaagtctcttgaaacggaaactgatgagaaaaaactcagcgcggctgaaaacaaccaggcatttttgcaccccctgcgtattcaggaaataacgcaatacattctcaataacttccgtcagaaaacgcaccgaaccttcccgggagctaagggctttaacgccatgttagcagttagcagcgtggaagcggcaaaagcttattacacgacgtttaaaatgctacaggaagaagcggagaagaaatctggcagctataaacgccttcgggttgcaaccatcttctcctttgctgcaaatgaagagcaaagcgccattggtgatattaccgacgaaagctttgataccagcgcaatgaacagcagcgcaaaggaattcctggattcagccattgatgactataacaaccactttaaaaccaatttcagtaccgacagtaacggcttccagaactactaccgcgatttagctcaacgagtgaaaaatcaggatatcgaccttctcatcgtggtgggaatgttcttaaccggctttgatgccccgacgcttaacactcttttcgttgacaaaaacctccgttatcacggcctgatgcaggcattctcccgcacaaaccgtatctatgatgccaccaaaaccttcggcaatatcgtgactttcagggacctggagcgtccgaccattgatgccatcacactatttggcgacaaaaacaccaagaatgtggtgctggaaaaaagctacgaagagtacatgcagggctttaccgatgcggcaaccggtgaggctaaacgaggttttatggctgttgtttcggagctggagcagcgcttccctgaccctgccagtatcgacagtgaaaaagagaaaaaagccttcgtcaaactgtttggtgaatatctgcgggcagaaaacatccttcaaaactatgatgaatttgccacgctgaaagccctgcagaaggttgatattagtgacccggaagcggtagaaacctttaaagcagagcactatgtggatgatgaaaaatttgctgaattacaaaccattcgtctcccggcagaacgtaaagttcaggactatcgctcagcatacaatgatatccgggactggcagcgacgcgagaaagcatcaaacgacagggataaatcaaccacagactgggatgacgtggtgtttgaaattgacctgctgaagtcgcaggaaattaacctggattacatccttggtctgattttcgaccacaatcgtcagaaaaaaggtaaagaagccctgactgaagaggtcagacgcttaatccgctcaagtctgggcaaccgtgccaaagaaggtctgattgttgactttattcagcaaactaaccttgatgacatgccggacaaggccagtatcattgatgcattctttacctatgctcagcgtgaacagcagcgggaagcagaagcgttgattaaggaagaaaacctcaatgaagaggctgcaaggcgctatatccgcacatcactaaaacgggagtatgccaccgaaaatgggacggagctaaatgagacgctaccaaagctcagtccgctgaatcctcagtacaaaacgaaaaagcagactgtattccagaaaattggggcgtttatcgaaaaatttaaaggggttggaggacacctctag

SEQ ID NO: 119102 - DNA, 1224 bp, Enterobacter cloacae
atgagcgagttaagttatctggaaaaactgctggatggcgctgaggttgagtggctgccactcggtgttttaggtgagcttgttcgtggaaatggcttaccaaaaactgattttactgaggcaggtattcctgctattcactatggtcagatttataccttttatggcctttcaacagaaaccacaaagtcctttgtttcacaagatacagctaaaaagctgaaaaaagtaaatactggcgatgtagtgatcactaatacaagtgaaaatcttgatgatgtcggtaaagccctggtttatcttggtaaagagcaagctgtcaccggcggccatgcgacaatatttaagcccagggaaggtattattggaaaatactttgcttatttcacccagacaaattcattttacaatgaaaaaagaaagtactcaaaagggacaaaagtaattgatgtttccgcatcagatatggcaaaaataatcatccccataccttgccccaacaatccagaaaagtctcttgctatccagttagaaattgtccggattctggataagtttactgcacttacagctgagcttacagctgagcttacagctgagcttaatatgcgaaaaaaacagtacaactactatcgcgaccagttgctgagttttgatgaggatgaagttgagtggaagatgctgggagatctaggggaaaatctggattcgaaaaggaaacccattaccagcggtctgagggaagccggaagtattccttattatggcgcttctggaattgtcgattatgttaaagattacatttttgatggtgattttttactgatttctgaagatggcgcaaatttgttagcccgcaatacgcctatagcatttagtatcagtggtaagtcttgggtaaacaatcatgcacatgtgattaaattcgattcctatgcagaacgaaggtacgtggagtactatctgaatagcattgatttagccccctatatttccggagcagcgcaaccaaaactaaataagaaaaatttagagagcatacgtattccaaatccttcacctgaagataaagagcgaatagtttctattctggacaaatttgatgcgctaacaaactccatcaacgaaggccttcctcgtgaaatcgagctacgtcaaaagcagtacgagtactatcgtgacttgctgttcagcttcccgagaccagaaaccgccagcaactga

SEQ ID NO: 119103 - DNA, 1557 bp, Enterobacter cloacae
atgacaagccttcagcagcgtgccgagctacaccgtcaaatctgggccattgccaatgatgtcagaggctccgtagacggatgggattttaaacagtatgtactcggtgcacttttctatcgcttcatcagtgagaatttttccagctacatggaagcaggggatgagagcatacattatgcagcacttgatgacagcatcattaccgatgacatcaaagatgatgccatcaggactaaaggctatttcatctacccgagccagctgttctgcaacgttgcagctaaagctaacaccaacgacaggctgaatgctgatttaaacagtatcttcgtcgctattgaaagctctgcctacggctatccgtctgaggccgacatcaaaggtctctttgccgatttcgatacgaccagcaatcgactggggaacaccgtcaaagacaaaaacacccgtcttgccgccgttctcaaaggcgttgaggggctaaaactggggaattttaacgagcaccagattgacctgtttggtgatgcctacgagttcctgatttctaactatgcggcaaatgccggtaagtctggcggggagttcttcacacctcagcacgtctctaagctgattgctcagcttgcgatgcacggtcagactcacgtcaacaaaatctatgaccctgcagctggctccggttcactgctgcttcaggcgaaaaaacactttgataaccatatcattgaagaaggtttttatggtcaggagataaatcatacaacctttaacctggcgcgtatgaacatgttcctacataacatcaactacgacaaatttgatatcagactggggaataccctgactgagcctcactttgtcgatgaaaaaccgtttgatgcgattgtctctaacccgccgtactcggttaagtggattggcagtgacgacccgaccctgattaacgatgagcgctttgctccggctggcgtactggccccgaaatcaaaagcggactttgcatttgtcctacatgcgctgaactacctgtctgctaaagggcgtgcagcaatagtttgcttccccggtattttctaccgtggcggtgcagagcagaaaatccgccagtacctggtcgacaataactatgttgaaacggtgatttctctggcaccgaatctgttcttcggcaccaccattgccgttaacattctggtgatgtcaaagcacaaaacagatacccgcgttcagtttattgatgccagcgggttgtttaagaaagaaaccaataacaatatcctgactgatggtcatatcgaaaagattatgcaggtctttgccagcaaagcagatattgaccacctcgcgaaaacaatcccttatgaaacagtatccgccaatgactataacctgtcagtcagcagctacgtcgaagccatggatacccgcgaaattgtagatattgcagtgctgaatgccgagctaaaaactaccgtcagcaaaatcgatcagttgcgcaaagacattgatacgattgtggcccaaattgaagacaatgaggcacgggcatga

SEQ ID NO: 119104 - DNA, 1866 bp, Enterobacter cloacae
atggctggccagtatgaaaaagcaataacgataaaacaagcgatagattcaattaatttacgccactatcttctgcctgcaattcagaggaagttcgtctggaacagcagtcaaatatgtttgctgtttgattccatcatgcgagactacccgataaactctttcatgatgtgggatatccgtagtgccagtattaaaaatgattacaaattctatgaattcctgaaagaatactgtcagcgatttaatgaagaaaacccctgcgtagcaacaaatgctggatttcatgatttcaaggcggtgattgatggtcagcagcgtctcacatcattatatattggattgtgtggaacgtatgcgtataaacagccccgggtgtggtggccttcggcacaggatgatcgcatcctgccgccaagaaagctttacgtcgatttaacagcgccacttaattcagacgatgagctcatgatgaagtataacttcaggttcctgaccgacaagcaatacactgattcacttacagacaacaaacatcactggttctgcctgcacgaaatattcaaatacgagcagtatgattccccggatgatattttatttaacgttgtcgtaccagaacttgaaaaaagaggactcatttccagtgagttttccagaaaaactctgcttaaactttataccaagataagaactgagaatcttatccactacttcaatgagagcagtcaggacattgatcatgtgctggatgttttcatccgcacgaacagcggggggacaaaacttgagttctccgacttactgatgtcaatagcggtagcgcactggcagggtgatttcagaagagaactggatgaactgacaaaaaacatttatcagaataatgaaatggggttttatattgaaagagactggttcttaaaaaccagcctgatgcttattgactctgacgtccggttcaaagtaaaaaacttcacttcagaggaggtcggtaagatacaacagcaatggtctgaaataaaatcctgtatcaaggagacctttattcttatcaggcgattcggcatcaatccacagtctttgatatctaaaaatgcagtcattcctgtggtctactggctttacaaaaagcaaaccagtggacatccattatatacaacgattaatctcctgaataagaaccacaatgaacgctcagtaattagccagtggttttacatggtacttctgaaagggatctttggaagccaggccgatgcgctactcacgagcatcagagatgtaatgaaaaatagtctttcagatattcattttcctcttgagaagattattgacagatataaaggctcgaataaggacctcagatttgacgacgaatacatcgaaagccttctcaatatcagatatggcgaaggtcgttgccgcgcactattgcatcttctgttccctgaaatgaatccgaccgaggtgtttcatattgatcaccttcacccaagaaatcatttttcaaagaaatatcttgaaaaattagattatgttgcgaactcaccagagaacctcagcttttatgaaaatccagaatactgggacaccataccgaatcttcatttactgaatcactctcagaatataagtaaacaggatacttccctgaaacaatggctatctcagccatcaaacaactattcgccatcaatgctgttagtttcagatgaaaatattgagttcattcgcttcccggaattctacaatgagcgaagaaacgccctgaagcaaagactactgaatcgggtatttcttacaacaaaaatagattcatcaccatccacaatggatacggatgaagaaattctcaccgactga

SEQ ID NO: 119105 - DNA, 312 bp, Enterobacter cloacae
atgattatcgataaagaatacgcacttgtagatgcaacagcaagacttaacactgacctgagggattatgaacatgaaataaacaacgccgccattataacatttggcaatgacctcattgaggtaatcgtatatcagttcagctttatcatcagcatcagggcagagggtgaaaaaataaagcacggcctacttgttaacttcggtaaaaatatagcaagacaggtttcatcactttgtgcatccgcaatgcgagtctacccgaatgaaaaacacaaaccgagccgtcagcttttccattgcataaattag

SEQ ID NO: 119106 - DNA, 714 bp, Enterobacter cloacae
atgacgctgataacacaagaaaacgaacatgacagactggcaacccgcctttccatcatcctgagccgtttgtttcagggtgaaaagctgcatatcgggacgctggcagaggaatttggagtgacgacgcgaacgctgcgacgggattttaacgtccgcctcacctatcttgatattgaacagaacaacggcgtatatcagctcgcttcgcattactttcgtcgccgcacggaacgggatatgaagatactggcgagactgctgcatcttgaccgtctgttacccgcgatggatgccaaactgctgagccttctgcttgacggggagcacccttcaccctacaggattatgctaccggagccgcaccagaaacccacgctctttggtgatttcagcagactgacgctcgccatacttaaccagacccaggtgcgtatcagaaccgacgaaaacgtcagccataccgttcatccctaccgtctgctttgcagccatgcggagtggtttcttgccggatgtacgtcatcgggcgtgttcgttatttccctgtcccgaatcaggctggttgaggtattaccggatacaacgtttgagatcgataacacactcatttcgctgattgaacagtctgactttatggaagccttaccccacatgaacattattcatcagataatgcattacgggagaaaacagacgaataatcgtaattaa

SEQ ID NO: 119107 - DNA, 750 bp, Enterobacter cloacae
atggctacctaccgacacgaccctgaccttgagtttctgcgccactgtcatcgtgacgatctggatttactggtttctgtgcttatctgcgatccgaaagacggactggcacgcatcacggaaacgctgacctacgatcctcagtataaaaaacacaaacccaaccacccgcgctactgggatgccattgccgccgaggttcagacgtttggggcaaacagctttgccacgctgctccgctggggtaaaggggtgctgtaccgggaaattcttaccgatgcctgcgataaaatgaaggtgaactacaacagcaaatccagtgttgaaaccattgaaatgaatctgctgatgaagatcctggagaaaagccttgagaagatgacacccgctcagctaaagaccgtggcggaagaattgcagacaggctacagcaatcccacgccggagctgctgaccatggcaatccaggcggggattaaaacatccgggtttgcggcctatcagatggcacttgttgtcacaaatggtgtggcgaaagccctgttaggcagagggctgaccgttgcaggaaatgccatgctgacgcgtaccatgggcgcttttgccggtcccgtgggctgggtgctcagttctctctggctgctgattgatttagccggtcccgcataccgggtgacgctaccatcctgcatttttattgcctacatgcgccagaagcatctttattcacctgagaatactgacgtttag

SEQ ID NO: 119108 - DNA, 384 bp, Enterobacter cloacae
atgaaaattttaaaactgttaaccgccacaattctgctttcagccttcagccacagcgcgttcgccgacgagcaggctgacgctcagatgataaccaactcgaccttctgcgcgatgtactccacccgcctgacccagaccagtgacagcggccttcaggtaaaaggcgttaatctcaatgcccgcttcaacggctcggtattcaacaaggtacttcaggtgatgaacaaaacctatggcagaacctggctcgaatcaaatgcccgtaacggcagcatgaccgccatgcagctttcgcagtcggagctgctctataaccccgagtatgcccggcagtgcgatgcctttgcggataaagtggaaaaggaatggcgcggaaagtaa

SEQ ID NO: 119109 - DNA, 240 bp, Enterobacter cloacae
atggcgcgtatggcaacgatgaatgttaatcgtcgcaggcaacacactaccggacagggagaacggcttatccggctgaccatggccctgttttacggtcagacaatatctgttcgctacatcatccggcagtttgacgtgtctccccgtacagcaagacgggacctcacccatctggcctttgtgctggaatccgctggccctcacctctggcgactctctccctctcttaaaccctga

SEQ ID NO: 119110 - DNA, 465 bp, Enterobacter cloacae
atgtaccggcttctgctgctgaacttcgtggattcatttatcgataactgcattctgtcctgcgtcgatgaaccggcttacggcggtatcgtgcagtgcgaactgctttttggccttgccgcacacagcggtatctatgtgggtaatggcaacattgttcatcttgacggtgacggcatcgttatcagaagtcaggccagcgagtttcttgaccggctcgatggctggaactccgctatctcggtgtataccgactgtatggatttaactccacagggctgtacgcaggccgctgaacgggcaaaggcggcagtgggtcagcgctatacctacagcctgctggattttaactgccaccggtttactgcccgctgcgttaccggcaattcatgccctgatatctggcttgccagacacctcgatagatttcagaaaggggaccgatggcgcgtatggcaacgatga

SEQ ID NO: 119111 - DNA, 429 bp, Enterobacter cloacae
atgtcatcacccgcaatattgcagggcggctatgtgctgcctgtctcccggtcattcacccaaatgcttctggatatcgtcgcgcaaaaaccgcctcatcgtcaccccatcaccggattaaccattaactttcgtgaccctgaatactcaccggaaacgggcggctggcatccggtcgaaatacgcctcacctctgccggagaagactggcagctcgattacgtcaccgactttcactatgcagggtatccgtggcctgaacttgaaaaagatgtcgatgtgagctggacgcatcaatacacgtggctttcccgctgtggcgatatctctcatatcgacgcccgtgagttctggtcgctatgggaaagtaactttatggcttaccacgatatgggggttttcacggtccgtacgttgtgggaaagctga

SEQ ID NO: 119112 - DNA, 432 bp, Enterobacter cloacae
atgagtaagaaaaaagtcgctaccgaagccgccgtcaccgaaagctataccgtgttctacgggggtgaagccgagaaaatcagtccatacagtaagggactgctgacgtatgagctgggtaaggaggatgaaaccggaagccttgccctgcgtttaaccgccaatggcgaagggggcctgttctcccgtgaatggatagcgcttgatgcgattcacgccattctggaacagcagccagacagctttccgtcccgtgtatttcgcccactgtttggtcagggcagcaccaataacgcagggtttcttgccgctgtgctcagaagtccggatatctgccttatcgaagcggacagcagcagactctttatgcaccgttgttatgccgactggcaacatcgtatgacgcagcttgctgcgctcagtcaggactaa

SEQ ID NO: 119113 - DNA, 354 bp, Enterobacter cloacae
atgttcaagctcacgacacccaccagtcttccccttctcaacctgcccgcctccgcactggcggccctcagcaatgaaattcttggccccgtagatgatatcgacctgtttactgctttctggaacgaaacaagaaccctgctctggcatctcaaccacgacgacactctccccgaagacccgctgctggcagtggcactggctaacccggaatacgtcaccgcacttgatgatggctggtatctcctgctcggtatcgtctgcgataacggacagggtatctatctggtgttcccggacacgaccgttatcactcaactccagaacctgattgaggcgctgaaccatgagtaa

SEQ ID NO: 119114 - DNA, 1437 bp, Enterobacter cloacae
atgggcttgaaagtgatgccacgaataaataagcttatcccattgttggccgacatattaaattactcattatcatctgaattttcagaggaccatgtacatattatgaatgttaattaccctttaaataaaataacgcaagtgctggatgaaaagagcatcacagctgctcataaaaattccttcaatgtagatgtggaagctcaggggtattccgactctggagtatctgatgttgtagaatatccaggggttgcacctaaaaatactggaggtgtttttactaaagccctttttgatgaatataaaatccgtgcagtacaagctgcacaaacaatcgagaccagcgataagaagttaaccggacttaaggcaatattctatccatcaggtcgcattaaatttattgtccgcaaaagtattcgcggaaagaatatctacgttgccgtaggaggctacccggaaatttcaattaaagatgcaagggagcatgcctttaaaataattcaggagctcaagaccgccgttgaggcttacggtgagcgttttcttactcacagtaaaatgacgtttaatgagcttgtggatgagtatgagaaaagcgtactcagcacgggcgttaagcgttcagctaacaccgacctttctaagatccgtaaatacctgcgccctcttctcggtgacaaaaagctggcaggtatgacggaggcggatattctgagctatctgtatgctctcgatctcaagccagccacccgcaaccgccatctggcgctcattaaagcggtgtttacctgggctatacgcatgggatacaccaaccgctctccggcgctttatatcaaagcgctgcctgaagtgacgtcagatcgccgcgccatggatgattcccagcttcagtgctggatggaagtgtgtgagtgctggcgtaatggtaaacccgatcatgaagcccttgctctgctcatgttccttgccctgacgggactgcgtctgggggaaacccgtcatcttcgccttgaggatgtggactggagccgcaaagttatcactcttcgccacaccaaaaacggcaaactccgccgtgtaccggtatgtgataaggcgttcgttcttctgacagaacagcgtcagcatctgggtgatgaaggctgggtatttccgggcaaggggaccgacaatccggttgctgagccgcgtcgcctgcaaaaacgactttgtgaggctgcgggtattccaccgttcaccatccatgagatgcgtcatacctttgcgacaaagctcattgagagcggggccgacattcacaccgtcaaagacttactgggccacagcacgatcaaagtaacgtcactttacttgcactcatcaccggcgcgttaccacgaagccgttaaccgggcgatggcagatttgaaccttgtaaacatgacttaa

SEQ ID NO: 119115 - DNA, 1923 bp, Enterobacter cloacae
atgacaattgaaactaaaacattatcaacgctaccacctgcgctttcaccactcgcgaaaattatgtcaaatatgcatcgtgaaaaaactgacaggtcagatgtcaagaagctgctgagaaaagcttcacaacataaagatatcgatctttccgttatcaacgaaatggtattccgtgagggattgccggagggttatggagccagtgcagaagcgctttattcactctcaggtaaggccccggtaccgtttacatttacacctgtatttccttatgcgaaatgcttttctgctgatagtcagtctgatatgcagttgttgcttgttgcaaggaatcaggctggaaagattatttctattcgtatcaaaatggatgaactgtatgccgatattgatcgggtaatggcctctctcgctcacagaggcgttgcgattgatcctgttcgtaaaaatgaactgattagattcattctcaagtgcatggatatgaagttaccgtgttatctggtgacgccatctatggggatgatcgataagaaagccgcttttttgcacggaaaaacccctattttctgtgaccttgacggatttgaaaatattatcccggcttctgtaaagcgtatccccgaagggattaaggaatacggtgagctagatcagtggcaggaacttattgctgaacatgcaaaaggtgattatcaaatttttgccatcatgctctctcttgcatcccctttgcttgggcttgccgggcaggatattgctatattccatttctatggtctttccacgacaggaaaaacaatcctgctgcaactgagtgcatcgtgtcacgggtatggaggagatgccggaagtaacggcccgtcgctcattgcccggtggaatgccacgagcaacggtatcgagagtcatgctgctttacaatccggtaccgtggtatgtcttgatgaattaggagcattttctggaaaagagctttcctccctgatctataacctgacatccggtgtctcaaaaattcgtatggataaaacgcaggagatgcgcgaaccgttaaggtggaactcgttctttgtgtcttccggcgagatatcattttcccataagctgcgagaaaaaaaacaaaacctgcagggcggtcatgagcatcgggttatcaatctccagattttcccgaaagatgccggagcccctggagaggggccggaaattattcgtcagcatgctgacaaacttaagtcgggacttgagcacttctgtgggacggctggacccgcttttctccgtagtctgctttctcagactgatgaagaggggcttcccgtgagttatcaatggttacatgaatccgttaaagctaaggtatcagaatgtgaaggcctgcttctggctgagctgattgatgaagggtatctcctgacggatgttcaactccgtgcgcttcgacgcttttctttcgtaatggctgtaggtctgctggcgcaggaactgggtatcttgccttactctccggaacgaattgcgaccgccgtctgggaaatagttgttcgttggctgagtgatacctctgtgcaatataacccggtccagcaagcattgattgatattcagcgtgatcttgtaaaaagggaaggggcacatttcatcggcctgaaagatcgtgagagccgtaaacccggaaaccactgggggtatatccaccatactaatgaggattttttaatcttcgcacctgtatttgaagagtggtgccagaaacattcattaagcgctcgagaagtcgctaaggagctggcatgccgaaaacttcttcgggtagaaagtaaagggcattacaaaaagcgtcctcttactggtatggataagtgttactaccatattaagcgggagtttatcagtgttgatttgaatttttcttaa

SEQ ID NO: 119116 - DNA, 351 bp, Enterobacter cloacae
atgactgaattctgcgaattaaatgagactcacttttttcctggcgctattacaggctgtgaaactattcgtccaccatttacgctttatggtcttatcatgacgcaggctaaatgcaatttctatggtatctgtagggaagtgacagacagtgagtatcctgaattaaaagcaatgattaaccggaatgaaaagattcgtttctttgccagttatattttcaaaggtaacgttcgttatgattatcttggcgaattaccaacactatcaatcgatcaggctcgcaataaagcccgatatcttgccagaagtaatgaggatgagaccgcttatgaatacatcccattctga

SEQ ID NO: 119117 - DNA, 1188 bp, Enterobacter cloacae
atgtccagcccgaaacgcttccgttttactaatcagctcattaaatccctgccccctaacacatcagattcacacagcaccgatgccgaatacagcgataccgagatttctggcctgaagtgtctggtcagcaaagcggaaggacgtaaaaaatttttgctccgctacctctatcatggacgaaaacgcgccatagctattggtcactggcctgaggtagatgtcaccttagcccgtaagatttccatggagcataaacgctcacttgccaccggaactgaccctaagcaggaacgtgaaaacaagagacaagaaatgacattcgatgaactctttaaccagcattatctggtatgggcaaaatctgcaaaacgtagctggggaaaggatttccagcgctaccgggatcatatccgtcccgtcttaggtctaatgctactgagtgatatcacaccagccaggattcttcgcctccagcagacgttaagcatttcactgtcagcagcaacctgtaatcgtgtcatcgtactggttaaagcggtatttacctgggcaggaaggcgaggcattacctctatccatccggcaagagtggtacagcttctcagggagaacaacgcccgacagcgctatttcaccgaggatgaaattcgtcgtatttttctctccgccgatgatgataccagcaccgtcgctgcatgctatgtcaaactgctgttactgaccggccttcgtcgtgatgagctgcgtctggctaagtgggagcatgttgacccggttaaacgcaccctgtggctccctgaaaccaagaatggctatggacggattgttcatcttaactcactggcgatggacgtaatcagaacgctgccaacacagcgtggaaatccgtggttgtttatcggtaaaaaacaaggaatgccgctgaacaatccggtcaaagcctttcagcgtatcgtgcgacgggcgggaattttcgacaaagaagtgtgtattcatacctgccgccattcggttgcggcgctcatcgtttcccatggtggaacgctgtatgacgttcaggcgcagttaggtcatcgcagtagtcagtcatcacagcgttatgcgcaccttcatcctcagcgcttacaaaacaccagccaacttctggcggaaaggataacagctcagctaccttctttgcgataa

SEQ ID NO: 119118 - DNA, 1419 bp, Enterobacter cloacae
atgaagtttttctccactggtttctatgtttcaaatgatgtttcgtttgacgatatattcaatgagtgtttttcttggattcatgagtcaccacacacgaaatttatacctgcacaattaacgtgtgactatcttagtgaagatttttatgtagagtcaagtaatgaaaggattgatgtaattactcatggcaaccaagatgttcagttaggttgcttcagatattcaaaaatttccgaaccacacaaatgggtgactgatatatctgtaaataagaacttaataaataatacggtatggatccaagttgaatcaagtgtggttagtcaggaggctgcatatttagcacctcaacctaaaaaacctttgatagtaattaggttgatagataaattttctggtggtttggatgatgccttcaaaacatcaatagaacctgattacctttcgaattctgaagagcatttaaagttggcggcaaaagttatcaatggagaaactgaaaacaggctgccaataatctatgtcagttcgaaatatttttacaatgaacatcctcataacattattcctgagcgattagcaagaaaggtgtgtggcatagctcatgttctaattgaaccacgtgagaaaatgttttcaataaaactaaaaaatgagacaaattctaaaaatgcttacgcaggtgcagtcggaatttactggccgcgaggacaaaatatctccttttaccgtcggggtgagaaaacagcgaaggagtttgaagatgaattatttgattatgtcgtaaaagctacatctacaatggctcccgtctctgaggggggatggagtgaaatacaaaaaagaagaactaaggattctattaatactcttaagattagaggtgaatacacaagtgaattgatgggtttgtatgaggccgataatgttgcaaaagatgaaacaatagaagaactcaaaagtaatatattatctttagaatatcgtgttcgaatgcttcaatcacaagcttcagctcaaggaagtatagtaatgaatgcaggggaagaaactgactttttcaatggtgagatcaaagatgtaataatagaagctctgaaggttgctattgtgaatacgaaagagggcagtcgaagtaatcatatattatcttctttaatttccaacaaccctcaaaccatggaagcaaattcgcgtcaaactcatttgaaaagagcacttaatggctacaggagtatggataaggcaacgtcaaggcagcttaaggaacttgggtttgagttgtctgaggaaggtaaacattggaagatagtatataatggtgattccagatactcttacattcttcctaaaacagggagcgactatagaggatctttgaatgctatttctgatataagtaatattattttctaa

SEQ ID NO: 119119 - DNA, 159 bp, Enterobacter cloacae
atggggctgagtcattttttaatgacgtggaaagcgggggattttgctgatgcgaagaatcataaggtgaaaaacaggaatattacaggtggagtagatggtggaaacacccgactgacaaggggagttgataacgctgagttcttcccccttgcctga

SEQ ID NO: 119120 - DNA, 477 bp, Enterobacter cloacae
gtgaaccattttagctccgtgacaatcacattgatgaaaaatataagttacaaaaaacgtaaggcggacatgatgacggcaggatggcaaggcacgattgcgcttttattactcattattatttcgtacgtcgatcgggtaaatatctcggtaatgattttaaacccggaatttgccgaacattttcagttaaatgaaaacagaatgttacagggtctactcatgacctgctttcttctgggttatggtttttccgctctattattaacgccggttattgaaagcaaacttcattatcggcagggattattaagcagcattgcgctttgggccgcggtctgcgcggtttcgcctttgttaggctcgctgacgggaatggtcatcgcccgcgaaataaccggggtttgtccacaccacaccctggcctggggaatgttgctgctgcgcatgcggcgcgcagcagcaatcagcgcgtaa

SEQ ID NO: 119121 - DNA, 231 bp, Enterobacter cloacae
atgacgacgaccgtacaacactatctggataaaggcctgcgcggcctctggtatccggtgctggcgagctgggaagtgcagtctgctcctgtgggcatcacccgcctgggcgagcagattgtggtctggcgcaacaaagacggccaggtgcaggcgctggaggaccgctgtccgcaccgcggcgcgcgcctgtcgatgggctggaacctcggcgaccgcatcgcctgctga

SEQ ID NO: 119122 - DNA, 927 bp, Enterobacter cloacae
atgagtataaccggaattgaaaagctggaatttggtgtggaagacctgacgcactgcgccaaatttatgcgtgattttggcctgacgggcgatgccagcggccagcgtttcaccaccctgagcggcgcgcgcgtggagcttaacccgatcgacagccccgacctgccgcccgcgtttgaagcgggcaacaccctgcgccgcatgacctgggcggttgccagccagtctgagctggatgcgctgcgcccgaagctggcgcaacagccaggttttcgtgaagtgggcgacgcgctggaatgcctggatccgaacggcatgacgctgcgcgtgcaggtgacccagcagaccgacgtggagcttaacgtcgagccaataaaccagtggggcgacgcccgccgtatcgacacgcccagcccggtttacgatcgcgcccagccgatcaacgtggggcatgtggtgttcttcgtggaagagctggcggcagtggagaaattctaccgcgaggtgctcggcttccaggtctcggatcgctatatcaaccgcgccgtgttcctgcgctgcggggcgcgtggcggccatcacaacctgttcttgctgcaactgccgaaccgcaagcgcggcctcaaccatgtggccttcaccgtgcgcgacatccacgaggtgatcggcggcggtatcgcgatgaataaacatgactggagcacttttatcgggccgggccgtcatccggtgtcgtcggcgtacttctggtacgtcaacagcccgaccggcggcgcgtttgagtattacaccaacgacgactacctgaccgaaaactggcagccgcgtgagctggagcactccctggtctcctttaccgaatgggcggtggagggcgggattgaccacgacacgcgccgtcagcagaaaaagccggaggcggtatga

SEQ ID NO: 119123 - DNA, 1188 bp, Enterobacter cloacae
atgacatcgcgcattgtcattatcggcggcggccaggcgggcggctgggcggcgaaaaccctgcgtgacgagggcttcgacggcgagatttgcgtggtggcggaagaggaatgggatttctacgagcggccgccgctgtcaaaagcgtctctgctggagccggacgcggcgctcccgcggctgtttagcgaagaagcgcagcaggcgctgaacctgatctggtaccgcccgctgcgtgctgaatcagtcgatcgtgaagagaaaatcgtgcgtttaagcaacggcgaacgtcttagttacaacatccttttaatcgctaccggcgggcgggcgcgcctgccttcgcaggcgtgggccagccatccgcaggtttataccctgcgccactggcaggacgcgcagcgcctgaaggcgcgtctggcggaaagtcacaaactggcgattatcggcggcggctggattggccttgagattgccgcttccgcgcggaaaagcggcgtggcggtcaccctgttcgagcagcagcctgcggtgtgcatgcgctcggtgagcagcgaggtgtcccagcgcctggaggccatccaccgcgagcagggggtggagatccgtaccggctgcggcgtgctggagctggaggacgataatggcctgccggtcatccactgcgacggcaaccgtgaaacctttgatacggtcgtggtcgggatcggcgtcgatctcaatctggagctggcgcttgatgcggggctgaaaaccgggcgcgggatcgtggtggatgcccagggacgcacctcggatccattcatctttgccgctggcgatgtggcccagcaccatcactacggcctgtgcatccagtcctgggccttcgcccagaatcaggcagtggcgacggcgaaagcgatgctcaaccccgatgcgccaggttatgacgacgcgccgtggctgtggtcggatcaatatcagcacaatattcagatcctcggtattccgcagccggagagtaaaacgatagtgcgtgaagatgcgctgttcttctcgctggatgaaaacgggcggctgacgcagctggtggcgttcaacgatgcgcgcaccgtcaagctggcgaagcgctggatggcggcggggcgggatctgtcgaacgtaccgcttgccgactcgacattttcactgatgtcactgcgatag

SEQ ID NO: 119124 - DNA, 795 bp, Enterobacter cloacae
atgaatgcacaaattgacgggcgcgtagcggtagtcaccggcggttcttctggcattggctttgaaacgctgcgcctgctgctgggtgaaggggcgaaagtcgccttctgcggccgtgacccggatcggctcgccagcgcccatgcgacgctgcaaaacgaattcccccacggggagattttttcttaccgctgcgacgtgctgaacgccgacgaggttcaggcctttgcggatgcggtgcaggcgcgctttggcgcggcggacctgctgatcaacaacgccgggcagggctacgtggcgcacttccatgacaccccgcgcgaggcgtggctgcacgaggcagagctgaagctgtttggcgtcatcaatccggtgcaggggtttcagccgctgctggagcagtcagacattgcctctattacctgcgtcaactccctgctggcgctacagccggaggagcacatgatcgccacctctgccgctcgtgccgcgctgctgaacatgacgctgacgctctcgaaagagctggtgggtaaaggcattcgcgtcaattccattttgctcggcatggtggagtccgggcagtggctgcgccgctttgaaaatcgggcggacaaaagccagagctggccggagtggacggcggatatcgcgcgcaagcgcggcattccaatggcgcgcctcggcaggccgcaggagcccgcgcaggcgctgctgttcctcgcctcgccgctggcctcgtttaccaccggcgccgcgctggacgtttccggcggcttctgtcgccatctgtaa

SEQ ID NO: 119125 - DNA, 444 bp, Enterobacter cloacae
atgcggttaattgattatttccctgaatcctcaatatcaataaaatccgcagcaaaggactggcaggaagccattgatttttccatgtcgtctttgctgcaaaatcattgtattaacgctgattatattgaggcaattaaaacctcgacgctcactaatggtccttattacattctcgctccgggtgtagcgatgcctcatgcccgtccggagtgcggtgccttaaaaacaggtatgtcattaacgcttcttaaacaggaagtgcaatttgccgacgacgatgagcccgtaaaattactcattggtttatctgcggcggatgcggattcacatatcgacgctatccaggcattaagcgaattattatgtgaagaagatatgctgtcagcgttgttaaccgctaagtcagaaaagcaactggcggatattatcgctcgcgcataa

SEQ ID NO: 119126 - DNA, 1380 bp, Enterobacter cloacae
atggaacacaagtctgctcgtgcaaaggtccaggcttttgggggctttttgactgcaatggtcatcccgaatattggcgcttttattgcctggggatttattaccgcattatttataccaaccggatggatgccaaatgagcatttcgccaaaattgtcggaccgatgatcacctatttactgccggtgatgattggctctaccggtggacacctggttggcggcaaacgtggggcggtgatgggggggatcggcactatcggcgtgatcatcggcgcggatattcctatgttcctcggctcaatgatcatggggccactcggcggcctggtgattaagcatatcgaccgaatgctggataaacgcattccagcgggttttgagatggtcatcaacaacttctcgctgggtattgcgggcatgatcctctgcctgctggggtttgaagtcatcggtcctgcggtgtcgattgccaataactttattaaagagtgtattgaatcactggtacatgcaggctacttgccgctgctgtcgttgattaacgaaccggcaaaaatcctgtttttaaataacgctatcgatcagggggtttattatccgctggggatgcagcaggcttccgagacgggtaaatccatcttctttatggtggcctccaaccccgggccgggtttaggcctgctgctggcttttgcttttttcggcaaaggaatggcgaaaaagtcagcccccggcgcgatgatcattcacttcctgggcggcattcatgagctctatttcccttacgtactgatgaaaccactgacgctgattgcgatgattgctggcggcatgagcgggacgtgggtatttaacctgttaggcggtggactggtggctggcccaagtccgggttcgattttcgcctacctcgcgttaacgcttaaaggcgcattcctcgccacgattgctggcgtaacggcaggcacgctggtcacctttgcggtcgcctcttttatcctgaagatggataaaaatagcgaagctgaaacggaagatactttcaatgattctgccaacgccgtaaaagccatgaagcaggaaggcaaattttcttaccaggatgttaagcatatcgcttttgtctgcgatgccggaatgggctccagcgctatgggcgcgacgacattccggaagcgcctggaaaaagccggacaaaatatcgaagtaaaacattatgccatcgaaaatgtgcctgacgacgcggacattattgttacccatgccagcctggaggggcgcgctaaacgggtcagtgacaaaccgttagtgttgataaaaaactatctcggcgatccgaatcttgacgaattatttaagcatctaacggcgaattaa

SEQ ID NO: 119127 - DNA, 1278 bp, Enterobacter cloacae
atgaaaacgaaagtggctgccatttatggcaagcaggatgttcgtatccgcgaatttgaactgcccgaaataagcgacaatgaactgctggtgagcgtaatttccgacagcgtttgtttatccacctggaaggcagccaaattaggcagtgaacataaacgtgtgccggacgatctggaaaatcatccggtcattaccggacatgaatgcgccggggtgattgttgaggtcggaaaaaaccttgccgggaaatataaaaaaggtcagcgctttgttttacaaccggcaatgggattgccaagcggttattccgctggatacagctatgaatattttggcggcaatgcgacgtatatgattattccagaggtcgcgattaatctgggctgcgttttaccttatcacggctcctattttgcggcggcttcgctggcggaacccatgtgctgcattatcggcgcgtataacgccaattatcatacgacgcaatatgtctatgagcaccggatgggtgtgaaaccgggaggtaatattgcgcttctggcctgcgccgggccgatgggaattggcgctattgattatgcgattaacggcgggattcagccgtcgcgcgttgtggtggtagatattgatgaggcccgcctcgcgcaggcgaaaaaactcctgccggttgagctggcggcacaaaagagtattgagcttatctatgtcaatacctctgaactggagaacccggccgctacgttacgcgcattaactgacaatgtcggctttgacgacgtgtttgtctatgccgcggttccggcggtcattgaactggcagacgatcttctcgccgaggacgggtgcctgaatttcttcgccggaccaacggacagcaatttcaaggtgccgtttaatttttacaacgtccattacaacagtacccacgtggtgggcacctccggcggctcgacggaggacatgaaagaggcgattgcgctgagtgcgacgggccagcttcagccgtcgtttatggtgacccacatcggcggccttgatgcggtgccgcatacggtactcaacctgccggacattcctggaggcaagaagcttatctataacggtgtcaccatgccgttaacggccattgccgattttgccgaaaagggtaaaaccgatccgcttttccgggagctggcaaggcttgtggaagagactcacggcatctggaatgaaaaagcagagcgccatttgctggcgaagtttggggtggatattggggaggcggcagcatga

SEQ ID NO: 119128 - DNA, 972 bp, Enterobacter cloacae
atgatgtctctggcatggccgctctttcgcgttacggaacaggcggcgctggccgcctggccgcaaaccggatgcggcgataaaaaccgaatcgacgggctggcggtaaccgccatgcgcgaggcgctaaacgcgatagcgattcgcgggcgtatcgtcatcggcgaaggtgagattgaccatgcgccaatgctgtggattggtgaggaggttggaagcggtgtcggcccggcggtagatattgccgtcgaccccatagagggcacccgcatggtggcgatggggcaaagcaatgctctggcagtgatggcgtttgcgcctgagggcagcctgtttcatgcccctgatatgtacatgaaaaaactggtggttaacgcagtggccgccggggcaatcagcctcgatctcccgctggcagaaaaccttcgcaacgttgcccgggcgctgggcaagccgctggagcatctgcggatggtgacgctggacaaaccgcgcctgcaaaatgcaattgccgaggcgacgcagctgggcgtgaaagtgtttgcgttgcccgatggcgatgtcgctgccagcgtactgacctgcttacaggataatccttatgatctgatgtacaccacaggcggcgcgccggaaggggtgatctccgcctgcgcggtgaaagcgctgggcggcgatatgcaggcggaactgatcgatttctgtgaagcgaaaggggagagtcctgagaaccgtcgggtcgccatgcaggagcaccgccgctgtgcggagatgaaagtggaagtcaatcgtatctatacccttagcgaactggtaaagggcaatgacatcctgttcagcgcgacgggcgtgacgggcggcgaactggttaaaggtattcaacaggttgcgaagggtgtgcgcacgcaaactttactgatcggcggcgcagatcgaacgtgtaatataatagactctctgcattcacggtga

SEQ ID NO: 119129 - DNA, 510 bp, Enterobacter cloacae
atgacgacgctgacagaagacgatgtgcttgagcaactggatgctcagaataacctcctcgcattcatgacgacggcacagtcttttttgctccagggcattaaatgttttctgccgtcgttgtttgtcgataacgatgaagagatcgtggaatatgcagtgaagccgttactcgcccggagtgggccgcttgatgacattgatgtggcgttacgactgatctatgcgctggggaaaatggaaaaatggctctacgccgacattacgcatttttcgcagttttatcagtatctgaaagagcaggatacgatccctggcttcgccgatgacatcacctgggattttatcagcaacgttaattgcatcacccgtaacgcgacgttattcagcgcgctggagtcgatgaaatttgctgactttgccgcatggtctgaggtgcgctttaccgcaatgatcaagacggcgctcaccctggcggtaacgacaattttaaaggaactgacgccgtga

SEQ ID NO: 119130 - DNA, 711 bp, Enterobacter cloacae
gtgaaaattgggctaacggttaacgggctacatgtagaagcacattaccctgatgacgaaatcgaaaatgttcataagcctttgctgcggcaactggcgaaactgcattctgccagcgccagcaaacgtacgattgtttttctcagcgcgccgcccgggacgggcaaatccacgttgaccgccttctgggaattcctctctcgtcagatggaggggatgccgccgatccagacgttgccgatggatggttttcatcactacaacgcgtggcttgaggcccataacctgcgtgcgtacaaaggcgcgcccgagacctttgatgtcgacaggcttgcgcaacatctgcggcagataaaagaaggcgacagtacctggccgcagtatgaccgacaaacgcacgatcctgtcgaagaggctattgtggcaacggcccctgtcgtgattgttgagggtaactggctgctgcttgatgacgaacgatggcgaacgctgatggaatactgcgatttttcattgttcattcgcgcgcccgctgaagcgttacgtacgcgcctggtagggcgtaagctggccgggggactctctcaggccgacgccgacgcgttttatgcgcgcaccgacgggccaaacgtggagcgtgttttgcgtcacagccgttctgccaatgtggaactgatgatgtcggcaaatggcgaataccgactcgtctga

SEQ ID NO: 119131 - DNA, 855 bp, Enterobacter cloacae
atggaacaacttgatgttgtagacagcatcaatcacgcgggtaactggctggtgcgcaaccaggcgctactgctgagctacgctgtgaatattgttgccgctattgccatcatcattgtcgggatgatcgtggcgcgtatcgtatcgaacgcggtcaaccgggtgatggttgcacgacacattgacgccacggtcgccgatttcctctccgcgctggtgcgttacggcatcatcgcctttacgctgattgcggcgctggggcgtgtcggcgtgcagacggcatccgtcatcgctgtgctcggtgctgccggtctggccattggtctggcattacagggttcgctgtcgaacctggcggcgggcgtactgctggtaaccttccgtccgttccgttccggtgaatacgtggatttaggcgggatcgcgggtaccgtgttgcaggtacagattttctctaccactctgcgtactgtcgacggtcgtattgtggtggtaccgaacgggaaaatcattgccggcaatatcattaacttctcccgcgagccggtgcgtcgtaacgagctgatcatcagcgtggcgtacgattccgatatcgatcaggtgaagtctctgattaccaacatcattgcttcagatgaccgtattctgaaggaccgcgagcagaccgttcgtctgaatgaactgggcgcatcatccattaattttgtggtgcgcatctggagcaaaagcagcgatctgcaaaacgtatactgggatgtgctggagcgcattaagcgtgacttcgatgctaacggcatcagcttcccgtacccgcagatggacgtaaacgtcaaaaaagtcaaagaagcagagtaa

SEQ ID NO: 119132 - DNA, 360 bp, Enterobacter cloacae
atgattaagcgacaacgcaacgctatcctgcttgtagccctggcctgtctggtggtgctgatatgtaccgcccagcggatggccgggatgcacgcgcttgtcatgaacgtcaccgccacgagccagtctgtccagcaggggcaggagagtgccgacgcaccggtaaccccgtgtgagctaagcgccaagtcgctgatgtcggtcccgcctgttttgtttgaaggcgccctgattgccgtcaccctgctgcttgcgttgctggcagccagtccaccgcgccgcgaacggcagtggcctccccgcgttatctccccgccccggttaagggtgcatctgcgattatgcgtcttccgtgaatga

SEQ ID NO: 119133 - DNA, 243 bp, Enterobacter cloacae
atgaccaacaagcagttacgtatccgctatggatttcatggaaaacacatggaaaaaaatgttgcctgggatggcaatgatcaggtgaatagtgttttggctgttcttattgaggagttgtctctcccgataggtgagaaaccagtgaatctgattgaacacggtgtagatgatgtatttttctacgatgaagagagtcagaaatggctcgaaatccctcctaaatggctaatcaaggcataa

SEQ ID NO: 119134 - DNA, 309 bp, Enterobacter cloacae
atgggtgagtatcaaatgactaacagttacggattgaaaacgcctgaacaatggcaacaagaaagtattcttgccctgctgtttcattacgaccacgtagaagcctgtttcatggcagatgcaatcaaggtgttaccagaagatcacgacgtgaacagagcggaggagtatttagaaagcctgatagaatggctggctggttatacggacgaaagcgaaatgagaaaggctatcgagtgttacagcgtcaaaggcagcgaagagcaaacagaatttttcttaggtgcaattctcggaggtgagtattga

SEQ ID NO: 119135 - DNA, 198 bp, Enterobacter cloacae
atgaagattatagagatgaacgaacacaccacagctttcagtcctattgagagcgaagaagaattgaaattcgctgtagcatttttgaacatgtggcagagaagccaggagcatggcgtgaactttgaacaggtgttgaaagatgcaattcaacaagcaacaccaagagaggatcgtaaatgggtgagtatcaaatga

SEQ ID NO: 119136 - DNA, 198 bp, Enterobacter cloacae
atgaaacgcttgcttgtgctgacgctgacagtaatgccagtcctggcgaatgccggacagataaccctgattctcagtgacgaacaggagacagacaacgcgaagatttgcgtttattccaacgccaactttacggagacagtgacgatcagaccatcgcagcaatgccgctacacaatgacctttgaagaggagtaa

SEQ ID NO: 119137 - DNA, 561 bp, Enterobacter cloacae
ttgaacagagcagtagtgttagacgaacagcaagctaaagcgatcagggagtggctaaacgctcataacaagagcctgatagctgacgtttcgttaataatgcaagccgccgtattgcgtgtgggggatgccgtcgctttgcgcttcgacgaagtgataaacggagagatagacatagaagaacagaagacagggaagcgtaaagccctcacccttccggctccagtggtgcagatgatcgcacgtcgccgtgctgagtttccgcatgatgtgcatgtgttcaggagccaacgtaaccgctcgatgaacaagcaagcacctgtacgacgcgaggaagtgagtaagcagatcgcagaagccgctaaagctatcgggattcatggcactgtatctgcacacagttttcgaaaggcgggggggaatgcgctttatcggcgttctggaaataacattgccctcgctatgactgtgctcaatcacagcaacattacagacaccaggcgctatctggatttagacaagcaagccgttagccgtgtgatcaatgagatggacttataa

SEQ ID NO: 119138 - DNA, 165 bp, Enterobacter cloacae
atgagcgaaacccaaaagaagaaacaaccacgcacttgtctacatattccagatgaaaccttccagattttattcagagaagcgagaagtcaaagagtgaccgtcacagaatacattctcaacgttctgaataaagaggcagtcaatcttaacaagggcaagtga

SEQ ID NO: 119139 - DNA, 603 bp, Enterobacter cloacae
atgacaaaacacactacgccatttctgatggtggattatgacctactcggattcaattccgtagaagttaacggcgaaacgcacgaagtaaaactccatcacaagattgtatattcctatcttttgagtttatccggcacatttaaacaggtgacaccttcgttaactggtattggtaaacggctcggacttggtacagatcaaactgtacgccgccacattaaagacctcgtgtcttttggttgggtgcaagttgttagtgaaggccgaaaagggatgacgaacatttacattgttctgccatatcaccagaagccacctgtaacagtgtctgacgaagtgccagcccctgagccagtgaagacagtagaaacccacgaagacacaccagcgataacgcctcaaagaatccgtacttctgacgcagtgaaacacctgtttgaaaatttgtcacaacggcgagaggacgagagcttttattcctggtcatcaagagtacttcaacgaatcggaatagatcattcaatgggaatcgagcaactatttcaggaaacacacccgtatgaatacacccagattgaacaatcaacgataccattttaa

SEQ ID NO: 119140 - DNA, 285 bp, Enterobacter cloacae
ttgatacaatacataaaactgaacaatacaaaccagatacagatcaacgatagcgggaagggcgtttattatgcgcttatctggttctggaaaggaaggaaaaccaaaatttcctacggcgagctatctgataaatccggtgtaagtgataacgggatcagattctggcttcgtgcgctgcgcaacattggtgtgattgatatcgacgatgaaagccattatctatcattcacgctgaaacacatcgaacgagacaatgtagaatttatctactctgatttctaa

SEQ ID NO: 119141 - DNA, 384 bp, Enterobacter cloacae
atgggacgaaaagaacgaaatccaattaaacggatagaacaagcaacacgcgccagcaaacgtaaatacacctcttctctacaagacctcgcacgagagtctattccaggagaatggatcaccgaaataatagaataccctgcaacggtgcccgtaggggctgagtttgaactattgcaggatgttttagcatcttcggataacgtttattacaaaccacgccgccgccgtgaataccgtgttgattcatcgaaccttaagaagtggcagctatacgcagaaaactatattgactgggtggggtattcccaaactaacggcttatctcaccacatacaagattttgacattctctttgacgacaaggaaaacaacaatgaataa

SEQ ID NO: 119142 - DNA, 342 bp, Enterobacter cloacae
atgaataataaaactttggacatcgtgaacaacgtgaacaccctaattaactctttccacgatatttggcatttaccagccttgcagcttgttaataaggcgtggcgtgacagaacgccagaggcgcttctggaagctgtgcaatacaatgaacaggcaatcactgcccttgaacatctgcaaacgtctgtagctcgtttggtgcagcgtgactgtagtacgatcacaccagaagaagcctggcgtgtagctaatgaatttgaggagctggcttgctctctgcaatacatcaccgttgaactcggagagctttccatccagatcgcggaagaatgcgcataa

SEQ ID NO: 119143 - DNA, 222 bp, Enterobacter cloacae
atgtttctattaaataacaaatcgcgtgtactcaaatataaaaatgatgttctcaccgtcaatcctcagatgattgagatggtggctcagtatgctggttgttcggttgatgaagtgatcaaagcgatggatacgtattttcctgacgaatcaccaaaacaagaaacaactattcaggatttgattgcacgtaaagtaaataaggaatcaaccaaacaatga

SEQ ID NO: 119144 - DNA, 363 bp, Enterobacter cloacae
atgattattgacctatcagaagtctttccggtacgtaaaagctacacagatattgtgagtgctgcgaccgacaattttgcagcagtagacagtaaagtgtttgcttctcttcctgctgatgtgcagtgcggcgatgtgctcgatatcactggcgctctctatacctctgggaatgtggcttatgtcgtcgtctcagacttcgttaaagctggaagtaataagcctgtgaacgtcctacgcgctcccaacgttggatcatacgttgccctcaagagcgacaatctcaacgcagctaaccacgcagcagcgatcagcgcattacaggcgcaaggcttcgccactcgtgaatttttcacctcttaa

SEQ ID NO: 119145 - DNA, 1032 bp, Enterobacter cloacae
atgattattggaaacgagcgtatcgacctttccccattattccaactaaccagcaccagaaatttcctactcagttctctaaatctctttgatggtgtgggcgtttcttctcataaagttagtgtgtcccgtctgctggaagataacaccagcctgttcaaccagcctacggcgcgtttctcaaacgagcataacaccacgcagcgtcagagcggcaaagaatggctaatcgagcttccgtatttccttcgtgaagatctgatcactccgtcagatattcagggcaagcgtaagccaggaagcgatattcaagaaacagtgacggacatttacagcgattacatgggtaaacacgctgtagcgtttatgcgaacccgtgaaagttacctcgcacgttctctgttctctggtcaggtttatacacctaagacagacgatctgttaatcgactttggcgacctgttcggcgtagccccgatgaatgccactcttgatctgtcagctacagatagcagcactctacgtgcgattgacgacatggtgagtcaaatcaccgaagcggcacaaagccaggcggcggcagtggagcgaattattgttttcgccaagggtggattctatagcgatctgcgtttcagtcctgcgatggaggcggctttccgctatgtcagcccacttgatgaagggaacgtagtgttccagcatcgtgaactacttccaggtgtaagcaccttttcgatccctggctcaaatgtagatgtgatcaaggtgacagatccgctcctgatcgcacaaatgggtgatgccgacgctatcgccatcccgcaattcgctaagggaagtggtatttacaccaatatctacggcgcggcttcgtcaacgttcgaactccttaatgctgcacctgcggaagtttatagctggagcttcgaaagtgagcgcggaaacacgatcaacgtgatctcggaaaactcagcactgccagttaaccacggcctgaacttctccgttcacattaaagcctcagaataa

SEQ ID NO: 119146 - DNA, 195 bp, Enterobacter cloacae
atgtacttaattttgaaatctaacagagggctacatgttcaattatcggcctctgatgccgaagggctattgaatgttgctgcaatgtgcagattattagatgttgactataacggtgtgagacaacgtatttttcgtggtgaaactgtagagcaagcgattcaccattttttagatcagaaaggcggtgaataa

SEQ ID NO: 119147 - DNA, 1866 bp, Enterobacter cloacae
atgcttgagattaacacatctaaaattaataacacggtgacattcaccgttgatcgtaattcaatgaagcaagctatggacgctttcgatcaaattcagaagaaagccaaaggcattaaagaccctacgttgaacatgaaaaaattcagccaggggcttaaatctgctgaaagggaactcgataagctgaataagaaagcgtcaaagcctcgtgataacagccagcgtgaagcagagcgagcagcaaaggctaaagcccgtgtggaagccctggcagcaaaagaggccgcaagagcagcacagcgccgtgaacgtgcagagctaaaactcctcgacactgccagcagctttaagagtatgcagcaccttaccaatgttgagcttacacaggcggcactggcagcgtcacgcataactaaggcgtactctcagggaacgatcagcctcgccaggcaaaacagcgagatcaaaagactccagcagagctacagacgcattaacgcagagcgtagggcagcagcaaaggcgggaggggctaacgctcttggtggcggtggtaaggctacaggggctatctctggctctctgatgggcttaggcactggtgcgctggctggcgctggtgtgggtgcggcggcttacggtgcttattcatgggggaaagaggctgttacagcacaggaagagcgtagcgagattgtgcagcgtgccagattagggaatgtcgatgtaaacgcactggcggcacaaagccagtatgcgacggctaacgggatcgactcaggaatgggaatttctggaatgagaaaactccttgacaattataaggatattcaggatcgcatcggtcaaactctcaatgaggctaaatacgataagaaatctggagagtggaaaggtggcgatcaggggattctgtcagcagtgaacactgccggattcacgatggacgatttacgccgttaccaaacaaacccgatgggcttcgtctctgcctataccaacacgttagagaagcagggcaaatcaccagagcaaatcctcgcatcgttggaacagttaggtgatgacctgggcctataccataaagcgtttatgaatggtggtaaggcactcactgatcaggtggatgtgctcaagcgtaacgggcagtggttgaaccaggaacaacaggatcagcttgttgcataccgtaagtttaatcaggaaatggacattctcaacgatagccagaagttggccttcttcgaaggtttcatggagtctctcgaccctgcgacggttaaagagtttaaggaagcgatgcaagacgctttaccctttttcaaggggatcgggaaagctgcgggtgatgtggtggatggtctgatgaagctaaccaactggatcactggaaagctaaaccttctgaacggtgacaacaccactaaagaggcggtgagccagcactacggcactacgtcagcacctgcacagccaggaagtaaccctgtggctaacgcctatggagccagccagccgaaagcggatggtcatgagcataatgtattcgacacagtgcgcgaatggtggaacgggacaatcgacgctaaagacgtgagcagctacgcgcagagcaccaacggagattactctcctgtttcaatgttgaaacagagtgcagcagcgccagctaagccagccagtgcgccgatcatgcagcctgtagtgttgcagaatcagctaccggaagggcttatccatctaactatttctcctgatccgacattcggaaacatgctgaatgctaccgttgatcagcgtatcagtgataacaatcagcgtatggtgctggctgtttcatctggtcaagggacggggggctaa

SEQ ID NO: 119148 - DNA, 678 bp, Enterobacter cloacae
atggcaacacctggaagtttaactatcgggggcagcgatgcctcccgaatcaattcaactcagaacagtaataacagcagtgctacccgcaccaaaggtgaaaacggcttcaccatccttgcatctgtatataattcgtcctcagatagctacattcaaaactatcaagcgatagtgtttgatgctgtgacggatacgggagtccgtagacaggctgatattaccagctatcccgttgagagcggggcagaggtgagcgatcatgttcagattaggaataatacattcaagctatcggggattatttccgaaactccggtgaggctggaaaaggatttgttatacagcgctggtgtgaatggcactcgtatcagtcaagctatcgaatacctcgataagatgtttgacagtcgccagcccatcacattagtgacagagcacaaagtgtacgagaatgttattctctccggcatttcctacgattataaatctgaatacgcgatgcaattcgatcttgaatttgaacagatcaggcttgtcagtaaagctacagttaatgtgattgcaactaaaacgcagggaaataaatctgtaggcggtacggtgaaacaaaaggtagtgaacaatgcacctaagaaaaccgaaggtgatacggttactacggagtttaagaaataa

SEQ ID NO: 119149 - DNA, 498 bp, Enterobacter cloacae
atggctttccttaacaaagcagaaagtgcgctgctgcttaagtcatttacaggtgaggatctgctggttgccctgctggggattagtaccggcgggcggtggtcagagctggcaacactcaaaccggcacaaatagtaaacgggcgcgtgacattcctgaaaatcaaaaacgcaaaaaagcgcactgtaccgatttcttctgagcttgaatcgctgataaagaagaataccagcgggaatctgttcaacgtcgattacgtgagtttttgcaaagtgctgaagatggttaaacctgatattcctgcaaatcaggcaacgcatattttgcgtcataccttcgcaagtcatttcatggtgaacgggggtaacatcatttcattacagcaaatactgggtaatgcaaacatccagcagacgatgacttatgcgcatttgtcaccggagtacctgcaaaatgccgtggcattgaatccgctttcaggagggatatcgctgtag

SEQ ID NO: 119150 - DNA, 231 bp, Enterobacter cloacae
atgaataaggaagtcacaccaacaccgcgtccgacgtttaaaagaacgttgcggcgaatcagcatgataagcgtcattataacgatgacgtttatatggttgctgctgtgtttcgcttccgtggtgacattaaagcaatacgcgcaaaaaaacctcgaactcaccggcgccaccatgagccacagccttgaggcttctctggtgttcagcgatgccgtggcggcaaattaa

SEQ ID NO: 119151 - DNA, 483 bp, Enterobacter cloacae
atgttgaagcgatacttcgcgccgttgttactggcatctctggttatgtccgggtgccagacgccggagggtaaattcacaccagagcaaatcgcggccatgaagtcctacggctttaacgaactgaatggcgactggtccctgggcctgtcggataagatcctgtttgataaaaatgacgccagactgcgtccggaaagtgaaacgcagatccagactatggcctcacgtctggcggcaaccggtctgaatcacgcccggatggacggccatacggataactatggcgaagagagctacaacgaagcgctttcgttaaaacgtgccaatgttgtagcggatgcctgggcgaagggcgcgaacatcccgcacagcaacctcactacgcggggtttaggcaaaaaataccctctcagcagcaaccgtactgcgcaagggcgcgctgaaaaccgccgtgttgcggtagttatcagcacgccttaa

SEQ ID NO: 119152 - DNA, 1371 bp, Enterobacter cloacae
atgactacctgcactccgcgcgcggcatggggaaacctgctgcgtcgcctccatttctatatcgggctgtttgttggtccgtttattttcttcgcagcgctgaccggtacgctgtatgtcgccacgccgcagcttgaaaatgcgctgtaccatcatgcactccacacggatgccgtgggtgaggcgcagcctcttgctgcacaaattgccgcggccgaaaaggccgtagaatcagatctgcgtctgcatgccgttcgtccggggctggaagagggcgaaacgacccgtgtgatgtttgccgacccggcgctgggtccctccgagcatcgggctatttttattgatcccgccagccttgaggttcgaggggatatgaccgtatacggcaccagcgggattttaccgctgcgtcagactatcgattatctgcatacctcgctgatgctgggcaacctcgggcgcctctatagcgagttagccgcctcgtggatgtgggttgctgccctgggcgggatcgcgctgtggttctatacccgaccgaagcgccgtattaacaatcgtttccagaatcgtcgtcgcctgcatgtgatcttaggctggacgttactggcgggaatgctgctgttctcagtcaccgggttaacctggtcacaatgggccggtggcaacgtcgataagctgcgtgcagagatgaactggctgacgccgcaggtaaacaccaccctttccggtgcgccggaaatgatggatgaacacgccgaacatcgtggtcatcacggcggaatgtcgatgcctgaaatgcctgttgaactgtcgctttttgacagcgtattgcaggccgcccgccagtcaggaattgatgcgaacaacgttgagatccgtccggcaagcagggtcgaccaggcctggacggtgacggaaatcgatcgccgctggccgacgcaggttgatgccgttgccgtggaccctcaatctctgaatgtgctggacaggactcgctttggggatttcccgctgatggctaaactcacccgctggggcgtggatttccatatggggatcctgtttggtctggcaaatcaactgctgctcatcgcgtttggcgttgcgctgtgcgtgctgattatctggggataccggatgtggtggatgcgtcgtcctgcgacgtcagccgcgaacccggtacagacgctctgtcaaagctggctggcattgccgctgtggggaaggggagtgacgttcatgataagcctcctgctggggctggcgttgccggtaatgggcgtcagtctggcggtatttatcgtgattgactggctgcgctggcgagcggcttcaggcgtgtcgctcgccggcacatccgctaaatag

SEQ ID NO: 119153 - DNA, 1032 bp, Enterobacter cloacae
atgacagtaaaaaaactgacttccggcgagtggctatgtgattttcgtgtcgatggcagagatagtcgtcgcgtgcggaaacgctttcccactaaaggggaggcggttgcctatgaacagtattaccgtgaccaagctgctaataaaccgtggatgtcagagaaagaggatcgcagaaagctaagtgagttaatcatgctctggcataacctccacgggcaggctttagtcgcaagtaagtcacgcttagctaaactgcatattatctgcaatggcctaggcgacccagtagcctcccagctaacagcgaaagattgggctcattatcgagaccgtcgtctccgtggtgagatagataatggctaccacaaggacccggctaaatgggttgcgaaaccgattactgttaaccgtgaacatcattaccttgaagctgtttttaacgagctgaaaaggttaggtgagtggagtttaccgaacccgcttgacggggttagggtgtttaaagaagccgaaaaagaaatgtcatggctcacacgtgagcaaattcctcagcttcttcaagcttgtgaaagatacggcaaacctgacctgacgatgatagtaaaagtatgcttggctactggcgcgcgatggggggaagcggaaaggcttagccgttctcagctctccccctataaattaaccttcaccaaaacgaaggggaaaaagaatcgaaccgttccgatcccgaaatggctttatgatgaattgagccagcgtcaaggcaaaatgtttaagccctgctatcaggagttcaaaaagatgcttctgctcaccaatatcgagttgaccgaagggcagaaaacgcatgtgctacgccatacgtttggatcccattttatgatgaacggcgggaacattctggtactgcaaaaaattcttggtcacgccaacatccgcgaaacgatgaaatatgcgcactttgccccagaccatcttgagcaggccgtcgagctgaaccctttgaacgacataatgtccacagcatga

SEQ ID NO: 119154 - DNA, 591 bp, Enterobacter cloacae
atggaagcttctggtgggaaaattgtgctccgccgcattctggatgcttacggtttcaaacttcaaaaagagctgggagatcaccttaacattccatcaggaaccatgagcgcttgggtacgccgagagcatttccccggtgaagtagttatcgtctgctcacttgaaaccggcgcctcgcttctatggctggctacaggtattggctcgatgtatgagagtactactgattcgaaaccaacttctgaggcacttaaaggagtaaaacagattgctaaattcaatattcataccggcaatctgataaacgatggagtgtggtactgcgatgaaacactcattgatgcctcagtgaaaaaaccagcacttatagagaaaaacagccttcgctggcttgtggatctcgacacaaaaaatattgccaatggccgatggctaattgatgtggatggaacgtgcgatgtatacgatatcgcgcgcttaccgggcaataagctgatagttaaaaacgacgcttcaaattttgaatgtcaggtatcagaggtcaactgcgtcggtatggtcttcattaccctgagtaaaagtatttaa

SEQ ID NO: 119155 - DNA, 228 bp, Enterobacter cloacae
atgaatcttcaaattgcaatccctgctggcccagactttgtctcttatgaggagtttgctgagcaatacgggtgtagcctgaacaccgttaaggaaatggttaagcgtggcgaattgctactggtccctcgcactcgtgaaggtggcttaggccgaatcaatatgattgccttccgtgcaaaattgttagctcaggccatcaattcgcgttacgcagtgtttcagtaa

SEQ ID NO: 119156 - DNA, 510 bp, Enterobacter cloacae
atgttagattttcgcgtttcgtcacattcacacttcgatgacgcttgtcgcaaattcgccttgacccataacgtcaaggagttagcaaacaaggcggatatcaagccccatacgctttacaacaaactaaacccagagcaaccgcatcagttaacaccccgtgaaatttggacgctgaccgatattaccgaggactctactctcgttgatggctttttagctcagatccactgtctgccatgtgtgccggtgaacgaactagcaaaagaaaaattgcagacctacgtaatgcgcgccatgagtgaacttggggaactggcaagcggtgccgtttcgaatgaacgtttaaccccagctcgcaagagcaccatgattgaaagtgtaaatgctgggattcgtatgctctcgctttctgccctggcattacaggctcgcctccatgctaatccagcaatggccagtgcgttagattccgtgagcggtattggcgcttccttcgggttaatttga

SEQ ID NO: 119157 - DNA, 201 bp, Enterobacter cloacae
atgctgaaaaatgaaccttcattcgcatctctgctcgtaaagcaaagtccaggcatgcactacggccacggctggatcgcagataaggacggcaagcgctggcacccgagccgctcacaggctgatttactggctggcctctcaactcaaaagcagggggaatcatggctatcgaagctgtttccgcgactgttccactaa

SEQ ID NO: 119158 - DNA, 339 bp, Enterobacter cloacae
atggctatcgaagctgtttccgcgactgttccactaaaagcgggtgaacgtctggccggtctcaatcatgtggctgaattgcgcgcgaaatattggggcgatagctggaaagaggttgggcgttttgttgacgatatgcgcgataaacgcgatccacaatttgaagaaaataatcgggcgctggccgctattttctttctggcaaaaataccggcggctcgtcatgagctcgaattaagtgagctgactactgacgagaaaaaagcattgattacagcgatgaatcattttcgtgcagtggtgagcttatttccaaaacggctaaccatgccgaattaa

SEQ ID NO: 119159 - DNA, 228 bp, Enterobacter cloacae
atgcgtaataccgaaacccgcacctttcacaccgatagcgatgcactggccgtactgctgactgatgccaaaaaagaagagcgtaaagaccgcgctctcgccgtttccattcgtcttgaggcgctggctattcatatcaccaaagagggtatgagcggcatcgaagccgctgaactgctgcgccgtgaagccacacgctttgagaatgaatcacaggagctgcactaa

SEQ ID NO: 119160 - DNA, 222 bp, Enterobacter cloacae
atggccgacgcaatggatttagcacaacagcgtgagcaggaagaccgcgagcgccacatcagcaacgcgcgcagccgtatcgctataccttcccgtttcctgtgcgaacaatgtgacgcaccaatccccgaagctcgccgtattgctattccgggcgtggccttttgcgtgagctgccagcaaatcgccgagcttaaactaaaacactatcgggggttataa

SEQ ID NO: 119161 - DNA, 2130 bp, Enterobacter cloacae
atgttcgcggctttgctgcatgcgagaaaagtgctttctctacagcccgagtgcgtgcgttttgacgtttatcgcaccgctgctgtgctggagcaaaatcaaggcagtcaacgagccaatgcctttttaatcagtttctgcaaaaaggcattgccacgtcttgaactggtcgcaaaaaaatacgagtgcacaggtatcaatagcaaggtatcagccgctgtctttggtggtcatttcgatactgagcttatgcaatatctggcatcacgcatggtcaatatggtcgccagatataaccgacttccggatatggcgcgcgccgatattgacctgctggccgctgatatcgctaatttcattcgcgctgaactggctaacattgatgattctgaatttggtgagttcagaacactttatgcctggtatatgcacgccgggtttatctctcagcaatttaatgtaacgcctcccaaatgggagcgagtgattaataaagttttcgataaaaatgatattgcgcccgcagtaatccgcatgtttaccgaaacatggtggcgtaaccgtctgcgacgcattgcggctgcatggcgcgaacatctgcacattgcagtcggtaatgtcagcaaaaaaagacacgcatatgcgagtaaaaactgcgtgactgactggcgcgagcagaagcgccgcacgcgtgaatttctcaagggactggatctcgaagacaaagacggcaaccgcatcagcctgattgaaaaatacgacggctcggtcgctaaccctgcgatacgtcgctgcgagctgatgacccgcatccgtgggtttgaaaatatatgcaatgagctcggttatgtcggtgagttttataccctgaccgcgccgtcaaaatatcacgccacaactaaagcgggataccgtaacaccaaatgggaaggagccagcccgtcggacacgcagagttatctcaccggcctttgggcgcgcattcgtgccaagctgcaccgggaagaaatccgcattttcggcattcgtgttgctgaacctcatcacgacgggacgcctcactggcacatgcttatgtttatgctgccggaagacgttgagcgcgtgcgcctcatcattcgcgattatgcgtgggaggaagaccacaacgagttgagaagcgacaaagccaaaaaggcgcgctttcatgccgaggccattgacccagaaaagggcagcgctaccggctatgtggctaaatacatttcaaaaaatatcgacggctatgctctggatggtgaaaccgatgacgaaagcggtgaactgctgaaaaagaccgctccagccgtttctgcatgggcggcgcgttggcacatccgtcaattccagtttatcggcggtgcgccggtgacggtctaccgtgagttgcgccgcctcgctgacaccgagaccgcacacggcctgagcgttgagtttgcagccgtccatgatgccgctgacgccggtgactgggctggttacgttaatgcgcagggtggcccgtttgtccgtcgcgatgatttgcaggtgcgcacgttgtatgaaccgcgcgccgagtttaaccagtatggtgaagaaaccgtctgcatccgtggcgtgtacgactccgctatcggtgctggcacccctattttaacccggctcacgcagtggaaaattgtgccgaagtgtgccgttgatttggccgttgacgttaagggcgctcctgcgccctctcggagttctgtcaataactgtacgggaagcgaaagcgatccaccgatactggatttaacaaaaccgctgagtcggcgtgaaagaagagagctggcgaaccgactcaggaagcaaaaaccatcaacacggcgaaaattcacccacggaacggacgaacaaaaagaagctttgtcgaaaactatcgacgagatacatctcacaaccggcatcaccatcagccggggcgaagccctgcaccttatggcaggtggtaagagttgctttaacggtaaatggttgcgtggaacagctaaaggagaggtattttccgcaacaccttcacaacaggctcaagcccggcggatactcagtcgcgtagcggctttagtcggagcggtaacaaaacatggaagttaa

SEQ ID NO: 119162 - DNA, 183 bp, Enterobacter cloacae
atggttggcgaacatttcagccgaactcagcaaaagtgggcttgtgtgcaattcatcgcagaggtgtctctgattgcaaattgcaaaccgtcagaccttaagctcgcacttactcttattgctgatttagcgaacagtgaaagtgctgaggatgaaccggatattttctataaagccgaatag

SEQ ID NO: 119163 - DNA, 672 bp, Enterobacter cloacae
atgaaaacaaaatggtttactgccaacttccctgccggtcttgatgggttatatcaggccatcataaacacgccttttgacagtgacaaaggttggggatttagcattctttcatatgaagataagtatatatcctcaaaatatattgaaagggttgaagtaagcgaagtaatcatagacccctatggtaatgaaactgaatttaatcatttcaaatatgtgcagtttaacttttggttttttaaaactcaaggcggtaacttcattttaataattgattccccgcctagaagtatcaagggttttatatccaatgtgattaaggcaactgaatccgactttaatgtttcttaccttgtgattcgaattgatgagtttataaaatttatcacacctcacttcgaaaaggttcaagtacataaggccaaattaaaggatttaacttttagtaaaaatacatctggaattttagagcttgagtcttcaaatgacgcgatcgatgaaatgaggaatatttttaaaaatgcaaaattcacgattgataaagtgaaattgagtgttgaatctaacgccggccatgaaacattggaagtgaattctaatggttctcttagcttctcagaggaactttttgataagatattctctgcggttgagcgttttactttctag

SEQ ID NO: 119164 - DNA, 1116 bp, Enterobacter cloacae
atgaaaatcggtttgtatagcgttaatgacaaggctatgtttgatgctctcaatcaaacaaaagtgactcatgaagacatgaaaagcctttttttcaaaagaggcattataatttctaaggatacaaagcggaagacactagctttggatttttcgaagaactttcacggctattatgactttgaatatttatcagaaattcttgggactgtaggaagaagagagaaagtatcaattaatattgtcaatagtgcaattagtttaagtgatatggaagttacaataaaatctatatgtgaagaactacaaaaagaaggggatataacaaatatcaattacaccgagaaaggatttgaggtgtcagtaaaatatgtgaagctggattttaaaatgagcgagtttcgccaatcctcatctcgcgaggctaaaatacaagtagagttgaatgatgagggtgagtatattacgcgcttccctcagaatgctaaggcacatgagtttaatgagcttttgataaaaaaaataaaagaaactaataatgatgagcctgtaagtcttgaagagatatcgcttgaaacggtcaaggattcaaatgaacgtagtcgattctttaaagaactgatagttagcatgccaaattacaaatgtgtcgatgtgtcagatgtttatgttactcatccagtattagaggttaaaacatcatctgaagatgatgatgactcagatgaagatgatgatgctgttatagacactgggtatcatatttcaaaggcatcactgaaaggacggggtgtccttgaatcaccagaactggaagagttattgagtaatggtttttacattacaaagattatatggagttcggtagtcgaaggttttaaagactccgataagtatgaattcgaagcccagtttgtggatgcggataaatgtaagttgttttcttatcttgttcgtgggtgctataaatataaaaaattaaatgtgtttactaatcggcaaaatgtggataaggaaaaagaaaatgtgctattattattaatagaaaaaacggctcgagaaatctctaatagaataatatctttaaatactctcgaggtagtcactgaaaaataa

SEQ ID NO: 119165 - DNA, 1059 bp, Enterobacter cloacae
atggcaggtgaaactcaaaatatttcagcaatggcggaaaagatatcttccgatttatttaagtggttcaagtgggagcttgttggggtaaccaatgaaaactttcagtgtctgaagtcgacgcaacacaaaacaaagtctggaacacacccgactgatgttgttttttcctataaggatccatacttaaatcggacaatatttttaaatacagatctaaaaagttatgtaaaagggtcgataacagcaacctcaatgcgaaacgcattggtctcattggctaactcaattgattgcgcagaaggtagcaaggaatggaaggatagatactcttatcaaagtggttcttctgaggttagaggaatgctctttgtatataatcatgatggtgagtttgaccgatcattctatgatgtgttttatcagtcgtataattcagaaactgataaaacaaaacgcggtattaatcttgataatattcctctcaaacaaggtcagaagattcatattattgagccgagaactataaattatttgcagtcaataattacggacttatctcaacttagtcacaatcgagaatttcctttaggtaaaaactatcagttcttttacccagatctatcacttcataaagttagcgggtcacctgaagaacacccggctacagtagagttgttaacagggccttttttgataatcaagcacaacgatgttaaacattgtgatgaagaaactttagaatggaaaacgacctataagcacggttatgttatttattacaacggcgaggggagtaatgaattagagtttgtttatattcttgatacgttatcaaaataccaactcttggatgggaacgaaaagataagaattagaattgtacatccaagcatttataaagatgttcgcagtatttttatgcgtgctaaggaaacatactgtagagagtggggcttcgatgaacataaaaaaaccatcattgatgccattgattttcaccaagttgaatttacaaaacctcacttcagttctgttgagattggttgggagcgataa

SEQ ID NO: 119166 - DNA, 1026 bp, Enterobacter cloacae
atgaaaaaacgccaaaagaaacagccaaaacagaccaacatgaccgccagcgcaccgcagaaaatggaggcgtttacctttggcgagccgtcacccgttctggatcgccgcgatatcctcgactatgtcgagtgcatcaataacggcaaatggtacgagccgccggtcaacttctccgggctggcgaaaagcctgcgcgccgccgtgcatcacagctccccgatttacgtaaagcgtaacattctgaccagcacctttattccgcacccgttgctgtcccgtcaggacttcagccgccttgtgcttgattatctggtgtttgccaacggctatctcgaaaagcgcatgagcgtgaccggccagctctttaaactggaaacctccccggccaaatacacccgccgtggtgtcgaggagggggtttactggtacgtgtcggactatacgcacccgcaccagttcgcgcccggctcggtgtttcacctgctagagcccgacatcaatcaggagctctacgggatgccggaatacctgagcgcgcttaattcagcctggctgaatgaatccgccacgctgtttcgtcgcaagtattaccagaacggcgcgcacgcgggttacatcatgtacgtcaccgacgcggcgcagagcagcaccgacgtcgaggcgctgcgctccgcgatgcgcgactcgaaagggctcgggaatttcaaaaacctgtttttctatgccccgaacgggaaaccggacggcattaagattgtgccgctgagtgaagtcgccacgaaggatgattttttcaacatcaaaaaggtgagcgccgccgacctgctcgatgcgcaccgcgtaccgttccagcttatgggcggcaagcctgagaatatcggctcaatgggcgatatcgagaaggtggcgcgggtgtttgtacgtaacgagctgacgccgttgcaggagcgtttcagggaaatcaatgaatggctcggtttagaggtgatccgcttcaaggattacaacatcgaaactgagtaa

SEQ ID NO: 119167 - DNA, 1770 bp, Enterobacter cloacae
atgaccatttcaactgacctttcattactcaatgacccgcgacgacaggcgcggctgttgtactggcaggggttcgccgtgccgcaaatctgcaacatgctggaactcaagcgccccacggtgcagagctggaaacagcgtgatggatgggaggaaactgcgccgattaaccgcgttgaatcgacgttagaggcgcgcctcattcagctttacgccaagcccgacctgacgcctcacgactttaaggtcgctgattttctgtcgcgacagatggagcgccttgcgcgcgtgaaccgctacggccagaccggaaacgaggtggatttaaaccccaatatcgccagccgcaacagaggtgatcgcaaaaagccgaaacgtaatttcttcagtgaagaagcgattgaaaagctggaagagattttctttgaccagtcgtttgagtatcagctcaggtggcataaagccgggttagagcaccgcatccgccacatcctcaaatcgcgccagattggcgcaacgttctactttgcgcgtgaggcgcttctgcgcgcccttaagaccgggcaaaaccagatatttttatcagccagtaaaacgcaggcttacgttttccgtaagtacatcatcgcctttgcgcgtctggtcgacgtcgacctgtcaggcgacccgattgtcatcggcaacaacggcgcagagctgatattcctcgggaccaactccaacaccgcgcagagtcataacggcgacctgtacgtcgatgaaattttctggatacccaatttccagaagctgcgaaaagtggcctccggtatggcgtcgcagtcgcacctgcgcacaacctatttttcgacgccatccacgctggcgcacggcgcatacccgttctggtcaggcgagctgtttaaccgtggccgcagtaaccgcgacgaacgtgtcgacatcgatatcagtcatcaggcgcttgccgggggcatgttatgcggggacggccagtggcggcagattgtcaccattgaggacgcgctcgccgggggctgtaccctgtttaacctcgaccagctcagacaggaaaacagcgcggatgacttccgtaacctgtttatgtgcgagttcgttgacgataaagcgtcggtattcccgttcgaggagctccagcgttgcatggtcgatgcgatggaagaatgggaggacttcgagccattcgctgaccgtccgtttaactggcgtccagtatggattggctacgacccgtcacacaccggcgacagcgcaggctgtgcggtgctggctccgccgctggttgccggtggcaagttccgcatccttgagcgccaccagtggaaaggcatggattttgccgcgcaggccgaggccatcagggcgctgaccgaaaaatacaccgtcgactatatcggcattgatgcgaccggcatcggccagggagtttaccagctcgtgcgctcattcttcccggcggcgcgcgccatccgctacacgccggaaatgaaaaccgcaatggtgctgaaagcgaaagacaccatccgacgcgggtgtctggagtatgacgccggtgcgaccgacatcacgcagtcattcatggctatccgcaaaaccatgaccagcagtggccgcagtgccacctatgaagccagccgcagtgaggaagccagccacgcggatatcgcatgggcgaccatgcacgctctgttaaacgagccactttccgccggtagcggtatgcattcaacctcgattctggatatcaactaa

SEQ ID NO: 119168 - DNA, 855 bp, Enterobacter cloacae
atggcaaagaaagtttctaaatggtttcgcatcggcgtcgagggtgacacctgcgatggccgcgtcatcagcgctgatgacattcaggaaatggccgatacgttcgacccgcgcgtctacggctgccgcattaacctcgaacatatccgggggctgctgcctgacagtctgtttaagcgatacggcgatgtagtcgagctaaaagctgaggttatcagcgatggctctgcgctcgacggcaaaaaggcgttgtttggcaaaatccagccccttgacgagctggtcagcatggttaaggccgggcagaaggtttacacctcaatggagatccgcccgaattttgccaacagtggcaagtgctatctggttggcctcgccgtcaccgatgacccggcaagcctcggcaccgaatacctcgaattctgtagccgcgccacgcagaacccgctcgccggtaaaaaagaccagccgggcgatctcttctctgtggcctcactggctgagctggaatttgaagacgttcccgacaccatgctcaacagcctgaccgacaaggtaaaggccattttcagccgcaaacaggccagcgacgacgcacgtcttgcagatgtgcatgaggctgtgaccaccgtcaccgagctggtgcaaaccaacctcaccgccaccgaccagcgcgtcaccgagcttgagaccgaactggcgcagcttaagcaggacgtgaccagcaaggccgaagaaagcgcgcaggcgtttaacgacctgaaaaactccctcgataacaccgaaagccagcgccagccgcgccgcgagctttcaaaaggtggtacgggcgacgagctgctgaccaactgctga

SEQ ID NO: 119169 - DNA, 1068 bp, Enterobacter cloacae
atgcgtaaacaaacccgctttaaattcaatgcctacctgacccgcgtcgcggagctgaacgacattcccaccgatgacgtggcgaagaaattcaccgtcgagccgtcggtcacgcaaaccatgatggacaccgtgcaggaatcgtcctcattcatgacgaaaatcaacatcgtgccggtcgacgagctgaaaggcgaaaaagtcggtgtgggtgttaacggcacaatcgcgagcaccgctgatactgacggcgatggcgagcgtgaaaccgctgattttactgcgctggagtccaataaatacgagtgcgcgcagattaactttgacttccatatccgctacaaacagctcgacctgtgggcgcgattccaggacttccagacccgtattcgtaacgccattatcaagcgtcaggcgctcgatttcatcatggccggtttcaacggcattgagcgcgccgcaaaatctgaccgcaaaaaaaatccgatgcttcaggatgtggccgtggggtggttacagaagtaccgcaatgaagcgccagcgcgtgtgatgtcaaaaatcaccgacgaggacggcgcggtcatttccgatgtgatccgcgtgggtaaaaacggcgactatgcgaacctcgacgcgctggtcatggatgccaccggcaacctgattgatgagatttatcaggatgacccggagctggttgtcatcaccggtcgcaagctgatggcggataaatacttccctatcgtcaataaagaccaggaaaacagcgagtcgctggccgctgacatcatcatcagccagaagcgaatcggcaacctgcctgccgtgcgcgtgccttacttcccggcgaatgccctgatggtgacgcgtctcgataacctgtctatctacttcatggatgacgcgcatcgccgcagcatcatcgaaaacccgaagaaagaccgcatcgagaactacgagtcaatgaataccgactacgtggtcgaggcatacgctgccggttgcctgattgaaaatatcaagctcggtgacttcaccgcacctgctgcaccggaaagcggagagtaa

SEQ ID NO: 119170 - DNA, 756 bp, Enterobacter cloacae
atgacgagtcccgcagcgcgtcacatgatgcgggtctcggcctctgaaacagcgcggcgggctgctgtcccgctgcgcaatgcaactgcctatgagcagatgctcgttaagctggccgcagacaaccgcacgctaaaacaaatccgatccaatgagcgcaaggcagataaaaagcgtgagctgctgccgttctatctgccatgggtggctggcgtcctcgcaaacggcaagggcgcgcaggatgacatcgtcatgacggtcatgctgtggcgtctcgatgctgacgatatcgccggggcgctggaaattgcccgttacgccatgacctggggcctgaccatgccgaccggtcgacgtccgacgccttacctgctggccgaagaggtggcactggccgcgcagcgcctgctcgctgcaaaacagccggtcgaactggcgaacctgctcgacaccattgcgctgactgaacgcgctgacatgcccgatatcgtgcgcgcgaagctgcacaaaatcaccggctatgtcctgcgtgatgcgaatcaactccccgaggcgctggcgcacctgcaacgtgcgatccagttagagcgcactatcggggtgaaaaaggatatcgagcagttagagcgccagctcaggccaaaacccgaaccggcatcgaaaaccaaaacgactaaaccgcgcacgcgcaaacctgccgccaaaccggcggcacggcgcgggcgtccaccaaaggcggcaaaagccgcaggttaa

SEQ ID NO: 119171 - DNA, 507 bp, Enterobacter cloacae
atgacgacgctgattattgagcaaaacaaagagccgcaggatgtgccgggcgtggtgataccgccgccgggcgtgagcgagccggtaatcaaaaacaccccgttttttcctgatgttgatccgaagcgcgtgcgtgaggaaatgcgtttagagcagaccgtttcccctgtgcgcctgcgccgggcaattaagaccgccatcgcagagacgaacgcggagctgggcgaatggcgcgagcgtcagctcgatgccggttacgccacgctggcggatgtcccgaccgacaggctcgacggcgaaagtgtgcgtgttttccactacttcaacgccgtgtgtgcaatgacgaccgccacgctttacgagcgttttcgcggcgtggatgcgaccgccagaggtgacaaaaaggccgacagcatcgacagcactatcgatgaaatgtggcgggatatgcgctggtctgtggcgcgcatccaggacaaagcgcgctgcattgtggggcaaatctga

SEQ ID NO: 119172 - DNA, 204 bp, Enterobacter cloacae
atgaaagcgtatgcgctacagggcgacaccctcgacgcgatttgtgtgcggtactacgggcgcaccgagggcgtggtcgaaaccgtcttagaagcgaatcccggcctgtctgagctcggcgtcatcctgccgcacggcacggcaattgaactgcccgagaccgacagcgcggccagaaccgaaacggtgaatctatgggactga

SEQ ID NO: 119173 - DNA, 210 bp, Enterobacter cloacae
atggagaaaatcaccacgtttatcgcctactggctggccgtcgcgctggcgtacctcggcgcaatatcgcccgaaaagatggcgctttacgtgggcggcggatgcgccatttttaccgcgcttacgaattactggtttaagcgcaaaacgtacctctatctgacgtcactcggactcgacaagggggctattcgtgaaatcaatcgttaa

SEQ ID NO: 119174 - DNA, 513 bp, Enterobacter cloacae
gtgaaatcaatcgttaaacgttgcagtgtggccgcagtgctggcgctggcggcgctgatgcctgactttcgtctgcttaacacctcgcccgaggggctggcgctgattgccgatctcgaaggttgtcgcctgacgccttaccagtgcagcgcgggagtgtggacgtcaggcatcggccacactgccggtgtcgtcccgaaaggggaaatcacagaacgtcaggcggcggcgaacctcgtcgcggatgtgatgaacgtcgagaagcgtctcgcagtctgcgtgccggtagaaatgccgcagcacatttacgacgcgctggtcagcttctcattcaacgtgggaaccggcgcggcctgccggtcgacactggtctcatacctcaagcgccaccaatggtggcaggcgtgcgaccagctcacccgctgggtttatgtgaatggctcaatcaataaagggctggaaaatcgccgcgcgcgtgagcgtgcttattgtctgaaaggagttcctcaatga

SEQ ID NO: 119175 - DNA, 432 bp, Enterobacter cloacae
atgaaaaaatacgtgcgttctctgatgttagatgtcctgctggctgtattcctgctatgggggctggcttcgccgcaaagtgcagcacttaattttgttgcagcgtgggcgctgtttgacagtgttgtctgtattacggcgagcctcgccggtgtggctgtttttgaccactggctacgaaatgcggggaaaggtattccggtaaaacccgggattatgaaaatcttccgcgctgttttctgtaacaagccctcaaaggcgcgtcgcgcatggtctcttattatttttgtcgtaaccattgggtgtctgctcggtgctggctggaactttaccgcgctgctttacctgatttgcgtcctgacctttacgggggtgcgcacctcataccgtcagcgcattgaggaggcggggctgtgtccagattcattgtga

SEQ ID NO: 119176 - DNA, 435 bp, Enterobacter cloacae
gtgtccagattcattgtgatgttgattgccgcaggtctggcgctggcggctgtgctctggttaaggcatgagaacggtaatcttcggcgctcatatgaccgggcaaataaggtcgcgaccgaacagaaaaacgtgatcggaatgctgaaaaatcagctttccgtttcgcagggaatcgccaggcgaaatgaaaccgcgcaggtcagtttacgtggtgagctgattgctgccggtgcgatggccgtgcgccgggaagaaaccattacgagactgataaatgaaaatgaaacgttacgccgctggtacagcgctgagctgcctgatgttgtgcgcaggatgcacacccgcgccggttgtgcctccgccggtcattgtttacagcgcctgcccgaaagtgagctggtgcccgatgccgggaagcgacccggccactaa

SEQ ID NO: 119177 - DNA, 159 bp, Enterobacter cloacae
atgccgggaagcgacccggccactaatggcgacctgagtgcagatatccgcaggcttgagcacgcgctcgccgcctgcgcgttacagattgaaaccgtcaaagcctgtcaggataaactcgatgaagaaagcaatcagtctgcgaaaagcgctaactga

SEQ ID NO: 119178 - DNA, 468 bp, Enterobacter cloacae
atgaagaaagcaatcagtctgcgaaaagcgctaactgacgccgtcccgcagcttaaaaccaaccccgagatgatgcgcatttttgccgacgaggggaatatcgatgcacggctcgcggcctccctgtcccacgagaaaatttacaccctgaatgtgatcgtgtgcgatttcgtaggcgaccctgatttgattttcgtgccggtagccgcgtggctcagggaaaaccagccggatatctgcacgctcgatgaggggcataaaaagggctaccgcttccagatggatttaaacgacggtgatacggttgatatcagcattagcctccagctcaccgagcgcaccatcatcagggaggaaaacggcgcgctgcatgtgagctatgccccggagccgccaccgcctgaacccgtcacgcgtccaaaagagctctatatcaacggcgaactggtgagcaagtgggatgagtga

SEQ ID NO: 119179 - DNA, 450 bp, Enterobacter cloacae
atgagtgactttaaaccctttgataacaagctcgccgggctgcttgccgccctgtcacccgcagggcgccggaagcttgccggtgagattgcgaagcaactcagaacggcgcaacagcaacgtattaaacagcaaaaagccccggatggctcaccgtatcaggcgcgaaagcgccagccactgagagccaaacaaggtcgaattaaacgggcgatgtttcaaaaactgcgcactaaccggtacatgaaagccagtggccgtgaaaacggtgctgtggtggaatttaccggaaatgtgcagcgtatcgcgcgcgtccatcagtacggcctcaaagaccggccaaacgcacacgctcaggaagtgcaatatgctcaacgtcaattattggggttaaacgaaatcaacataaaagaaatagagttgctgattggtgagcatatttcaaattga

SEQ ID NO: 119180 - DNA, 978 bp, Enterobacter cloacae
atgttaaactgggaagatgtaccgaataacgacacgtataaaaatctcttactaggaaacggctttagtatcggtgtcagccctaaattcaattattggaatcttttaaatgaagcaaaacacagggttcatgctggattaattgatatttaccctgaaacccttagacttttcgagcaattacaaaccactaacttcgaggaagtattgaaagtttatcatcacgcacaccttgttcatacttttaacaagccagcgattgaaacagcttacaggaaactacaagaaggcttattctcaacagttaaagatattcatgcatcaaaaaacgaaaccccaaccccattaattttccatgaactcactaagttcaaaaaagtgtttacaacaaattacgaccttattccgtactggagttttgttgacatcaatattgatgtgcttcgtgatttcttctggggggatggcatcaagcctacatttgataaaaataatacagaggttttttttggaaattacactcaactattttatctacacggagcgttacatttagaagtaactgaaactggcctaactcaaaagagaagcatacaggatacattatccgaggaaatagaagtgttatctagctcattcagtgcaagacatgggctttaccctctttttatcaccgaaggcaaaagcgaacagaaaatcagaaaaataggttctaatgattacctgtcattttgctacaatcaattaaagaaaattagcggaaaaatacttatttttgggcattcactcagtgaagagtttgacaaccacattgttgaagccttgaaaaacaatagcaatataaccgagatagcaataagtatttatccagaacaacccattttaaatataaatgaaatggaagcaagattggcccgacaacttgctggacgaccgattcatttttttaactcaacaacacacccattaagtgtctga

SEQ ID NO: 119181 - DNA, 642 bp, Enterobacter cloacae
atgaacacactctctaatattcaggaaatcgctcgggcgatccgcaacctcatccgcaccggcatcgtgaccgacgtcgaccacgatgaggggctgtgtcgtgtccagaccggcggcatgcaaaccacctggcttaactggctcacttgtcgcgccggtcgctctcgcgtgtggtgggctccgtccgttggcgagcaggtgttattgctggccatcggcggtgagctcgatacggcctttgtgctgccgggcattttctcagatgacaatcccgcgccgtcagcctcacccgatgcgcttcacgttaccttccctgatggcgcggtcattgagtacgaacccgaaaacagtgcgctcgccgtgtcaggtatcaaaaccgcagacgttactgcgtcggattccatcacggccaccgtgccggtggtgctggtaaaagcctcgacccgtatcacgctcgattcacccgaggtggtgtgtaccaacaagctgacgaccagcacgctcgaagtgcagaaaggcgggaagatgtccgggaacatcgagcacactggcgggaaactgacctcaaacggcgtgcaggtggatgaccatgcacacggcaacgtacagagcggcggaagctggactaaggggacgcaatga

SEQ ID NO: 119182 - DNA, 351 bp, Enterobacter cloacae
atgacggtgcgttatctgggaatgaacagccagaccggcctcagtatctctgaggtcgagcatatcaggcaaagcgtgcgcgacattctcgtcacgccggttggctcgcgtgtcatgcgccgtgaatacggctcgcttctgtcgacactgattgaccagccgcagacaccggcactgcgattgcagattatggccgcgtgctattccgcgatccagaagtgggagccgcgcgtcagtctgacaaccatcacctttgagcggtcggagaccgacggcgggctgtatgtcgatatcaccggcacgcgctcggctaacggccagcccttttccctcaccattccactgagttaa

SEQ ID NO: 119183 - DNA, 909 bp, Enterobacter cloacae
atggcaattgttgaccttaaccagctcgccgcgcctgatgtcgtggaagtgctggactatgagaccatcctcgcagagcgcaaggcgacgctcgtctcgttatacccggaggaacaacaggaggcagtcgcgcgcacgctgaccctcgaatcagagccgattgttaagttgctggaggaaaacgcctatcgggaagttatctggcgacagcgcgtcaacgaggccgcgcgtgcggtcatgctggcgtatgcagaagatgccgaccttgaccagataggcggaaattataacgtcgagcgcctcgtcatcaccccggcagacgacacgacgtttccgcccacgccagccgtaatggagtcgaataccgactaccgtctgcggattcaacaggcttttgaaggactgagtaccgcaggctcaaccggtgcatatcagtttcatggccgcagcgccgacgggcgtgtcgcggatatttctgtcatcagtcccgagcctgcgtgtgtgaccgtgtctgtgctgtcgcgtgaaaataacggcgtggcctctgacgagttgctcgccatcgtgcgcgatgcgctgaacgacgaggacgtcaggccggtggccgaccgcgtgaccgtgcagtcagcgaaaatcgtcgactacaaaatcaccgcgtcgctttacctttatcccggtcccgaaagtgagccggtgctcagtgcggcaaaagcaaagttacaggcgtatatcaccgcgcagcaccgcctcgggcgtgacatccgtaaatcggccatctatgcggcgctccacgtcgagggcgtgcagcgtgtcgagctggccgcgccggtggctgacatcgttctcgatgacacgcaggcgtcatggtgcagcgagtacagcgtcaccatagggggcaatgatgaatga

SEQ ID NO: 119184 - DNA, 534 bp, Enterobacter cloacae
atgatgaatgacacccggctgttaccggttggctcctcgccgctggaggtggcggcggcgcgcgcctgcgcggaaatcgaaaatacccccgtacccctgcgccgactctggagcccggacgactgcccggcaaacctcctgccgtggctggcgtgggcgttttccgttgaccgctgggatgagaactggccggaggccactaaacgggatgtgatccgcagcgcctggtatatccacgcacacaaaggaacgattggggcagtgcgccgcgtggtggagccgctcggctacctgataaacgtatctgagtggtggcagacaaacgacccgcccggcacatttcgcctcgatatcggtgtgttagagaccggcatcaccgaagaaatgtattacgaaatggagcggcttattgccgatgcaaagccagccagccgccatcttatcggcctcaatattattcaggacattcccggctatctgtacaccggcgccctgagctatgacggcgacatcatcacggtttatcccggataa

SEQ ID NO: 119185 - DNA, 1380 bp, Enterobacter cloacae
gtggcaattggcaatgccgccgacctgaacgcctacaccacggcgggactgtattaccagccagcgaatgcgcaggctcaaaccggcaggaactatccagaagctaacgccggttcgctggaagtttataagcatgccggtatcactcagatttaccggatttataacagctcccgctcgtacattcgcacgctttacagcgggacgtggtcagcctgggttaaacagtatgatgcggccaataaaccctccccggctgatattaatgccgtgaataagggcggcgatgcaatgaccggggggcttaagattcgtgctgctgatgcgttgcgcatttacgatgcggcatacggaatgatttttcgccgttcagaaaataatttttacctgattccgacagcaaaagaccagggggaaaatggcggcataagttcactgcgtccattttatgcagatctcactaatggcagagtgacgctgggtaatggtgcagtcgttaacggcggtcttgggctgggtgtagtcagcggccttggggggaactctattgctctgggggataatgacaccggtttcaaacagaacggagatggtgtgctggatgtttatgccaacagcaaacaggttatgcgattcctgaacagtggcataacgagttatatgctcttcaacatgaatgcaggcgcatcagtaagcagcactctcaccttcaaaaacggtagtggtatcacgtctgagaaaactggcgccaacccccgaaacggccgaatttactggggcggtgatgcgagtcgcggcaacaggatagaatttgcagatgatgccggctggaaagcttacattgagcgtcatccctcaaacggtgttcagttggtcgtaaatgggcgaatcaatggaagtattgtttattccagtggtgaagtactggcaggaggagggagcgctcgctttgctgctgatggaaatatatttggctcaaaatggggcaatcagtggcttgatgcctatttaaaaaacacctatcagccaaagggcaattacaccccggcgggtcaggcttataccagagcagagtcggatgcgcgttacggagtcggtaaaacgacgacaggcaataacagcgcttactacacgcatggtaatggtgctgtgtttatgcagtccgtgagaaatatctcggtcggcaacaatgccactgtaaccgtgacactgcctacgtcgttccctaacgggatactcggtatcggttcgagttattacggtgcagggggtaataactccgcatcattttatctctgttcgcctgtcgggaaaaatcaggtgaaaattgaaacccataactgcaacggaacattttatttaaacgtaacgggttactga

SEQ ID NO: 119186 - DNA, 432 bp, Enterobacter cloacae
atgcagaaatatttcagcaatacagataaaagcttttaccttgaggaaactgtcaaaacctatgaagaacagggtattcccgttccgtcagacctgatgacaataaccgatgctgaatatgaagcctttatggtttcacctgaccggaaagcgcctcagtacaatgttgaatcagaatgcatggaatgggtcgacatcgaaccgcctacacgcgaggaagttatcgaaaatgctgcggcattaaaggcgcagctcttgtctgttgcagctcaggccatagcaccattgcaggatgcggtcgatttgtcgatggcgacagaagaggaaatggcgagcctgtcggcgtggaagaaataccgggttttacttaaccgggttgataccagtgagcctgacgaaattgaatggcctgaatcgccgttaacagagtaa

SEQ ID NO: 119187 - DNA, 123 bp, Enterobacter cloacae
atgacgattttactctggattattggttgtctggctgcatggtggctctttggcttttgctggctcagactgtttgtcggtgatgaaacagaaaaagactatgaagaatgcccctatgattaa

SEQ ID NO: 119188 - DNA, 1194 bp, Enterobacter cloacae
atgagcgactatcatcacggcgtcgaggtcatcgagattaacgatggcacgcgcaccatttccaccgtttcgacggctatcatcggcatggtctgcaccgccagcgatgctgacgattccacattcccgctaaatgagccggtgctgattaccagcgtgcagaacgctatcggtaaagccggtaagctcggcaccctgtcaaaatccctgcaagccattgcagaccagtgcaagccggtcgttgtggttgtgcgcgttgccgaaggtattgaagacccggacgacccggaagcggcgcagaaagaaaccatttccaacatcatcggcacgaccgacgaaaacggcaaatacaccggactgaaagcgctgttgaccgccaaaactgtcaccggcgttaagccgcgcattctcggcgtgccggggctggattctctggaagtggcgaccgcgctcgcggcgacctgtcagagcctgcgcgcgtttggctatatcagcgcgtggggctgcaagaccatttccgaagctatcgcctaccgtgagaatttcagccagcgtgagctgacggtcattcaccctgattttctggcatgggacaccacggcaaatcagaccgaaatagcatgggcgaccgcccgcgcgctcggcctgcgtgccaaaatcgaccaggagacgggctggcacaaaacgctctctaacgtcggcgtgaatggcgtcaccggcgtcagtgcctcggtctcttgggacttacaggagaaagccaccgacgcgaacctgttaaatcaggccggtgtcaccacgctgatccgtaacgacggctttaaattttggggcaaccgtacctgctccgacgatccgttattcctctttgaaaactacacccgcacggcgcaggtgctggccgacacgatggcggaggcgcacgcctgggcgattgataaacccgtcaccgcaacgcttatccgcgatatcgtcgccggtatcaatgcgaaattccgcgagctgaaaaacaacggctatatcgttgacggctcctgctggtacgacccggagtcaaacagcgtggaaacgctcaaggtagggaaactgtatatcgattacgactacacccccgtcccgccgctggaaaacctgaccctgcgccagcgcatcactgatacctatctggcgaacctgtcagagtcggtcaacagctaa

SEQ ID NO: 119189 - DNA, 519 bp, Enterobacter cloacae
atggcattaccacgcaaactgaaatacctgaacatgttcaacgatggcctgagctacatgggcgttgttgaatccgtcaccctgccaaagctgacccgtaagcttgagaaataccgcggcggcgggatgccgggctcggtttcgattgacctcggtctcgatgacgatgcgctgtcgtgcgagtggacgctcggcggtctgcccgacgtcgagctgtgggcgcagtacgcctccccgggcgcggacagcgtaccgttgcgctttaccggctcataccagcgcgatgacaccggcgcgatttctgccgttgaggtggtcatgcgtggccgtcataaagagtacgacggcggcgaaaacaaacagggcgaaagcggcacgaccaaaatctcgaccgagtgcgcgtactaccagctcacgattgacggcaaggaggtcatcgagattgacgtcatcaacatggtgctgaaagtcgacggcgtcgaccgtctggcagagcatcgcaaggccattggcctgtaa

SEQ ID NO: 119190 - DNA, 324 bp, Enterobacter cloacae
atggaaaacaacatcgaaaccggcgttaccgaaaatgaagccaccgaaaccaaaaagccacacgtcgtgatcctcgacaaccctctgatgcgcggtaagcaaaaaatcggagaggtgacggtttcaaaacctaacgcgggaacccttcgcggggtgtcgctggcctcgctggcaaactctgacgttgacgcgctgattaaggtgctgccgcgtatgacttacccggcactcaccgagcatgaaattgcccgtctcgatgcctcagacctgatgcagttcgccgctgaggtgattggttttttgtcgccatcttcggctcgctga

SEQ ID NO: 119191 - DNA, 2451 bp, Enterobacter cloacae
atgagcaataacgtcaggatcgaggtgctgcttaatgcagtagaccgggcaagccgaccgctaaaagctatccagaacgccagcaaatccctcgctggcgatatccgcaactcacagacgaccctgcgcgaccttaacgcgcaggcgtcccgaattgacggattcaggaaagcgagcgcacagcttgccgtgaccggtcagtcgcttaacaaagcgaaacaggaggccgcagcgctggccgtccagtttaaaaacacggaaaaccccaccaaagcgcaggcgcgcgctatggaggcagcaaaaaaatccgccgctgacctgcaactcaaatataacgggctcaggcaatcggtacagcgccagcgcaccgagcttgctcaggccgggattaatacccgaacgctgtcggctgacgagcgtcgccttaaaaccagcatcagcgagacgaccgcccagcttaaccggcaacgtgaggcgctggcgcgggtcagccagcaacaggcaaagctgagccgggttaaagagcggtatcagaccggtaaatccctcgcggggagtgcggcggcggctggtgctgccggtgtcggaattgccacggctggcacaatggccggtgtaaaactgctgatgccaggctattcgtttgcacagaaaaactctgagctgcaagccgtgctcggggtcgaaaaacagtcgcccgaaatggaggcgttacgcaaacaggccagacagctcggagacaataccgccgcatctgcggacgacgcagcgagtgcacaaatcatcatcgccaaaagtggcggggatgctgatgccattcaggcggcgacgccggtcacgctgaatatggcgctgtcgaatcagcgctcaatggaggaaaacgccgccctgctgacagggatgaaatctgcgtttcagctttccaatgaccagatcgcgcacattggcgacgtgctgtcgatgacaatgaacaaaaccgccgccgactttgacgggctgagtgatgcgctgacctatgccgcgccggtggcgaaaaatgccggggtcagtatcgagcaaaccgccgcgatggtcggtgcgttgcacgatgccaaaattaccggctcgatggcgggtacggggagccgtgcaatcctgagccgcctacaggctccgaccggtaaagcctttgaggccatcaaagagctcggtgtcaaaacctctgacgccagaggaaacacgcgcccgatattttccatcctgaaggaaatgcagcgcagttttgagaaaaacaatctcggtaccagccagcgcggcgagtacatgaaaaccatctttggtgaagaggccagctcggcggcggcggtgctgatgaccgcagcgtcgaccggcaagctcgacaaactcaccgcagcgtttaaagcctcggacggtaaaaccgaggagctggtcaaaatcatgcaggacaatctcggcggcgactttaaagagtttcagtctgcttatgaggccgtgggaactgacctgtttgaccagcaaaacgacgctctgcgcaaactgacgcagacggccacgcgatatgttctgaaactcgatggctggatcacccgcaataaatcactggcgaccactatcggtgttgtaggcggtggcgcactggcgctgattggtgtgattggcgggattggcctgattgcgtggccggtggtgatggggattaacgccattatcgccgccgcaggtctgctgggaacggtctttaccgttgccggtggcgcaatagtgactgctgtcggtgcaatcagtctgccggtggtcgcggtcgccggtgcggtggtggccggggcgctcctgattcgtaaatactgggagcccatcagcgcattcttttcgggcgtggtggaggggcttaaagcagcatttgcgccggtggcggaaatcttctcgccgctgacgccggtgtttgattccatcatcgagaaattgcgcggggtctggcagtggttcactgacctgatagcaccggtcaagacaacgcaggaaacgctggaccgctgcaaatatgtcggcgtggcgtttggcaaggcgctggccgatgcgttaacggctcccctgaacgtctttaacagcctgagcggcaaagtcggctggctacttgaaaagctcggggttatcaaaaaagagtcggacggcctcgaccagactgccgctaaagccagtgccgcagccggtgcgcaaaacgtgtcttatattccgcagacgtccgtttatggcggttatcagatgtaccagccagtgacggcgcctgctggccggtcctatgtcgaccagagcaagcgtgaatacaacattaatctgtcgggtggcgttgcgccgggaactgacctcgaccggcagctccgggaagcagtcgaaaaactcgaccgggaagaaagagcacgccagcgctcaagtatgcgccatgacggatga

SEQ ID NO: 119192 - DNA, 465 bp, Enterobacter cloacae
atgttaatggtactgggtttatttgtgtttgaacgccgcacgctgccgcatcagtccatgcaatattcgaaggattaccgatgggcgtcaaatgaccgcatcggtaaacccccggcttatcagtatctcggcgagggggaaacctcgcgcacgctttcgggcgtgctgtaccccgaaatcaccggtggacgcctgtcgctgacggccatcgaactgatggccgacgagggcagagcgtggccgctgattgacgggacgggcatgatccatggtatgtatgtcatcgaaaaagtgacccatacgcacaccgaattattcagcgacggcgcggccagaaaaattgagtttagcctcttgctgaaacgggtcgatgactcgctcgcggccatttatggcgacctgaaaacgcaggccgacaatctggtgacatctgccggtaactggattggagggctggcgggatga

SEQ ID NO: 119193 - DNA, 1170 bp, Enterobacter cloacae
atgattacgggtctgaatgttcaggccggggcgcagattgctccggcgtttatgctcacgcttgatggcgatgatatcacgcagaatttcagcgaccggctaatcagtctgaccatgacagacaatcgcggattcgaggctgaccagctcgacattgagctcgacgacaccgacgggcttatcgagcttccgccgcgcggtgcaaaactgacgctgtggctgggctggcagggctcagccttactgaataagggcagtttcacggtcgacgaaatcgagcaccgtggcgcgcctgatacgctgaccatcagagggcgcagcgctgattttcgcggcacgctgaactcccgccgggaacagtcatggcatgacaccacgctcggtgtcattgttgagaccatcgcggcgcgcaacaagctgacggccagcgtggctgacacgctgaaagcgatccctgtgcctcacattgaccagacgcaggaatccgacgcggtgtttctgtcccgcctggctgaccgtaacggtgcatcagtatcggtaaaagcggggaaactgctattcctgaaagccggtagcggcaggacggccagcggcaagcccatcccgcagatgaccatcgaacgcggcgacggcgaccgtcatcagtttgcaattgctgaccgtgaagcctacaccggcgtaacggctaaatggctgcacacaaaagacccgaagccgcaaaagcaaaaggtgaagctcaagcgcaagcctaaagagcagcacctgcgcgcgttgcaacatccaaaagcgaccaaaaccacgtcaaaggccagagccaaaaaagagcaggaggcgcgcgagggcgagtatatggtcggtgagtctgagaacgtgcttgagctgacgaccatctacgcgacaaaggcgcaggccatgcgtgcagctcaggcgaagtgggacaagttacagcgcggagtggcggagttttcaatctcgctggctattggtcgggcagatttatttccagagacaccgatagcggtcagaggctttaagcgcgttatagacgagcaggcctgggtaatcagccgggtggtgcactaccttaacgggaacggctacacgacgggtttagagcttgaggttaaggtttcggatgtagagtatgaaagcgaagagttaatgcaataa

SEQ ID NO: 119194 - DNA, 606 bp, Enterobacter cloacae
atgggagctactgtaacttttttaacgactgtcataggggccatagttggtggtctaatcgcaggttatttttcttcgaaagccacaaaagacgcacacgctaatcagaagtcaatttcgcaagaaaatgaaactcagattatacggagccttatgcaagcactccatgacgagttagaaacaattttcgataactatcaagaaaatatggggaatcgacttgaatcattaaacgacggtcaacctctcaacttttactatcctttagtaagcgatttctttgcagtttataatggcaatacctttttattaggcagaataaaagataatgatttacggaaaagtatcattaagacttatacattaggcaagggtatggtggattctttcaggatgaataatgaattagtccagaagtttgagcattgggattcagtttatgctgaaacacagtccaaggttcatttggaaagagcgcttgctcaccaccaagggttaatagaatacgcgaaagtactaaagctacaacatgcgacgcttaaacaaaacgttcatgcaactttacgagccctaagaaaaaatggggttttgagtgaaacagactaa

SEQ ID NO: 119195 - DNA, 516 bp, Enterobacter cloacae
atgagctttaactttgataagcatgcatatcctgaaacatttattataaatgaacaacaatttcagggaacaaaaaaaacgggtagtaatcaggtgaaaatcccattcacggttgagcctgacgtagatctgggttcggtcataattcaaaaaatcggtcagcgcgatatttttttaaaagtgattgatcttaatattttactagacagtacaatgaaaataggtactaaacatccacacttactgtcacttgaagttgaaaacatatcatctgaacaacataagcaaaataaaagttcaaacaacgtttttaacataggccacgttagcggttcgcaagtgcaaataggtgaaagtaatcatttgctaatcaatgtttcaatcacagaattggtcgaaaaggttgtagcctcggaggatcctaaggccaaatctgcattgaaagagcttcttaataacagtactgttgctagcataattggtgcaggcgcgtcagcgcttgtgagtatgttgtga

SEQ ID NO: 119196 - DNA, 1416 bp, Enterobacter cloacae
atgaccgacctacccagtaacgttcgctggcaattgtggatcgtcgcgttcggcttctttatgcagtcgctggacacgaccatcgtgaacacagccctcccctcaatggcgaaaagcctgggggagagcccgctgcacatgcatatggtgattgtcgcctacgtgctgacggtcgccgtgatgctgcccgccagcggctggctggcggataaagtcggcgtgcggaacatctttttcaccgccattgtgctgtttaccaccgggtcgctgttttgcgcccaggccaataccctcgaccagctggtgatggcgcgcgtgctacagggcgtcggcggcgcgatgatggtgcccgtcgggcggttaacggtgatgaaaattgttccgcgcgcgcagtatatggcggcgatgaccttcgtcaccctgcccggtcaggtcggcccgctgctgggcccggcgctgggcggtattctggtggagtatgcctcctggcactggatcttcctgatcaacctgccggtcggtattatcggcgcgattgccaccctgacgctgatgccgaactataaaatgcagacccggcgctttgatttctttggcttcatcctgctggcagctggcatggcgacgctcaccctggcgctcgacgggcaaaaagggctggggatctcctccctgtcgctcgccctgctggtagcgctgggtgtcaccgccattctctggtatctgtggcatgccagaggcaacgctaacgcgctgtttagcctgaacctgttcaagaatcccacctaccgtcttggtctgttcggcagctttgccggacgcatcggcagcggcatgttgccgtttatgacgccggtatttttacagattgggatgggcttctcgccgttccatgccgggctgatgatgatcccgatggtgctcggcagcatggggatgaagcgtattgtggtgcaggtggtaaaccgctttggctatcgccgcgtgctggtggccgccacgctcgggctggcgctggttagtctgctgtttatggccgtggcgctgctgggctggtactacatcctgccactggtgctgttctgccaggggatcatcaactccatgcgcttctcgtcgatgaacaccctgacgctgaaagatctgccggacgaactggcgagcagtggtaacagcctgctgtcgatgatcatgcagctctctatgagcgtgggggtcacggtcgccggattgctgctcggcatgtacggtcagcaccatctcagcgccgacacccccgtcgcgcatcaggtctttttatacacttacctcagcatggcggtaattatcgccctgcccgcttttatctttgccagagtaccgaatgacacgaccaaaaacgtcgtgatccgacgcggcaaaaggagtgcaccatga

SEQ ID NO: 119197 - DNA, 3123 bp, Enterobacter cloacae
atgcaggtgatgccgccgagctctacaggtgggccatcacgcctgtttatcttacgtccggttgcgacgaccctgttgatggtggcgatcctgctggccgggatcattggctaccgttttctgcccgtgtcggcgctgccggaagtggactacccgaccattcaggttgtcaccctctatccgggcgccagtccggatgtggtgacgtccgccatcaccgccccgctggagcgccagttcggccagatgtctggcctgaagcagatgtcctcccagagctccggcggcgcctcggtcgtcacgcttcagttccagctcacgctgtcgctggacgtcgccgagcaggaggtgcaggccgcgattaacgctgccactaacctgctgccgtctgacctgccgaatccaccggtttacagcaaggtcaacccggcagacccgccgatcatgacccttgccgtcacctcctcggccatgccgatgacgcaggtggaagacatggttgaaacccgcgtggcgcagaagatttcgcaggtgaccggcgtgggactggtgacgctggcgggcggtcaacgccccgctgtgcgcgttaagctcaatgcccaggccattgccgcgctggggttaaccagcgaaaccattcgcaccgccatcagcagcgccaacgttaactcagcgaagggctcgctcgacggcccaacccgtgcggttacgctctccgccaacgaccagatgcagtccgccgatgagtaccgtcagctgattgtggcctatcaaaacggcgcgccgatccgcctcggcgacgtggcaaccgtcgaacaaggcgcggaaaacagctggctcggggcgtgggccaataagcagcaggcgattgtcatgaacgttcagcgccagccgggcgcgaacattattgataccgccgacagcattcgcaccatgctgccgcagctggtggaaagcctgccaaaatcggtgagcgtgaaagtgctttctgaccgcaccacaaatattcgcgcctcggtgtcagacacccagttcgagctgatgctggcgattgcgctggttgtgatgatcatctacctgttcctgcgcaacgttccggcaaccatcattcccgccgtcgccgtgccgctctcgctggtcgggacgtttgcggtgatggtgttcctcgacttttcgattaataacctgacgctgatggcgctcaccatcgccaccgggttcgtggtggacgatgccatcgtggtcatcgagaacatctcgcgctatatcgaaaaaggtgaaaagcccttagccgccgcgctgaagggcgcaggagaaattggctttaccatcatctcgctcaccttctcgctgattgcggtgctgatcccgctgctgtttatgggcgatatcgtcgggcggctgttccgcgagtttgccgtgacgctggcggtcgccattctgatctctgccgtggtgtcgctgacgctaacgccgatgatgtgcgcccgcatgctgagccacgaatctttgcgcaagcaaaaccgcttctcgcgcgcctccgagcggatgttcgagcgcattatcgccgcctacggccgcgtgctggcgaaagtcctgaaccatccctgggcgacgctcggcgtggcgctcggcaccctggcgctcagcgtgatgctgtggattttcattccgaaaggcttcttcccgattcaggacaacggcattattcagggcacgcttcaggcgccgcagacggtctccttcgccaacatggcgcagcgccagcagcaggtgtctgagatcatcatgaaagatccggcggtggaaagcctgactgcctacgtgggcgtggacggcaccaacccgtcgctcaacagcgcgcgcctgcaaattaaccttaaaccgctcgatgaccgcgacgatcgcgtcaacgcggtaattgagcgactgcaaagcgcggtggcgcgcgtgccgggcattgagctgtatctgcaaccgatccaggatttaaccattgatacgcaggtgagccgcacgcagtaccagtttacgctccaggccacctcgcttgatgcactcagcacctgggtgccgcagctggtggataagctgaaagcactgccgcaggtttctgacgtcagcagcgactggcaggataaagggctggcggcgtacgtgaacgtcaaccgcgacactgccagccgtctgggcattaccatgtccgacgtggataacgccctgtataacgcctttggtcagcgactgatctccaccatttacacccaggccaaccagtatcgcgtggtgctggaacataacaccgagaacacgcccgggcttgccgcgctggactcgatacgcctgaccagcaaagacggcgggattgtgccgctcagcgccattgccagcgtggaagagcgccacaccccgctgtcgattaaccatctcgatcagttcccgtccaccaccatttcgttcaacgtgccggatgggtattcgctgggcgaagcggtggaggccattctgggcgcggagaaagaactcagcttcccgtccgatattcagacccagttccagggcagtacgctggcgttccaggccgcgctgggcagcaccgtctggctgattgtcgcggcggtggtggcgatgtatatcgtgcttggcgtgctgtatgagagtttcatccacccgatcaccatcctctccaccctgccgacggcgggcgtgggggcgctgctggcgctgatgctggcggggagcgaactggacgtgattgcgataattggcatcatcctgcttatcggcatcgtgaagaaaaacgccatcatgatgatcgactttgcgttggccgccgagcgcgagcagggtatggcgccgcgcgaggccatttaccaggcctgtctgctgcgttttcgcccgatcctgatgaccaccctcgccgccctgctgggcgcgctgccgctgatgctgagcaccggcgtgggggccgaactgcgccgtccgctgggcatcggcatggtcggcggtctgctggtgagccaggtgctgacactgtttaccacgccggttatctacctgctgtttgaccgtctggccctgtggacgaaaagccgcttcccgaaacgtgaagaggaggcgtaa

SEQ ID NO: 119198 - DNA, 1398 bp, Enterobacter cloacae
atgttacttccagtggtgatcgcaggaggaacagggagtcgactatggccgatgtctcgcgagttgcagcctaagcaattcctttcattccatcagggcggatcgatgctgcaaaatacgatttcacgcctcgacggtctggatgtgaccgatccgattgttatctgcaatgaagatcaccgttttctggtggccgagcagttgagacaaatgcataagctcgccgggaatatcattcttgaacctgttgggcgcaatacggcaccggctattactctggctgccctccatgcactggaaactggtgaagatcctgtcatgctcattctggctgccgatcacttgattgccgacacagccacattccattccgtcattaccaacgccattccttttgcagaacaaggcaaattggttaccttcggtatcgtgcctacgcagccagaaactggctacggctacattcagcgtggtgaagaacaacatgccgatcagtctaccgcctggaaaatcaagcgctttgttgaaaaaccggatcaggcgaccgctatctcttacctcgaaagtaaagagtatctctggaacagcggtatgtttatgttccgggcctcttcctatctgaacgaagttgcgaaattttgtccgtcgatccttgatgcatgcaaaaatgccatgcagcagcccgtcagcgatctcgattttatcaaactcgataaagagacattcacctgttgtccgtctgattccatcgactatgcggtgatggaacatacagacctgggcattgtgacggcgatggatgcagggtggaacgacgtgggctcgtggtcagcgctatgggaaacctcgtcgcatgatgctaatggcaacgcgctgattggcgatgttttcacccatcagacccgcgattgttatatccgcagcgaagggaaattaaccgcagcgttagggttggacgaccttattattgttaataccaaagatgcgctgctggtttcccataaggataatgtccaggatgtgaaagttgttgttgagcatctaaaagcccattcacgtgctgaatgtcgcgaacataccacgcgttatatgccctggggccatgtcgaaacgcttgttcgggatacgcgttaccgggttaaccgtgtaaccattattcctggtggtgagctctcgcttcagctgcatcatcatcgtattgagcactgggttgtgctgaccggaacggcgctaattggtgtcgaagggaacgaaatttatctcactgaaaatgaatcaacgacaatccctgtgggaaaaaaacataagctctcgaatccaggaaaaataaatctggaaattctggaaattcagtttggtagttatttgggtgaagatgacgtactaaggatttcataa

SEQ ID NO: 119199 - DNA, 1383 bp, Enterobacter cloacae
atggaaaataacaataaaaaattaagttgttttaaggcctatgatattcgggggaaattaggtgaagagcttaatgaggatattgcctggcgtattggtcgcgcttatgcgcaatgtctggaaccaaaacaggttgttgtcggcggcgacgttcgtctgacaagtgagtctctgaagctggctctcgcggaaggcttgatggcgggcggctgtgatgtgcttgatattggactttctggcacagaagagatttacttcgccaccttccatctgggcgttgatggcggtatagaagtaacggccagccataatccgattgactataacgggatgaagctggttcgcagcggtgcccggccgatcagcggtgacacgggtttgaaagagatccagctcctcgcggaaataaatgatttcgccccatctcagcgtatgggaagctataaaaagattaacgttcttaatgagtatgttgatcatttactgggctatatcaatctcgacaatttccgcattaaaccgattaagttagtcatcaactccggtaatggtaccgcggggcacgttattgatgaaattgaaaagcgtttcaaaacggccggcattcctgtcgattttataaaagttcataacgatccggatggtactttcccgcacggtattccaaatccacttctgccagaagcacgccaggataccgccagtgcggttgttacagctgaagcggatatgggtatcgcgtttgacggagattttgatcgctgcttcctgtttgacgagaaagccaattttatcgaaggttactatatcgttggactcttagcagaagccttcctgaataaagagcgtggcgcgaaaatcatccacgacccgcgactgacctggaatacggttgatattgtcgagcgcgcgggcgggatccctgtgatgtctaaaaccggtcatgcttttattaaagagcgtatgcgcaaagagaatgcggtatacggcggtgaaatgagcgctcaccattatttccgtgagtttgcttattgtgacagcggcatgattccatggttgctggttgctgaactggtaataacatccggacgctctcttggctcgctggtggaatcacgtatcgcacgcttccctgtatctggtgaaattaatcgcaaagtggtccatgcatctgcgttaattgatgagattgaaaaccgctactcctccctggctgtggatattgactacacggatggactgagcatgtctttcccgggctggcgctttaacattcgcacctccaataccgaaccgctgctgcgtctaaatgtggaagcagatgccgatctgggtttaatggaagcgaaacgagatgagctgttagggctgataaaaagctaa

SEQ ID NO: 119200 - DNA, 1320 bp, Enterobacter cloacae
atgttagaagtcttattagcggcaatcgtaggtttaattttcttttttgttttcctcgctctgcacctacgcatcaggttgttaatggtgctggtatgtagcattccgcagctctatctggtgcaattaggtggagccgatgttccaatggcatttctgcttccggcattgctcctgcctgaatttattattaatgcaaaccggttcttagcaaaagcaacgaatattatgcttcttggcctgatactcatcagcaccctgagccttgcgtggtcggttgagaaatcgatgggtattcgtgatattgcctatttgtgtgaatttatcgtcatctcaaacgccgtctacgttttagcggtgaaagatcgagttgcattgtataaaactatcaacgttatgttgttttttgtttgcttgcaggcgattacggtcatcacctttagatttaatgagtcactcgaattggcggtagtgttgtcccctataagtaaatatacgatgggaatgaatacgcttcagagcttattagatggagccaggaataacttctacgatccggttaaagcgggtggggttttgttcgttaatgccaatgctgctgcctgttatgcaggaatctcatcctttatggcttggggcatttacaaggcgttgaaatcaaaaatcacgcttatgatggctattctgctctgggcaaccgtattttttaccggctccaaagcgggcgtccttttcgcgatacttatcccggcatttattttctatctgaaacttcagcgttcgacacgcgtcattttgagttcagtaggcgcctcgtttgccatagtattaatcgttataagcgttgttttcagcattaccgaacaaagcgtttttttaaaagaatccacggatacggctgaaacacgttacgagatatggaactatgcatttgacgcatttttaaataatccactgatggggcagggctacggtggttgggaagccgattacagtaagcacactgattatttccttccgccacacaacacgcttatttatctttggtctaagtcaggaattattgcttcaatgctggggctaggttttatcctttgcagcattggggttgctttgagagcaatacgaagtacaaataatgaacaaaaaaacatcggcttttccttcctgatggtgctttcctggctttttgctcacggatttggcgaaaactttggcttaataggtgagcaacaccagatgatcgtgttagccgtaatgcttgggctttgcctggcagcaaatttaccaattaatcggcataatagggtacaggaatga

SEQ ID NO: 119201 - DNA, 1137 bp, Enterobacter cloacae
atgaagacggtcggtattttcagaaaccagctttttaagggttcggaagtttttattcagcagcaggctgaagcattacagtgttttgataaatgctatatcggcagacgcctcatcgggacgaaaccagaaggctcagtcgcatgtgtattgaatgaacatggaaatgtttacggtaaactcgcagaaatagtgaatgcgatcaccacgtcgcagctgccttatcagtctgttttaaaatcacagcccttagacctcattcatgcacactttgcgatcgatggactttatgctctaaagctggcgcagaagaaaggtattcctttggtgacaacacttcatggatttgatgtgacggtcagtaataaggatttactggcgtcacggtcacccgcctggattaattatcttcttcatcaacataaagtaaaaagtcagggtgataagtttatttgtgtttcagatttcattgcccgccaggctctgcaacacggtttcccggaaagcaaaatcattcagcactatattggtattgatgtgaataaatatcagccgcgtgcaaaagaggacgatcaaggcattatccttcatgttgcaaggctggtagagaaaaaagggacagccgttttaatcaatgcagtcaagcaggtaaagttattaaatcctgatgttaagcttgtgattataggagaagggccgttattggatgggctgaaggctcaggtcacatcccttggtctggatcaaaccgttacttttacaggcgcgttgccccacgtcgatgttatggcatggatgcgtaaagctagcatgttggttttaccgagcattacagcgaaaaccggtgatgctgaagggttgggtatggttcttcttgaagcggcagtgaccggtgttcccgttatcggtactcagcatggtgggataccagaggcgattatcgatgagcaaactggatttttagttaaagagcgagatgataaacaattagcggaaagaatctcctttctaatgaaggatgaacataagcggtttgaaatgggtaaaaatgcccgtattttcattagcgaaaaatttaatttgtccaaacaaaccataaaattagaaaaaatatatcaggaactgattcatggctga

SEQ ID NO: 119202 - DNA, 1167 bp, Enterobacter cloacae
atggctgaggaagtaatcatatttgctcgttctcttccattccatcatcttggcggaatggaagttgtagcatgggatttagcggttcagctacaggttaaaggttttaaggttactgtagttaccacggattttgatgaaaatattcctgttttagaaaataacccacaaataataaagctaaaaaatatccctaaggctgcatattcggccggttggtggactgagactgaaaaaatcattgaaacatggggaactaaagataatgtcagtgcggtaattagcattagtgcaggtgcattcagtacacttaaacacaaaaaatctttcccaaatgcaaagtttattatgcaggcccatggcacatcaattggagaattagtttctaagataaaaacacgaaaaattaaaaagattttatccagtgttaaaaacatatttggtttttatttagatgccaaacattactcttacttcgactgggttgttgctgttggagacgctgtaaaaaaagatctaacgtcctttccaacaacgcttatttgcagttacgataaaatagttaaaatcgaaaatggaattgatgagtatttgttctctgatgatatatcccagcgaaatactgtgcgcgagcagttaggcataagctctgaagcaaaagtattcatgtcagcatcacgcctacatgagcaaaagggggttgataaaaatatcgatctttttgctgaaataaaaaaagttaacgtagatgcgaaacttctgatttgtggtaatggaccttatgaaaaacagttgcgaaagaaagttgatgaacttaagttaaatcatgatgtgattttcttgggggctaagacgcgaactgaattggcaagaataatgcaaggtgccgatatttttctattccttaccaaaagagttgaaggattgccattgaatgtactggaggccatgagctcaggattacctcttataatatcggaacatcttacattcaattcgggtgataagatattcaagtgcaatccgagtcatattccttttaaagatgtgcagacttatattaatactctcagcagcaaggaaagaagatcgtttatccccgacaaaaatacattaagtcactctgtaagcgaatatacctcattattcttaagaaattctaaatga

SEQ ID NO: 119203 - DNA, 1494 bp, Enterobacter cloacae
atgaaaaaagctattagccagctgcttggcggcaacatgctttcgaaggttcttggattggtcagggaagttttgatggcaaaattttttggtacaggagatatcaacggggcttaccgtattgcgcaaacgggaaccctagtgccaataaacttcatgaccagtgacagccttaattcagcattcatcccattatataagaaatatctcaccgagaatgaatttcgtgcttcgaccttcaagctctgtatgtttattttttttgcactgatatctgtacttatatttattgtgctgttttttttatcagactattgggtcggtatcatggctcccggaattggcgggaatgcgcgtgagatgtcgactgagttacttaagataatggcaatttgttgtcctttctatcttttttcagcgctgataaattatttatccatggcacatggagattataaacccatatctatgcgggcctccattcagaatgtcggcatgctgttgggagtggttgctgcatattattataataattatctattacttgcatggggttttacaggtagctatataatttttagtatctgggcgcttatccgtgcaagaaagggcactattctagccctccctggtcgttttgatgcggccgaagtcaaattggtaatgaagagtttttggataacgcttcggcccttgcttatactacctctaatattgcaaggtaatattactctggaaagggcactagcatcattaatcagtattgatgtagtgtccggactcgattatgcccggtttattactgacactgttgtttttattttgtctgtgccaatagcatttgctggattatctgaatggtcatcgcagaagccagaagttgttcgagataagataaggtttatttataattggctggcactgcttgttataaacatgtcttttttcatttttttctatgcaaaagacatcgttattctactgtttatgcgtggtgcatttgatcagcactccgtaacggtaacaactgatattattcaaggaatgtgcataggcctttgggctcaggtgataggttatatattcattaaggcattgagcgcacatctcaataataagaaagtattggttgtgatgatggttgcattgctgagtaatgcggttgtcaacctggcgacgtataaaatgtggggtgcatttgggttagggctagggaattcgatatacagtttaatgatgtttatccttagcgcgtgttacttaagaattgcaaaagatctttttcctgtgttaattaaaatttctttggggttaattctttatacatctattatcttgactcttgggcattacattattcaacctgataatgttattttccgactcttgattaatggcgcaatatttgtgatgtttagtctgttatgggcaatgttattcccattgtaccgaaatggtattaaagggattttccaaaaaaagggactgagatag

SEQ ID NO: 119204 - DNA, 1200 bp, Enterobacter cloacae
atgaacaaaaataaagatataaaagacatcgtcgtcttatccacggcagactgggacaacccattctggacaaataaacagcatgttgccttagagctggcaaaccgtggacaccgtgttctttacatagagtctctgggactgcgccgacctagtgtaaataagaaagacctttcgcgtatcttccgccgggttcttaaagcgattaaagcacctcgaaaagtgcgcgacaatgtctgggtatggtcaccaatttccatcccatttaataactacgctattgtgcgtaagcttaataaactgattttgagcagcgcgctcaaattctggtgctggcgtttaaaattcaaagacgaaacgctatggacctataacccgttgaccacgcgttttctggagccgggtgatttcggttatgttgtttatcattgtgtcgacgaaattaaagctcagcctggaatgccggtagagatccttcaggatgcagaggaagagcttgtacgtcgcgcagacattacctttgtcacttctctgacgcttctgaagtcaagaaagcattggagcgatgaggtctattacttctctaacgtagctgactataatcacttttcaaaagcgttggatgatcaaatgcccgttcctgccgacctgaacgcgatcccggagccaagaattggctttattggcgctataagcggctataaggtgaatttctctctcctggaagcgattgcagaagctcatcctgagtggtcgctagtgatgattggcgatgttggcgagggagatccgaacactgatgcgactcaacttacccgtcacaaaaatattcatttaattgggccaagggcgtaccagcagttgcctggttacctgaagggctttgccgcaactttgctgcctaataatttgaatgaatatactgcttcaatgttccctatgaagttctttgagtatctggcggcagggaaggcagtggtgagtgtcgatttagcgtccttgtgtgactttaaagactattttcgcgttgcccacacccccgttgagtttatttcagctctggaagatattacctctggcgatcggatttctgtggagaaatgtcaggagcttgcccgagaatatacttaccagtcacgcactgaaaaaatgtttaagctaattgatgagaagcgcaatgaaagtagcaatcgttcatga

SEQ ID NO: 119205 - DNA, 1182 bp, Enterobacter cloacae
atgaaagtagcaatcgttcatgagtggttcagttcctatgcgggttctgaaaaagtggttgagcaaattttacgttgttatcccgatgcggatattttcgctgtatgtgatttcttaaagccaaaagaaaaacattttcttaataataaaaaagtcactacaacatttattcagcgtttgccatttgcagcaaaaaaattccagtcttatctgccgttgatgccgttggctatcgaacagcttgatatgtctgcttatgacgtagttatttcaagcagtcatgctgtttccaaaggggtgatcactggccctgaccaaattcatgtgtcgtatgtccattctcctatccgttacgcgtgggatttccagcaccagtatctgcgggaatccggcctgaacaaaggtttgaaagggtggcttgctaagtatctcctgcataagattcgtatttgggattaccgtaccgctgcgggcgttaatcattttattggtaactcacggtttattgcgcgccgcattaacaaggtttatggcagacaagcagacgtcatctatccgccggtgaatacggataagttcgaattcagtgacaaaaaagaggatttctatctggctgcttgtcgcatggtgccttataagcgtgttgatcttattgttagtgcgtttgccaaaatgcctgataaaaagttagtggttatcggtgatggttctgagatggataagatcaaacagctggcgatggataatatcacgctacttggctatcaggatgacgctgcaatggtcgactatatgaagcgtgctaaagcttacgtatttgctgcagaagaggattttggtatctcgcctgtagaagcacaagcaagcggtacgccggtcattactttcggtaaaggcgggtgcctcgaaacggttaaaccccttggtagcgataaaccgactgggctgttcttctttgaacaaaccgcagacgccatatgcgaagcagtgaatacctttgaaaaatacgccgatgaaattaagccagaagactgtcgcgaacatgctttaacattttcagagcagcgtttccgtgacgagattagtcagtatgtcgatagtgcctgggctcaatactctgagtcgctgatcaatactcaggctgcgcgagtacagaacagttatactcatccggaaaaataa

SEQ ID NO: 119206 - DNA, 1437 bp, Enterobacter cloacae
atgaaaatcagcgtatttaaagatcaaaagaaagaatttatttgccgtggggccttaattgcatcggatttattttggcttaatgtttctttggggctttcctttttaaccgttatgttttttattggcgacctgaatacctttatgccaattctacaaattgatgtgagggtgttgtcacactttattctgacagtaatgtgtgttttttggtttggcgtccgcttacgtcattatgcacaaaagaaacccttctggtctgaacttaaagaaacactgcgtactattgtcatcttttcgatcttcgatcttgcattagtggcattttctaaatggcacttttctcgctatatttgggcctactgttggctatatgccatcattatggttccgttatcgcgtgaatttacaaaaatcattcttaacaaatttggctactggaaaaagcgcaccgttattttaggtaccggacgaaatgcgcgtgaagcctattatgctttacaaagccatgaggtgtctggtttcaaaattgatgcgttttgtgattttgatgcgacagccgatattatggaagagtgtccgatcgttaaagatgaagagacattgcttactcattataattcgttttcaactcagttcgtagtcgcgtgcgattttgacgaaaaggataaatttgaaaactggttacgattccttgcgaaacataagtgccgtaacgttataattattccttctctgagaggatttcctttatacggcactagtatgtcatttatatttagccacgaagtattacttcttcaggttcacaataatctgtctaaactgacctcgcgctttattaagcgtaccttcgatatcgtctgcaccttaggcattcttcttgtttcatcgccactgctggtttacctgtggtataaagtttcccgtgatggtgggccggctatctatgctcatacgagaattgggcgccgtggtgagaaatttgactgttataagtttcgctctatgaatatcaattcaaaagagatccttgcagaattacttgagaaagatcctgaagctcgtgctgaatgggaaaaagattttaagttgaaaaacgatccgcgtattactgccattggtcacttcattcgtaaaacgagtcttgatgagttacctcagttatttaacgtacttaaaggtgagatgagcctggtcggcccgcgtccggtcatccacgaagagctggaacgctatgccgatgacgttgaatattatctgatggtaaagccaggcatgactggcctgtggcaggtgagtggacgtaacgatgttgactacaccacgcgtgtttattttgactcctggtatgtcaaaaactggtctttgtggaatgatatcgtcattctcttcaaaaccgtcaatgtggttctgttgagaaaaggcgcttactga

SEQ ID NO: 119207 - DNA, 1032 bp, Enterobacter cloacae
atgaaagcctttgtttttgttaatgataacggcgctgcttttagccgttataaaaaaaatgagatccctgcgcagttcgtgtacggcgtatccaaattagaaaagatgggctttgaggtaatggtcggtcgggggaatttacttaatgatcttatttcatattggaagttcaaaccagatttgttctttatgccttttattaaaagaaaaacgatgcttttttatattctggcacgtatttttttatttaaaacaaagtttgcgggttggatgcatctcgatgttttcgcccctccagtgtctcgattaaagaaagtaatacattcattgcttctgccatttttaaagtgttatgtaagaaaaattgatgcgattttctttctttcggaaaagtcacgcgatgaaatcaaggcctcaaggggacttcattctcatcaatgtcactttataccatggggaggggatgcaactttctatgcaccttttattaatggattacataacgagaatataatttcgacagggcgtgaaaatagggatctgccgtctgtaatgtcatcggtaaaaaatagcgacgttacaattgatatctataccagcgatttaaatttgcctgatagctatgcaaatgtaaatggcgacattaggataaataaaggtcgctgggcatatacagacttgcttgagaaagtaagtgcatcaaagagtatgattatccctattaaaacagataagatcaattattgtgtcggattgtcttcattgattgaggctatcgctttaggcgtgccagttattgctacatacaacccttactggtatgtcgatattgagaaagagaagtgcggtatttatattaaagataattctttaattgaatggacgcgcgctctagaaaagttaaatagggatcccgaattggttgctcaaatgtctaaaaatgcattgaaaacattcgtagaaaaatgtgactttgtccgtacggaagagatgcttgcaatgcatatagataatatactcaaaaaaaagtga

SEQ ID NO: 119208 - DNA, 978 bp, Enterobacter cloacae
gtggttgattgtttaacctatgcaggtaatgttgagtctctggcaccagttgaaaaaaattcacgatactcattctctctaactgatattactaatgcgaaagctgttgcggatattttcaattccttccagcctgatatcgtgatgcatttggctgctgaaagtcatgttgaccgttctatcgacggacccgcggccttcatccagactaacgtaataggtacattcattcttcttgaagcatcgcgtcagtattacgcatcacttgatgatgataggaagaaggtttaccgcttccatcacatctctactgatgaagtttttggcgatcttcacgatgctgacggattattcactgaagaaacaccttatgcgccaagtagcccttactcggcctctaaggcgggtagcgatcatttagttcgcgcctggaatcgtacctatggtttaccaacggtgattaccaactgttctaacaactatggcccctaccattttccagagaagttaattccgctcattattcttaatgctttgtcgggaaaaccgctcccggtctatgggaacggcgagcagatccgcgattggctgtatgttgatgatcacgcccgcgcactgtacaaagtggctacagagggcaagatcggtgatacatattgcattggtggtcataatgaacgtaaaaatattgatgttgtaaaaactatttgcgcaattcttgataaaatcatcgataaaaaaccaaacggtattgtcaattttgcagagcttataacttttgttgccgatcgtcctggacatgatcttcgttatgccattgatgcaactaaaatgaaaaatgatctcggctgggagcctctagaaacctttgaaagcgggatcgaaaaaactattcaatggtatcttaataatgaaggttggtggcagcgtgttcttgatggctcttacgctggtgaacgtcttggcctgaacaaataa

SEQ ID NO: 119209 - DNA, 867 bp, Enterobacter cloacae
atgaaaggaattgttttagctggcggttcaggtacacgcctgtacccgattacacaaggtgtgtctaagcaactgctccctatatatgacaagcctatgattttttacccagtatcggtactcatgcttgccggtattcgggatatcctcattatcaccacacctgaagatatgcctgctttccagcgcttaatgaaagatggctcgcagtttggtgttaatttcacctacgccgtgcagccctcaccagatggcctggcacaggcatttactatcggtgaaaagtttattggcgacgagccttgcgcattagtgttgggtgataatattttctttggtcaaagtttcggtatgaagttgaatgcggcggcaaagaaaacgtcaggggcaactgtttttggttaccaggttcaggatccggagcgctttggtgttgtcgagttcgatgaacatttcaaagcattatctattgaggaaaaacccctcaagcctaaatcaaactgggcagtcactggactctatttctatgacaataatgttgtcgacatggttaaggaaataaagccctctgctcgcggtgagcttgaaatcacaactctaaatcagatgtatcttgaccggggtgagcttgaggtggagttattaggtcgtggatttgcctggctcgatacaggtactcatgatagcttgattgaagcttctcagttcattcataccattgaaaaacggcagggtatgaaagtggcatgccttgaagaaattgcattccgtaataaatggctcagttcggacgaaatagctgttcaggccgatctgcttcagaaaacatcttatggtcaatatttgaaaatgttgattggacaataa

SEQ ID NO: 119210 - DNA, 897 bp, Enterobacter cloacae
atgccaatgaaaattttacttgtaggaaaaaacgggcaggttggatgggaattacaacgttctctttccactcttggagaagtcatcgcagtagattatttcgacaagcatttatgtggtgacttgactgaccttcctggcatcgcacaaaccgtacgattggtgaaacctgacgttatcgttaacgcggcagcgcataccgctgtggacagagccgaacaagaacgtaacctgtctgagttgctcaatcagaaaggggttgcggttctcgctgaggagtcagcgaaattaggtgcgctcctaattcattactctacagattatgtgtttgatggtgagggcgatcattatcggctggaagatgaggcgccagcaccgttaaatgtctacggtgagactaaattagcaggcgagttggaaattacgcgccttaatccccgacatctcatattccgcaccagctgggtttatgccactcgtggtaataattttgcgaaaaccatgctgcgtttagctcgtgagaaagagaggttgtccgttatcaacgaccagcatggcgctccgacaagtgctgaattattggctgattgtactgcactggcaattcgagaagagcagaataataaatctgttgttggtaaataccatttagtcgcaagcggggaaacgacctggtttgattatgcaaattttgttttcgaaacggctaaagctcagggtgagcctcttcttatccaggaagttaacggcatttctaccagtgagtatcctacacctgctactcgtccgttgaattcgcgcctctcaaatcagaaattccagcgtgtgtttaatgtgacacttccagactggaaacaaggtgttgaacgtgtggtaatagaagttttggggaaataa

SEQ ID NO: 119211 - DNA, 549 bp, Enterobacter cloacae
atgaaagtcattgatactgaaattcctgatgtaaaaattatcgagccggtcacttttggtgatgaacggggtttctttatggaaacctggcaacaaaagaaattttgtgaattggtatgcgaacgtaacttcgtgcaggataaccactcaaaatctgcaaggaatattttgagaggtttacattaccagactcaaaatccacaaggaaaattggtacgtgttgtcagcggagaagtctttgatgttgctgttgatatgcgaaaatcatcagccacgtttgggcgctggacaggtattatgctttccgctgaaaacaaacgtcaactttggatccctgagggatttgctcacggtttttacgtcttgtctgaaagcgctgagtttgtctataagtgcactgattattataaccctttgtctgaacattccctattgtggaatgatgattctgttgggattaagtggccacttattgatggtgagttacccctgctgtcatccaaggatagtttaggcaagacgttcgccgattccgtctattttgactaa

SEQ ID NO: 119212 - DNA, 660 bp, Enterobacter cloacae
atgcgcattttactggtagaagacgacaagctcatcggcgatggcatcaaagcgggcttaagcaaaatgggctttaacgtggactggtttaccgacggtaaaaccgggcaggcggccctgtacaccgcgccgtacgatgccgtggtgctggacctgacgctgccggaaatcgacgggcttgagatcctgcgcgcctggcgcgaaagcggtaagagcgaaccggtgctgatcctcaccgcgcgggatgcgctgaatcagcgcgtcgaagggttacgcctgggggcggatgattacctgtgtaagccgttcgcgctgattgaagtggcagcccgcctcgaagcgctggtgcgccgcagccacgggcaggcgcgcagcgagctgcgtcacggcaaggtcacgctcgatccggcaagtctcgtcgccacgctggagggcgaaacgctggtgctcaaacccaaagagttcgccctgctggaactgctgatgcgcaacgcgggccgcgtgctgccgcgcaaggccatcgaagagaaactctacaactgggatgatgacgtctccagcaacgccgtcgaagtccacgttcatcatttacgccgcaagctcggcagcgaatttatccgcaccgtgcacggcatcggttataccctgggtgacgcatga

SEQ ID NO: 119213 - DNA, 528 bp, Enterobacter cloacae
atgaaaatagcttgtcttggctggggttcgttaatctggaaaagcggcgcgttaccggtagccggtgagtggcagaccgacgggccttctttgcccgtcgagttctgtcgggtcagcgatggcggtgaactggcgaccgccatctgtatgaatgcccctgccgtgccggtgctttgggcatggctggaggccacaacgttgagcgtggcctgccgcgctttgcgtgagcgcgaagccattcccgaggatcgctgcgatggcattggctcgctgctaatcaccggacgcgacacgggtatcctgacaacatgggccagggagaaaggtattgaagcgatcatctggaccgggctcccgccgagaagcgcgtcacaggaaggcagggttcctgccgtggacgaagccatcgcttatctcgacggcctcagcggagagacccgtagccatgcgcaggactatatttgccgcgtgcctgcccagcttgatacgccctaccggcgcgtcattaaagacgtgcttggatggtaa

SEQ ID NO: 119214 - DNA, 189 bp, Enterobacter cloacae
atggtggagtatcggaaagcagcccaccagcgtggggcaattaccatcattacgaataatggtgcgcccagcttatacgagctctaccgcgataatggctttacggtgcatgagttcgataaccagcaaaaaatatcatgtaaggatgataatcgaaatcgcgtcaacaatattattgctgtgctttag

SEQ ID NO: 119215 - DNA, 807 bp, Enterobacter cloacae
atgaacatcgtagaagaagcggttaaaagcatcaatacaatgtacgaaggcggctcagcacctctctctgaatataaattccagtctcatgaacttgcccaaaaacaagcgcaaatgttattcaccaatgatcggggtgatatcgaaaaagacgctcaattcagaatgaatcagacgggtaacattttctatgtttcaacttcaccagaactaaccgaaaaaacaaaaaaactattcgatagtgtaacggttttattcgcggcaatgacggcagggttaaacgcatgtgaaaaatcactgtttgactatgacacctggcgctcggtcattggcaaatcaggcttctttgttgaagtacagaaaaccagaaatatgatgacgattaaaaatagcggcgttactgtaaatacccagattgttcagcagttgctgccagggctgacttctggcagcgcaatggaaattgccaagggcgttctgagtgcagttaatggtgagtttcaggcgtctgaacgtgcggaagaagctaagatcggacatctccttttcatctgtgaagagctttttggtgccccaagcgtcacagtgcgcttgttctttgcgtctaaaaaatcgcatagcacctttacgaactctccatgccacaagtcagtttcgactacttttgaacaactgcaagaagcgaatacatacctgttcgtatctcctgaaagtatcgctgaatatgcgaagcgattcactgagcaaccggaagagtatttaaatctcattgagcgtttcaaagaaatgatcaacccgcgtaaataa

SEQ ID NO: 119216 - DNA, 396 bp, Enterobacter cloacae
atggttaatccattcaaaatcatattagtttctctggcaatcgtaattatttttgcgaatcagtccattgcaaacatatatgtgtgtgaccaagatccgtgcactacctggaaaccaataacagatgcacaacgggcaatggagtctttcgatgagttaaaaacaagggttgatgtggctttaataaattcatcaaatgatcgtattaaaaaaggtgtctccgatgcgaatttgaatctttatctaaagtcgaatttgtggcataagggtggtagtgcgcctaaatcatacgagcatctgacagcttatgtctatgaagataatgtacatgtagagacctgccatatccattcctacaagacgaaactattcggaccttacgtcaccacttgttaa

SEQ ID NO: 119217 - DNA, 162 bp, Enterobacter cloacae
atgaacgtaaatcttcgtgatctacttctgtctgttgtcatcattgttgcgctggtgttcgggggagttcaatttaaggctgatagtcttaagttcaaaaccttcgaggctcaaggtgttgagtttaacctgcaaggcgtgatgccgcacaccaagcagtaa

SEQ ID NO: 119218 - DNA, 717 bp, Enterobacter cloacae
atgccatttgacaagcacagcgacaaaaacagctcccctgatggcgtcgctatatctactcacccctggtacacctcaacctcatgggagttgtgtgcatgggcgatccggtctcctgcggttctgtggttgcatccggcgatccgcttatcttcattctcagaggccttcatgcttgaacaacagtaccagatcgacgctttcaatgcgcaatgcgtacgcaaagctggtgggcttaccccgcccgattctgctacgctgtaccgctcagcagtaaagcgtataaatcagctcgtttctgaactcagcgcacttttacccgaaacgatcacttacccgcccagcctcgctggggtcatttcgacgctcgacggtattactgaagacctcactgatgccgcaaccctttttgaggcagtgattgagcttatcgaaagcaatgcagatgtcgccacgccgcaagctgtactctccctcgttaatagcgtgtcaacttcggatccgaaattcgcattcaccattctgaaccacattttgatagccgtgggcacggcgcacccagcagatcctggggcaccggtcgttatcccagaggatttactggatgacgtttcagatgccgttgaagcctttgcggaagataccgggccatacagcaagcacatacggagcccaccacacgtagcccggcctgtcgcttcccctcacaaaccctaa

SEQ ID NO: 119219 - DNA, 1560 bp, Enterobacter cloacae
atgttcatacatgacgtaaagatcggcacgaaattatttctggcgtttggattatttattgtcctgatggtagtcagcgcaagcttgtctctgatgagcctgaatcgggcaaacaatggaatgcaaaccattcttaccagcgactatccaactacggtaaaagcgaaccagttaatcgacaacttccaggaatttatcagcacgcagcagctcatgctgctggacgaacagggaacgtacacgacgcaatcagaacagcgtctgaaggcgataagcgagcgcatcaccgcaatcctgagcgagctggacaacgctctcaaggataaaaaatcccaacaggtgctggcggacatccacggcgtacgccagcaatatcttgactcgcgctaccgcattttgcagtccgtgcagaataacgaccgtgcgggcgcgataaacgagatgatgaccaacaccctggacctgcaacagtcttataaagcgaaagtgcaggcgctgattgcgatccaggatcatgaaatgcagagtgcgggcgagcaggtggaaggcgatttccgcactaatcgtctgctgctgatcctgattacgcttttcagcgtcgcggcagccagcctgactggctggttcattgtgcgatccattacccgcccgctgaacgacgcggtgaattttgcggaggccatcgccgatggcgatctcaccggcagcattacctcgcacggtaaagatgaaaccggactgctcctcaccgcattgatggagatgaaaacgcgcctgctggagattgtgcagcaggtgcaaaccggatcggaaaacatctccagcgccgccgcgcagattgtcgcgggcaaccaggatctggctgcccgcacggaggagcaggccagttccgttgaacagacggccgcgtcgatggagcagattaccgccacggtgaagaacaccgcgtcccacaccggagaagcgacgaacctgtctgccgatgcggctgccgtggtcaaaaacaacggcgagatgatgaagcaggtcaccagcaagatgcgcctgattaacgaaacatcgaacaggatgtccgacatcatcgacctgatcgacgccattgccttccagaccaacattctggcgctgaacgcggcggtcgaagcggcgcgcgcaggtgagcatggtcgcggctttgcggtggtggcgggtgaggtacgccagctcgcgcagaaaagtgcaacatctgcgagtgagatccgccagctgattgaaagctccacaagccagacgcaggacggcatgaaccttgtggagaaagccagcgggcttatcaacggcatggtcggcaacgtggaagagatggacgtcatcctgcgtgaaattcgccaggccagccatgaacagacggaaggtatctcgcagatcaacagcgcgattggcctgatagacgccaccacccagcagaactccgcgctggtggaggagtccgttgcggcggcggcatcccttaacgaacaggcgatgcacctgaaagagctggtccgcgtgttccgcgtgagcgacggcgtgctggcttaa

SEQ ID NO: 119220 - DNA, 687 bp, Enterobacter cloacae
atgcttaagctgaaacagcaggtctttgaggccaatatggatctcccgtgctatggactggtgacgtttacctggggcaacgtaagcgccatcgatcgcgatcgggggctggtggtgattaagccgagcggcgtggcctatgacgccatgaaagtggacgatatggtggtggttgacctggaaggacacgttgttgaaggcaaatggcgtccttcttcagatacggcaacccatctggcgctgtaccagcgttacccgtccctgggtggtgttgtgcatacccattccacgcacgccaccgcctgggcacaggccgggctggcgatccctgctttgggtacgacgcacgcggactacttcttcggcgatattccctgcacgcgggcgttaacgcaggctgaggtcgaaggcgagtacgaacttaacaccggcagggtcattatcgaaacgctgggtgagacggaaccactgcatacgccgggtattgtggtgttccagcatggtccattctcctggggtaaagatgcgcatgacgccgtgcataacgcggtggtgatggaagaggtggctcggatggcgtggattgcgcgcggcattaacccacagcttcagggcattgatgattatctgatgaacaagcatttcatgcgtaagcacggcccgaatgcttattacgggcagaagtga

SEQ ID NO: 119221 - DNA, 450 bp, Enterobacter cloacae
atgcaagttattctgcttgataaagtagcaaacctgggcagcctgggtgatcaggtaaacgttaaagcgggttacgctcgtaacttcctggtaccacagggtaaagctgttccagctactaagaaaaacgtagagtttttcgaagcacgtcgtgctgaactggaagccaaactggctgacgttctggcggctgctaacgctcgcgctgaagcaatcaacgcactgggcaccgttaccatcgcgtctaaagctggcgacgaaggtaaactgttcggttccatcggtacccgcgatatcgctgatgcagtcactgcagcaggcgttaaagtggctaagagcgaagttcgcatgccgaacggcgttctgcgtaccactggtgagcacgaagttgacttccaggttcacagcgaagtgttcgctaaactggttgttaacgtagtagctgagtaa

SEQ ID NO: 119222 - DNA, 1944 bp, Enterobacter cloacae
atgattaagtttagcgcaacgctcctggcaacgctgattgcggcaagcgttcaggcagcgacggtggatctccgcattctggaaaccaccgatctgcacggcaacatgatggacttcgattactacaaagatacgcctgtcgaaaaattcggactggtacgtacggcaagtttgatcaacgccgcccgcagtgaagtgaaaaacagcgtgctggtcgataacggggacttaattcagggcagcccgctcagcgactacatggcggcgaaggggctgaagaaaggcgagatccatcctgtttataaggcaatgaatacgctggactatgccgtcggcaacctgggcaaccacgaatttaactacggcctgaaatacctgcacgatgcgctggcaggggcaaaattcccgtacgttaatgccaatatcatcgacgttaagacgaaaaagccgctctttaccccttacctgattaaagagaccgaggttgtcgaccaggacggtaaaaaacagacgctgaaaatcggctatatcggctttgtgccgccgcagatcatgacgtgggataaagccaacctcgacgggaaagtaaccgtcaacgacattaccgaaacggcgcgcaaatacgtgccggagatgcgggcgaaaggcgcagatgtggtggtcgttgtggcccactctggcctctcggccgacccgtatcaggcgatggctgagaactccgtgtattacctcagccaggtaccgggcgtcgatgcgatcctgtttggtcacgcccacgccgtcttcccgggcaaagatttcgccagtatcaaaggcgcggacatcgaaaaagggacgctcaacggtgtgccatcggtgatgccgggcatgtggggcgaccaccttggcgtggtagatctggtgctgaataacgacagcgggagctggaaagtcacgcagtcgaaagcggaagcgcgtccgatttatgatgccgctgcaaaaaaatccctggccgaagaagataaaaagctggtcgatgtcctgaagcatgaccacgacgcaacgcgtgaatttgtcagcaagccgatcggtaaatcggctgataacatgtacagcttcctcgcgctggtacaggatgacccgaccgtgcaggtagtcaacatggcgcagaaagcctatgccgagcactatattcagggcgatccggatctggccaatctgccggtactgtctgccgcggcgccattcaaagtgggcgggcgtaagaacgatccggccagctacgttgaggtggaaaaaggccagctgaccttccgtaatgccgccgatctctacctctatcccaacaccctcgtggtggtgaaagccaccgggaaagaggtgaaggagtggctggagtgctctgccggacagttcaaccagatcgatccgcacagcagcaaaccgcagtcgctgataaactgggacggtttccgcacctacaacttcgacgtgatcgacggcgtggaatatcagattgatgtaacccagcccgcgaaatatgacggcgaatgtcaggccattaatccgcaggcagaacgcatcaaacacctgaccttcaacggcaaagtgattgatccgaatgcctctttcctggtggtgaccaacaactaccgcgcctatggcggtaagtttgccggtacgggtgacagccacatcgcctttgcctcgccggatgagaaccgttcggtgctggcggcgtggattagcgcggagtcgaaaaaagcgggtgaaattcatccggcggtggataacaactggcgtctggcgccgatccacagcgacacgacgctggatattcgctttgagacatcaccgtccgataaagcagccgcgtttatcaaggataaggcgcagtatccgatgaaacaggtcgctacggatgatattgggttcgcgatttatcaggtggatttgagcaggtag

SEQ ID NO: 119223 - DNA, 1911 bp, Enterobacter cloacae
gtgcgatttccgaaccaacgtttagcgcaacttttcgatctgttgcaaaacgagacgctgccgcaggacgagctggcgcagcggctgtcggtctccacgcgaaccgtccgggcggatatcaccgccctgaacgcgctgctggccagccacggcgcgcagttcattttgagccggggcaacggctatcagctcaaaattagtgatgtggtgcgctatcaacaattgcagtcgtcccacccgcgcgcgctgcgcattccgcgaaccggaccggagcgcgtgcactatctggtggtgcgttttctgacgtcagccttttcccttaagctggaggatctggccgatgagtggttcgtcagccgggccacgctgcaaagcgacatggtggaagtacgcgagtggttccaccgttacaacctgacgctggaaacccgcccgcgccacggcatgaagctgtttggcagcgagatggcgatccgcgcctgcctgaccgacctcctgtgggagctggcgcagcaggatagccttaacccgctggtgaccgacgtggcgctcaacgcgggcgtggcggaaaagatggtccctgtcctgcacgacgcgctgacgcgccatcacattcgcctgaccgatgaaggcgagctgttcctgcgcctgtactgcgcggtgtcggtgcggcgcatcagcgaggggtatccgctgccggaattccacgctgaagacgtggaagagaacgtacgcgaggcggcgaaagatatcgccgtggctatccaggagctggcgggcaaggcgctttcaccatcggaagagagctggctgtgcgtgcacattgcggcgcggcagatccaggagatcgcccccagcgccattaatgctgacgacgacgaagccctggtcaactatatcctgcgctacatcaacacccactataactacaacctgttgagcgacgagcaactgcatgcagatctgctcacgcacatcaaaaccatgattacccgcgtgcggtatcaaatcatgatccccaatccgctgctggataacatcaagcagcactacccgatggcgtgggatatgaccctcgcggcggtgtcgagctggggcaaatacacgccgtatgtgatcagcgaaaacgaaattggttttctggtgctgcatatcggtgtcggtctggagcgccactacaacatcggctaccagcgtcagccgcgcgtgctgctggtatgtgacgccggtaacgcgatggtgcgcatgatcgaggcggtgcttcagcgcaaatacccgcagattgaggtgacgcgcacgctcaccctgcgcgagtacgaacttgccgatgccatcggcgaagacttcgtgatctccaccgctcgcgtgagcgaaaaatccaaaccggtggtgataatcgccccgttcccgaccgattatcagttagagcagatcggcaagctggtgctggtggaccgcacccgcccgtggatgctggagaaatacttcgacgcggcccatttccgcattctcgacaagcctgtcgaccagcaaacgctgttccgcgaactgtgtgggcagcttgaaagcgaaggctttgtcggcgcggaatttctggaatcggttatcgagcgtgaagctatcgtcagcactatgctcggcgacggcatcgcgctgccgcactccctcggcctgctggcgcaaaaaacggtggtctacaccgtgctggcgccgcagggcattcagtggggagatgaaaccgcccatgtcatttttctgctcgccatcagcaaaagcgagtacgaagaggcaatggcgatttacgatatttttgtcactttcctgcgtgaacgcgcgatggcgcgcctgtgccagtgcgaggattttgcggcgtttaaggctgaggcaatggagagtgtgagtcggttttga

SEQ ID NO: 119224 - DNA, 2709 bp, Enterobacter cloacae
atgctgaaaaatatcacccggcagctgttcgcgcagctgagccgccacctgccacatcgcctgattgcgcgcgatccgctgccaaatgccaacaccctggcgggcgcggaaatccccgcttccctgaccgagcgctgcctgaacgtggcggcgatggatgaaaacgaagtctggcgcgcctttggcggccacccggaagggctgaacgcgcaagaagtgtcaaaaatccgcgaggaacatggcgataaccagatcccggcgcaaaaaccctctccatggtgggtccacctgtggctctgctaccgcaatccgttcaacctgctgctgacggtgctcgggattatctcttacgctactgaagatctgtttgccgcaggcgtaattgccctgatggtggggatctccacgctgcttaactttattcaggaagcgcgctccaccaaagcggcggatgcgctgaaagcgatggtcagcaatactgccaccgtgtcgcgtgtgattaacgacctcggcgaaaacgcctggattgaactgcccattgaccagctggtgccgggcgatctggtgaagctggcggcgggggacatgatcccggcggatttacgcatcatccaggcgcgggatctgttcgtcgcgcaggcgtcactcaccggtgaatccctgcccgtagagaaggtggcgaggacccgcgatccgcagcagatgaacccgctggaatgcgacaccctgtgctttatgggcaccacggtggtcagcggcacggcgcaggccattgtcaccgctaccggcggcaacacctggtttgggcagcttgccggacgcgtcagcgagcaggagagcgagccgaacgcattccagaaaggcattggccgcgtcagcatgctgctgatccgctttatgatggtcatgacgccgattgtcctgctgatcaacggctacaccaaaggtgactggtgggaagcggcgctgttcgccctctccgtggctgtcggcttaacgccggaaatgctgccgatgattgtcacctccacgctggcgcgcggggcggtcaaactctctaaacaaaaggtgatcgtcaaacacctcgatgccatccagaactttggcgcgatggatattctttgcaccgataaaaccggcaccctgacccaggacaaaatcgtgctggagaaccacaccgatatcgccggaaagaccagcgaacgggtgctgtacagcgcgtggctgaacagtcactaccagacagggctgaaaaacctgctcgacgtggcggtgctggaaggtgtggatgaagagtctgcccgcatgctctccggccgctggcagaaggtggacgaaattccgttcgactttgaacggcgccgcatgtcggtggtggtcagcgagcagccggacgtacatcagctgatctgcaaaggggcattgcaggagatcctgaatgtttccacgcaggtgcgtcataacggcgagatcgtgccgctggatgagaccatgctgcgccgcatcaaacgcgtcaccgataacctgaaccgtcaggggctgcgcgtggtggcggtagcaagcaagttcctgcccgcgcgggaaggggactaccagcgtatcgatgaatccgatttgatcctcgagggttacatcgcattcctcgatccgccgaaagagaccaccgcgccggcgctgaaagcactgaaagcgagcgggatcaccgtcaaaatcctgaccggcgacagcgagctggtggcggccaaagtgtgccacgaagtgggcctggacgcgggcgacgtcgtggtggggagcgacattgagcacctgtccgacgatgagctggccgagcttgccctgcgcaccacgctgtttgcccgcctgacgccgatgcataaagaacgcatcgtcactctgctgcgtcgtgaagggcacgtggtgggctttatgggcgacggcatcaacgatgcgccagccctgcgtgcggcggatatcggtatctccgtggacggcgcggtggatatcgcccgtgaggcggcagatattattctgctggaaaagagcctgatggtgctggaggagggcgtcatcgaagggcgtcgcaccttcgccaatatgctcaaatacatcaaaatgaccgccagctccaacttcggtaacgtcttcagcgtgctggtggcgagcgccttcctgccgttcctgccgatgctgccgctgcacctgctgatccagaacctgatgtacgatgtctctcaggtcgccatcccgtttgataacgtggacgacgagcagatccagaagccgcagcgctggaaccccgccgatctggggcgctttatgctgttctttgggccgatcagctccatctttgacattctgaccttctgcctgatgtggtttgtgttccacgccaacaccccggaacaccagacgctgttccagtccggctggttcgtggtggggctgctgtcccagaccctgattgtgcatatgatccgcacccgccgcattccgtttatccagagccgtgccgcatggccgctgatcgtgatgacgggcattgtgatggcgctcgggatcgcgctgccgttctcgccgcttgcaagttacctgcaacttcaggcgctgccgctgagctacttcccgtggctggtggcgatcctcgcgggttacatggtgctgacgcagatggtcaaagggttctatagccgtcggtatggatggcagtaa

SEQ ID NO: 119225 - DNA, 2385 bp, Enterobacter cloacae
atgttacggtacagtctcttaaccgccgggcttatgctcggcgcctccgcctttgccgccccggcaggcgaccttcccttaatgccctggcctgcgaaggttgaacgtccgaccacgcagggtgcgctggtgcttaacaatcaactcaccgtgagcgtcatcggcgacgatctgggggatgcggtcaaccgcctgcgccagcgcatcgccctgcaaactggctggacgctacagccgcaggccgaaaaacctgataagccaaccatccgtatttccatcgctgaaaaggtgaagccgcagccgctgccggacagcgatgagagctataaactcacggtggacgccaacggcgtaaatatctccgccaacacccgcttcggcgcgctgcgcgccatggaaaccttgctccagctgatgcagaacggtgccgaaaacacctcgattccgtgggttaccattgaagattcgccgcgcttcccgtggcgcgggctgctgctcgattcagcgcgccatttcatcccgttacccgatatcaaacgccagatcgacggcatggccgcggctaagctcaacgtcctgcactggcatttgacggacgatcagggctggcgctttacctcgaagcgttatccaaaattaacccagcttgccagcgatgggctgttctacaccccggagcagatgcgcgagattgtgcgttacgctgccgagcgcggcatacgcgtggtgccggaaattgatatgccgggccacgcctcggcgattgccgtcgcctacccggagctgatgagcgcgccggggccgtacgccatggagcgccactggggcgtgcttaagccagtgctggatcttaccaaagagccgacctatacctttgccgacgcgatggtcagcgaactggcggcgatcttcccggatccgtatctgcatattggcggcgatgaggttgacgacagccagtggaaagcgaacgctgcgatccagagattcatgcgcgacaacaaactggcggacagccatgcgttgcaggcgtatttcaaccgcaagctggagacgatccttgagaagcaccaccggcagatggttggctgggatgagatctaccatcccgatctgccgaaaagcattctgatccattcctggcagggacaggacgcgctggggcaggtggcgcagaacggctataagggcattctctctaccggtttctacctcgatcagccgcaatccaccgcctaccactaccgcaatgaaattgtgccgcaggggttgaacggcgtggatgtgatagcagacaccgacagcgtccagagctgggctttctcgatgccgcgtctgaaaggcaagccggtggaaggcagctttacgctggtgaaaggcgatgctggctggcgcggattcattgattttgccgggaaatcgcgtcgggcggtggataacattcagtggcgggacgacaatcaggtaacgtttaccgttgatacctggatgggtgaaacgcgtccggtcgtttctgttgagaacgataagctcagcggctatttcctggtgggtaacgcccgctacccgattagcggcacgcgtctggacgaggtgccgaaaggcgttccgccggtggtgccggacccggcgaacgaggccaatctgctcggcggtgaagccgcgctgtgggcggaaaacgtagtcgcgccagtgctggatatccgtctgtggccgcgcgcctttgcggtggcggagcggctttggtcggcgaaggacgtcaacgacatcgacaacatgtatacccggctccaggcgatggacagttggtccacggtatcggttgggctacagcagcatacccagcagcaggtacagttcacgcgcctcgctaataatgcggataccttgccgctgcaaatcctcgcccaggcgcttgaaccggcgcagtattacacccgccagcatcttaagttccaggccggaaactatcatcagtttgagccgctcaaccggctcgctgacgcgctaaacgcggaaagtgcgaccgtgcgtcagatgaataaatgggctgaccgtctggtgagcgatgcggaagacacggagagcgccgacgcgctgcgccacgtctttaaccgctggcagaacaacaccagcgacgtgctggccttgagcgaaaacagctatcagttgaaggccatcaaaccggtaattcaggaggtggacaagctggcctcgattggcctgcggctgacggatctggtggcgcgccagggaacgctggatgataaagagatcgcgtcgatccagagcgaactggataacgcggcgaaaatccaggacgaggtggtgattgcggcggtctatccgctggagacgctgctacgcgccacgcggaatcagtaa

SEQ ID NO: 119226 - DNA, 1968 bp, Enterobacter cloacae
atgaccattgagaaaattttcaccccacaggacgacgcgttttatgcggtgatcacccacgcggcgggtccgcagggcgcgctgccgctgactccgcagatgctgatggaatcccccagcggcaacctgttcggcatgacgcagaacgctgggatgggctgggacgccaacaagctcaccggcaaagaggtgctgattatcggtactcagggcggcatccgcgccggagacggacgcccggttgcgctgggctaccacaccggacactgggaaatcggcatgcagatgcaggcggcagcgaaggagatcacacgcaacggggggatcccgttcgcggccttcgtcagcgatccgtgtgacgggcgctcgcagggcacgcacggcatgttcgactccctgccgtatcgtaacgacgcggcgatcgtgtttcgtcgtcttatccgctctcttccgacgcggcggtcggtgatcggcgtggcaacctgcgataaagggctgcccgccaccatgattgcgctggccgcgatgcacgacctgccgaccattctggtgccaggcggagcgacgctgccgccgaccgtgggggaagatgcgggcaaggtgcagaccatcggcgcgcgcttcgccaaccatgaactctccttgcaggaggccgccgagctgggctgccgcgcctgcgcgtcgccgggcggcgggtgtcagttcctcggcacggcgggcacctcgcaggtggtcgcggaagcgctgggtctggcgttgccgcactccgcgctggcgccgtccggacaggcggtgtggctggagatcgcccgccagtcagcgcgggcggtgagcgagctggataaccgcggcatcgccacgcgcgatatccttaccgataaagccatcgaaaacgcgatggtgatccacgcggcgttcggcggctccactaatttactgctgcacattccggccattgcccacgcggcgggctgcacgatcccggacgttgaacactggacgcgcgtcaaccgcagggtgccgcgcctggtgagcgtgctgcccaacggcccggactatcacccgaccgtgcgtgcgttcctcgcgggcggcgtgccggaagtcatgctccacctgcgcgatctcggcttgctgcacctggatgccatgaccgtcaccggccagacggtgggcgagaacctcgactggtggcagagctcggagcgccgtaagcgcttccgccagtgcctgcgcgagcaggacggcgtggagccggatgacgtgatcctgccgccggagaaagcaaaagcgaaagggctgacctcgacggtttgcttcccgacgggcaacattgcgccggaaggatcggtgatcaaggccacggcgatcgacccgtcggtcgtcggtgaagatggcgtttaccgccacaccggccgggtgcgggtgtttgtctcggaggcgcaggcgatcagggccatcaagcgggaagagattgagcagggcgatatcatggtggtgatcggcggtggaccgtccggcaccggcatggaggagacctaccagctcacctccgcgctgaagcacatctcgtggggcaaaacggtgtcgttaatcaccgatgcgcgcttctcgggcgtgtcgacgggcgcctgtttcggccacgtgtcgccggaggcgctggcgggcgggccgataggcaagctgcgcgataacgacatcattgagattgcggtggaccgcctgacattaacaggcagcgtaaactttatcggtaccgcggacaacccgctgacgccggaagagggcgcgcgcgagctggcacggcggcaggtgcatccggacctgcacgctcacgactttttgccggacgatacccggctgtgggcggcattacagtccgtgagcggcggcacctggaaaggctgtatttatgacaccgataaaatcattgaggtaattaacgccggtaaaaaagcgctcggtatttaa

SEQ ID NO: 119227 - DNA, 762 bp, Enterobacter cloacae
atgccgattattcagtctgttgaacgtgcgttgcagatcctcgacctgttcaacgagcaggccaccgagcttaagatcaccgacatcagcaaactgatggggctgagcaagagtaccctccactcgctgctgaaaaccctccagcttcacggctatatcgatcagaacccggagaacggtaagtatcgcctcggcatgaagctggttgagcgcggtcatttcgtcgtgggctccatcgatattcgccagaaggcgaaaggctggctgacggagctgtcccagcggaccgggcagaccacccatctggggatcctggacggtcgtgaaggggtctatatcgagaagattgaaggcaagctggccgccatcgcctattcgcgcatcggccgccgcctgccggttcacgccaccgccatcggcaaggtgttgattgcctggctgggcgaggccgagctgaacgccctgctggagggctatcaatacaccacctataccccttccaccctcgcctcccgggaagcgttaatgactgccctgacgcagacccgcgaacaaggctacgccctggacagcgaagagaacgagcagggcgtgcgctgcgtggcggtgccggtgtggaaccaccaatcccgcgtgattgccgccctgagcctgtcgaccttgacctcgcgcgtggacgacgccgagctggctaatttccgcgaggagcttcagcaggccgggctcgagctctcacgcgcactgggctataccggctcgtag

SEQ ID NO: 119228 - DNA, 1677 bp, Enterobacter cloacae
atggcactaacagatcgcgctatagtccacgccaagccttgtggcaagccgtataagctcagtgactcgcatggactttacctgctggttaatcctaacggttcaaaacgctggtacatcaagtaccgctttgtaaacaaagagaaaaagctcgctttagggccttatccgcttttgacgcttgcacaggcaagacgcatgcgtgaagaggcccaattactgctgatttccggcatcgatccgagtgcacaccgaaaagcagaacgccttgcgataacgccggaacatacgtttgagtctgtggcacgcgaatgggtcaccagtaacgtgaactggtcggcggaacataagaagcgggtgctgcgttatttcgagctttatgtgttccccacgaacggcagctgtgacatcaccaaaatgaaggtcaaagatctgctggtgcccatcaaggaggtggagaaagcgggcaaactggatgttgcttcccggcttcagcagcgcactgcctgcgtgatgcgctatgccgtccagaacggcattatcgatcataaccctgcatcagatttaaccggcgcggtttccacgcccaaagttcgtcaccacccggcgttggatctgaatcttatccctgatttcctggaaagaatcgacgattacaaaggccgtcatctgactcaactggcggtaaagctggcgctgctgctgtttatccgctccagcgaactgcgcttcgcccgctgggatgaaattgacctgcgtaacgccatgtggaccatccctgccgagcgtgagccgatccccggcgttaaatattcagcgcgtggggcgaagatgcactccccacacttggtcccattgtcacgtcaggccatcgaactgctgcacgaggtgcggcagcattgccgaccgggaactgaactggtgttccccggcgatcataactaccgcaaaccgatgagtgaaaacaccatcaacaaagcgctgcgggtgatgggctacgacacccagaaagacgtctgcggccacggttttcgcactatggcctgtagcgcgctggtggagtcgggtctgtggtcaagtgacgcggtcgaacgccagatgagccatcaggagcgcaagcgcgtacgtgccgcgtatatccataaggcgcagcacctagaagagcgccgggaaatgatgcagtggtgggcggattatctggatgcaaaccggttcaggcatgttgtaccgtatggcttcaaaaagtcgccgggaggcgcactcgaccatatgagtttccaggagcgcaatgaccggcagctagaggagctgaaagccagaatactggctgactcggaatggctgacggcgtctgaattatccgcaaaagcgggctttcgttccgccgatcctgatgctggcccgaaaggctggaaagccgctgggaagatattctcgctgaaggtcgatggtgaagatttgtacccggattatgttctggatgagaaaatgaggcccctcaaggttgtcaggctgattctctcgctgtttaaagaacgtaagaccccatgggggctagcaatctggttcggctcggcaaatcgcaggttgagaggagggaagccgaaagatttgttggtgtcaaagtcagagttagtactgatggcggcgcaggatgaggttgagtcgggggagtag

SEQ ID NO: 119229 - DNA, 327 bp, Enterobacter cloacae
atgcaattgttcgccttacgtgtgttaatgagaccacgcgaccctgatcttttttcaaagggatctgttcaaaaagacattgtgcattttgaaaatgccatagtattcagcgcgcaaaagttacatctgacatcatcaacaccatccgttcataagaaaaccagctacaccctgaagctgagtataaaacccactgaaggtgtcatggctggggtcatatcaaaacagcaaaaaattaaaggacatgataaggattttcgcgaattcgatgtagacaattatccacctatcgtatggatctgggatagtgaatcgccacgggtttaa

SEQ ID NO: 119230 - DNA, 516 bp, Enterobacter cloacae
atgccgttattagatagctttactgtcgaccatacccgtatggaagcaccagcagtccgcgtggcgaagaccatgaacacgccgcacggcgacacgatcaccgttttcgacctgcgcttctgcgtgccgaataaagaagtgatgccagagaaaggcattcacacgctggaacaccttttcgccggattcatgcgcgaccacctgaacggcaacggcgtggagatcatcgatatctctccgatgggctgccgcaccggtttctacatgagcctgattggtcagcctgaagagaaacgcgtcgcggatgcgtggaaagcggccatggaagacgtgctgaaggtgaaagagcagaaccagatcccagagctgaacgtttaccagtgcggcacttaccagatgcactctctggaagaagctcaggagattgcccgccatatcatcgaacgtgatgttcgtgtaaacagcaacgacgagctggccctgccaaaagaaaaacttcaggaactgcacatttag

SEQ ID NO: 119231 - DNA, 741 bp, Enterobacter cloacae
atgaatatcacttttaaaaaattattttcatctgctgctatttgtgcagccctcgccatgtcaaatgcacacgctgctaatgatgtgacgttgaaagttattggtaatatcgttcctggttcctgcgtaccctcactgccaaacggtggagtggtagattatggcacaatgccagcttctaccatcaatccaactggcacggcgaatacactggttcagttgggggctaaaagtattactctcactattacctgtgacagcgataccagcgttggggtgacttctacggataaccgccatgatactcgtgtgggcctggggagcgccgcttatattgaaaatgggtttttcgataatgtaaatgctaacgcttcaggaaacgcctatggcttgggtaaaacgagtgcgggtgtgaatattggctcctatgtcattgcagcagatcccgttaatacaacaacagatggtgttgtcgctgatctcattgctgccacaggtaccgatacatcaaattatacctgggtaaaatccagtacgggtgcttttgcaccagttaacagtggcacaggccagacacgtgtctttacggctgctgcatcgggaaccaccacaccaaaagcttttaaagttatgaatatgccgttacgcattacaactgcgcttcaggacaacactgtattgggtacaggcgatactatcacgcttgacggtaatgccacgctgagccttgtttatctttga

SEQ ID NO: 119232 - DNA, 747 bp, Enterobacter cloacae
atggaatttaaaaaagtactctcggcagcaaccgtcgccgtagccttcggtttatccgcttttgctgcccaggccgctaacgatgttacgctgaaagttgtcggtacgattaacccggctgcatgtacgccgaccctgcctgatggcggcgttgtagattatggaacggtactgaaccaaaatattgcaccgaccggtgcgacaaacaagctggtacaattggggcagaaaagcatcacgctaaatatcagttgcgaaagcaacatgagcgttgcttttacctccaccgataaccgcctggacagtcgcgttaacctgtcttcaaccgcgtttatcgcaggtagcggtacggataaatcagacttcagcaacaccgctggtgcctttggtctgggtaaaaccaccgctggcgtgagcattggtgcttacaccgttgccatcaatactgaagcggtcacagcggatggcgcgaatgttgacaccctggtaacagggagcatcactgaaggccagcgttcctgggagaaagttgcgccaggcctgggttacctctgctcgcttaatggctgcacgggctaccaaaaagcgaataccgtagcaacagccggaaccacgcagccaaaagccttcaaacagcttagcgtgccgttgctggttacctctgcagtgcaggataactcggtattaggtacgactgacgtaattacgctggacggtaacgcaaccattagtctggtatatctctaa

SEQ ID NO: 119233 - DNA, 672 bp, Enterobacter cloacae
atgaagaaaattctatatcttgcgttgttggctgtagcgacaaagtgttgtgccaccggtatggttccagaaacatcggttttattagtcgatgcacaaaaaggcgaagccagtatgaatgttaaaaatacggattcgcagcctgcattgctttatacaaacattgtagatttacctgatagcgataaatctattcgtttaatcgtttctcaacctgtagtccgtgtcgacgccggggaaacacagcgaatgcgttttctgctgcaaaccagcaaacccatgaagtatgaagaacttaaacgcgtcacgttcgaaggcattcctccaaaggagaaaggagaagataaagttgcgttgactatccgccaggatcttcctgttgtaattcatcctgcgggtctacctgaggagacgcagccatggaaatttttgacatggaacaaaaagggtgatggcctggttatcaacaatcccagcgattacgttgttcgtataacggcatcctttaaaacattaccctcaggaaaagcgggtgtgctggataagacctacatccttcctcacacctcgataaaaacaacattaccaaatttctctgataataaagttgaattctatccggcgagtcgttacggctataaaggggatcgctttactacagatttgaagtaa

SEQ ID NO: 119234 - DNA, 2388 bp, Enterobacter cloacae
atgcagcaaaaaacgttactcgcctgtctcattggcctggtctgttctggccaggcgatggctcagcagatggagactgctgccattaattttgatcaggaaacgcttcgttcactggggataaacccggacgtatcaaattatttctctcgcaagacgaagtatttaccgggtagcgtttccgtcgccctgaaggtgaatggtgataataaaggcaacgttattgctcgtttcgacaacaacggcgatctctgtttcgacaaaccttttatggagcaggcaggattaaaagttccctctgactatgagtccggctgctacgattataccggtcatatcccgagcgctattgtggaggcttcgcctgcgcaagaatctctaagtctggttgtaccggcggatcgggtagcaaacagcgaatcggatatcggagcttatacttccggtggcactgctgcgctgttgaattattctcttctctcctcgcgcaatgagtttggtgacgggcactctgactattcacaggccatgctggacggtggggtcaatttcgacgactggatcttacgtactcagcaactgctgagccggagcgacggagaattcgagagtaataactcgtcgacctatttgcagcatacttttgtccccctgaaaagtaccctgagggcgggcgaggtcaatatcaataactcccttcttcagggaacgggaatctatggtatcgagctttcaccggagagcgccttacaacagggcggtagcggagtgagcgtgtccggtatcgccaatacgcctcaggcccgtattgaagtgcgtcagcaaaatgttctggtgtacagcacactggtgccggtcgggccgtttaatctcaccgatgtgccggtacgtaacggcgttagcgatctgaacgtgacggtagtggaaaccgatggcagccagcacagctatgtggtgcccgcagcgctgtataaccagagcgcaggggcgccttcaggatatcacttcgcgctgggacgagtgagcgatagctatagtgaaacgccatgggtagccagcctttctggaggctggaaactaagcgaacgggtgaatgtcaacgcaggctcaatcgtaggcgaagattaccaggctgtcgccaccagccttgataccgtgccgctaccagcctggcttgtttcactccaggcgaaccagtccaacgattcgaaagattcactgaaagggcagaggtacacgctatcggcaacatggagttctgaccccgcatttggcatgggggctaacgcctctgttacgcataaatcgcaagactatcgcgaactttttgaagcactggatgatgatttcgacagcggtaataaaaatgagtattccgccgggctgacctggagtgtgccctacttaggcacgcttagcaccagctactaccaaacgcagggttatgataagtcagatgattcccgcttcatctctgcgggttggaacaagtcattcaagtacgccacgatttccatgaactggcaacatcagttgagtgcagatgaggagaatgaggatgatggcgatctgttctacgtcaacctcagtattccttttggtgccagcaatagcgttagcctgtacagccgtcatgatgaccataaaacgcggtatggcgcctctgcgcttggcgttgtaagtgataccacatcctggtcgctgggagctgaacacgatcaggccacgaatcgcgataatgtaaacggtgggataagcagcaaccttcactatacgcagcttggcctgagcgccagttcggataacgagaatagccgcagctattcaggatcgctacaggggggcatcgcggttcatggacaaggcgttacgttctctccatgggcgatccgcgacacgttcgcgatcgctgctctggataaacccgtctccggtgtgaggattgacacgccccaggggccggtatggaccgacttccgtggtcaggcagtggtaccgtcagtgggagcctggcgcccagcgcgggtagaagtggacacggaaacattgccgaaaaatatggatatcgggaatggaacccgtgtcgtcacgcttggcaaaggagcggtagggcatcttgattttactgcgttaacccagcgacgtgcactggtgaacgttaccctggcaaacggtaaaaagctgccgaaagggatcgcccttgaggattcgcacggaaattatcttacgacctcagtggatgacggcgtggtcttttttaacgatgttgaacctgctcaacaggtggtggcaaaactggataacggcacctgtgcatttggtctgaagcttccgaaagaggcaaataccgatacattctatgaaactgtcaatgaggtgtgtaaatga

SEQ ID NO: 119235 - DNA, 531 bp, Enterobacter cloacae
atgaaggcgcttattttagccgtgtgcgcaatggcgttttctctacatgctatggctgactgccagttagtatcaagccagcaaaaactcagctatggccgtatgagtgccgcagagcgccaggcggaagggaacacgttgattgagatgccggagaaacagattgtcctgaacgtgatatgtgatgaaccgtcgcgtattcgtctctttctgggcagtaacgtaccgaaagggcatgaatttggttttggtgataacggcgtcatgcgcattactgccgcgcaggcaacggtggacgatcgtacagtcaatctggcggctatccatgccggcgacccgtgggttaccaatggcggcgtgagagagatcgcgccagcgcttaacgaagggattgcgtttatcaacggtcaggagctgcggggaaaaacggcgtctgtcacgcttaccatcaaaccgcgcttcaaaagtaaccatattacggacagagaagtgtggcgcggaaatttacgcgtaaggatggatgtacaatga

SEQ ID NO: 119236 - DNA, 705 bp, Enterobacter cloacae
atgaaaaagcgtatagcgctattactctgcggaatgtctgccgcttcagcggtatgggcaactgatacggtcaatattgatgtggatgtcaccgttgacgctgccgcctgtacaccggcgttgagcaatggcggtgtggcagatttcggcacgcgctatgcggggtcgctctcctccagcgcattcacacagcttggtactcgcgatcttacactatcggtgacgtgtgaatcttctacgggagttgcgattaccgcgcgtgatacccgcgcaagttccgtggtcgttggcaaagataaatccgggcaagaaggggtaaaattccagataaataacggtgcctatgtgcgtgatacgacccgcctgtttggtttaggattgaccagcgagcagaagccgattggcagttatggggtgcaaattaacgcggcaggcgtgacggcagccgacgaaagtgccgctgttcaggtggagatcgccggggccgcgaccaaaaatggtccatggacgcgcacgacgctattgcccttgccgacccagcaggactttttctatacgtttgtgcaaaaaggcacggatattccgcagccgatctcatcggcggttgttccgctacaggtgagcgccgctgtcgccaacgggcttggcagcgggcaagagatcaagctggacggcgaggcggtgattacgctggtctatttataa

SEQ ID NO: 119237 - DNA, 1251 bp, Enterobacter cloacae
gtgtcgcaagataacaattatagccagggccccgtccctctggcggcgcggaaaggcgtgattccactcacttttgtgatgttagggttaacctttttttccgccagtatgtggaccggaggtacgctcggtaccggtctttcctataatgatttcttcctcgcagttctcttcggcaatctcctcctcggtatctacactgcttttcttggctacattggcgcaaaaaccggcctctcaacccatcttcttgcgcgttactcgttcggtataaaaggttcctggcttccctccatgcttttaggcggtacgcaggtaggatggtttggcgtcggcgtagcgatgtttgccatcccggtgagtaaagccacgggcatcgacgtcaatatcctgatcgcggtatccggtctgttgatgaccatgaccatcttctttggtatctcagcgctgacgattctgtcgatcatcgccgttcccgcgatagttatcctcggcagctactccgtctggctggcggtggacggcgtgggcgggctggatcatttaaaagcgatggtgccacagaccccgctcaatttttcaggcgcgctggcgctggtcgtcggctccttcatcagcgccggaacgctgaccgccgacttcgtccgctttgggcgtaacgcgaaaggcgccgtggtggtggcaatggtggcgtttttccttggcaactcgctgatgtttatcttcggtgcggcaggcgccgcggcagttggacaggcggatatatcggacgtgatgatcgctcaggggctactgctgcccgccattatcgttctcggcctgaacatctggacaaccaacgacaacgcgctctatgcgtcgggtctgggctttgccaacgtgaccggcctttccagccgcacgctgtcggtggttaacggtattatcggcacgctctgcgcgctgtggctgtacaataactttgtcggctggctcacctttctgtcggcggcgatccctcccgtcggtggggtgattatcgccgactatctgatcaaccgccgccgctacgccagcttccatagcgctacctttgtgccggtcaactgggtagccattctttcggtcgcgctcggcgtggctgccgggaatattattcccggtatagtgccggtgaatgcggtcctcggtggcgtattcagctaccttctgttaacccccttagtcagacgtacctttgctaccgccccggaggctccccatgcagaataa

SEQ ID NO: 119238 - DNA, 669 bp, Enterobacter cloacae
atgagcatttatcaacgcattaatggcgctgactggcgcaatatcttcgtcgtcggggatctgcatgggtgctacacgctgctgatgaatgagctcgaaaaagtttcgttcgacccggcgcatgatttgctgatctcggttggcgaccttgttgaccgcggcgcggaaaacgtcgagtgcctggaactgattactatgccgtggttccgggctgtgcgcggaaaccatgagcagatgatggtagatggcctttcggagtttggaaacgtcgttcactggttggcaaatggtggcggatggttcttcaatctcgactatgacaaagaggtgctggctaaggctttggtccacaaaacggctgatctgccactcgtcatcgaactggttaccggcgataagaagttcgtcatatgccacgctgactatccgcacaacgaatacgcattcgataagccagtaccagaagaaatggtgatctggaaccgcgagcgggttagcgacgctctggacggcattgtctcgccgatatccggtgctgatctgtttatcttcgggcacaccccagcgcgccagcccctgaagtatgccaaccagatgtacatcgataccggtgccgtgttctgcggaaacctcacgctggtacaggttcaaggtggtgcccatgcgtaa

SEQ ID NO: 119239 - DNA, 171 bp, Enterobacter cloacae
atgtctactccactttcccgcgtcatcaccaacgaaatcttccgcgttccggcacgccgaaagcgcaagcccgcggttaagccgtccgacatcccgaccttgaaaggctacaccgcccgtctggtggatcagaaatggctgcgtctcgcggcgaggagaaaatccgcatga

SEQ ID NO: 119240 - DNA, 456 bp, Enterobacter cloacae
atgactctgccagtagacggtatcaaactccatcgcggtaacttcgcggccatcggccagcagattcagccattgctggatgccgggcaatgcttccgccttcaggttaagccgtggcgcgagaaacgcagcctgtcacaaaattcacttcttcacatgtggctggctgaaatcagcgaatacctgattaaatcagggcgccctgatgccactccggagtgggttaagcgcaacctcaaaaagacctacctcggatgcgaagaggtgacctacaccgatttcattaccggtgagaaaaccacgacctgggagccgcgccataccgcagacctcgacaccggggaaatgcatatcttcctggtgaaggttgaaatgtggtgcgctcagttcggcctggcgctgactatcccgaccggctgcgagtaccagcaactgcgcgataagcaggaggcctga

SEQ ID NO: 119241 - DNA, 240 bp, Enterobacter cloacae
atgtcagaatatgagaagctgtcagaagacctgtatcgggaagcgtgtcgcattgttggcgaatgctgcctgatgcttgccagcaatgatgcggaaacaaacagagaccaactggttcacgaattaaaacggcttcactgggaaatcatgaagcaaacagatgaatccaatctgcctattttgcttgccatcgaaaggcttgctaccagtgaggactggaataagccatatcttggatga

SEQ ID NO: 119242 - DNA, 840 bp, Enterobacter cloacae
atgagcactattaccagagaacgcgcagcacaaattgcagaaggcggcggatttaactttgatgagattgcagagctggcgcgtatcgcgctggcatcgctcgaagcggagcctgcgattcaccgctggcgtcgtgtgacagttgagccatacggcccttgcccttggcattacggtaattttatcggcttctcaaaacccgttgagggaattgaggacgagtatttttactccgccccgccagcgccggtatctgtgccaaatggcagagctatcactcagcatttcgacacgattgcgcttgaaacagccagagaaatcatgtgcgacgtgaaccgccgtcacgaatttctgggtggtgaagtgcaactgctatctcgcattcagtgccgaattgatgacgcctgccgcgccgccatgcttcatggtgccgatggtgccctcaccaatgagggtgccatgccagccacgcagtttaagccggtagcagacctgtacggattaacctcaccaactggcagtgaaacatcgttcacttttgatgctgttgaagctcgagatttctttcatggcggttggtcagtgcaggagtacgtagagcttgagcgctatcagcaggcttgcgctggcaactctccggcgattccggatggttgggtggcttgcagtgagcggatgccggaagaagatggtaattactgggggtggtggagcgaaagcaaacgacaagggccagtgtggttcatcaaaagcgaactacaggcgcagtttcagagcagtgaagtaacccactggatgccactgccagcagcaccgcagcaggaggctaaaaatgtctaa

SEQ ID NO: 119243 - DNA, 309 bp, Enterobacter cloacae
atggctaacttactcgacttactcggcatagattcacggcgctgcagcatgacgcttgttgagtacaaatatgacccgaaggagcgagagcgactttcaaagtatctcgtcaggcattcatccagtgttagcggtacgaccctggagcaatacattaccgttgagcgagaccgttatggcgcattcaaacccgctgtcgcattggacgattttccaagcggactaagcgacagggaatcaatgttgaaactggctgactggctgcatcgccttggcgtagcgattgaagatgaatggagtaacccatga

SEQ ID NO: 119244 - DNA, 747 bp, Enterobacter cloacae
atgaaattatttgagatggaaggttttctgcgtggaaagtgcattccacgtgatctgatggttaacgaaaccaacgctgagtatctggtgcgaaaacttgctgaagcggaggccaagtgcgcggcgctgctggatgagctggaagccaaagacaagaggattgtcgagcagaatactgagttatttaaacaatccgcagatattgctgagctgactttaagccgcaaaaacgcctggaggcaggcatcagcggccaggcagggatttgacgagcaattttcgcttcgggaaaccgcagagaagcggattgctgagcttgaggcgcgcagagtaccggattcattcaacatcattggtgaaaacatcagaacgcaggacaaccgcattacatccgagccgattttctgcgtattccagaaacgcgaaatcgtagttgatgaagattacgactgcgaccgtatcgtttgggttgatgaagaagggtgcgaggcgaccgaacggcaaagaatgcgtcttgaactgctccatgataactgtcgcgaaacgccagataaatggcggcggatcgcagtaaaagacattgatgactttgttacctgctgcttcaccgagcaaggatgcaaagattatctggcatgcaacgggcataacttgcggttgccgttcatctacgtaaaaagcggattcaggaacgctgagtacatcggcattcgtaactggctcgctggcatcggtaaaggagagtga

SEQ ID NO: 119245 - DNA, 300 bp, Enterobacter cloacae
atgaaaggcaaacaggcaattctgcgttatctcgaaacgcaccggaccttcaccgcgaaggatgtggccacagagtgcggcatgaccatcaactgcatcacgaagaacgctatcgatctggagcgggcccgcaagattgtccgggtgagcaaggtctggcgaacggtaacttatcgcctggcgactccggaagagcaggatggcaccgcgcgcagctgcaccaacggaatatttcaggagtgccgcaacagtgcggctatgaagcgagtattgatggtttgggggagggtaggggtatga

SEQ ID NO: 119246 - DNA, 2454 bp, Enterobacter cloacae
atgaccgctgatttcatggctgttccacaaaaccttgaagcagagcagagcgttatcggtggcctgatgctggatgatgacaacagcgagcgagtccagaaggtcctggcgatgctcaagcctgagtcgttctacagccgacctcaccagctgatctttgccgagatgcgccagatgttccgcgacaacaagccagtcgatggtctgacactgttcgacgcgcttgaaggcaaagggctcgcggagcaggtaggtggctttgcttaccttgcggagattgcaaagaacactcccagtgctgcaaacatcgtggcatacgctgcatcagtccgggaggccgcaatggagcgctacggtatcaaccgcctgaccgaagctactgaactgctgtattcccgcaacggcatgagcgctacgcagaagtacgaggccattcagggtattttcacccagctcgcagaccattcaaaaaccggcagccgccgtggtttgcgttcgttcggcgaggttatggatgactgggtagctgatctggagaaacgctttgacccttcaggcgaacagcgcggaatgagtaccggtatcccgtcactcgaccgactgctggcgccgaaaggtctggtgaaaggttccctgtttgtgattggcgcaaggccaaagatggggaaagcaatggccttggacgcaaaaattcttttgcaggacgggtcttggacaacgcatggggaaatcaaagtgggtcaacaagttgcatctgttgatggccacgcctcaatggttactggggtatttcctcagggagtccgcaaaatgtatcaagtcacttttgaggatgggcgcaccgttaaggcggccgactctcacctttgggagataagctcgtcgaaatttgaaggtgatcgtgtagtggatactgaaaagttagaagcgatgcttcagagggttaggtatcaaggaagactgcgcattccatcgctgtcaggtgattttggctcatcaaccgatcaggtcgacgggtgggtgttaggtgctctccttggcgatggttctttaaccaaaagcgtcaagttcactaactcagaagactacgttctgtctcgcatggcggccagcgtatttccactgaacctccgccatgttggcgggaatgattacacggtaacgcatcatcgtgggtgtaaaaaccctctccttgagagattgagagagtacggcttggtggggaaaactgcgcaggataaagaaattccagagtctattttcagtgcaggaaaagccacgcggatcggcgtattggttggactgctcgagactgatggctgggttgaaaaattcggctgcattagattctcttcggccagcaagaagctttcgcaaggggtggtaaagcttgttcattctctcggtggaacagccagggaaacaacgcgcaccgatatttcatacacctacaagggagaagctcttcagggcttagatgcgcaaatggtcagcatgaagctgcctgatgaaattcttgaacacattaagtcaccgaggatccgcgcaaaccttggtgtgaaccgtcttggaaaccgtggtattgggattaaatcagttatcgagattgagccggaagagtgcctttgcattatggtgtctcacccccggcacctctatgtcacagatgactatatcgtgacccacaacaccaccctttacgggcagatggcgatcaactgcgcgattcgtgagaaaaagccagcgcttatgttcagcctggagatgcccagcgaccagatcctcgaaaaactggttggtcagaagtccggcgtaaacccgagcattttttacatgcccgccacggatgatgccgatgaccagtaccagggcgactacgacggagactttaagaaggcgatcgccactgccgggcgactgagtgaaatcgacatgatgtacatcgacgacacccctggcctgtcactggcgcacatcgttagcgaaagccgcagaatcaaacgcgagaggggctgcgtaggcatgattctggttgactacctgacgctgatgacagccgaaaaagccgaccgtaatgacctggcctacgggatgatcaccaaaggactgaagaatctcgccaaagagcttggttgtgtcgtcgtgctgctgacccagctcaaccgtgaactggagaggcgagtgaataaacgcccgctaccgagcgattcccgcgacacaggacagattgaacaggactgcgactactgggtcgggattcaccgtgaaggcgcattcgatgacagcgtgccgccgggagagacagagctacttctcaggctaaaccgccacggcagcaccggcacggtttattgcaatcagattaacggggcaatttacgacacggaccagcaggccgccgccgcagaacgccgcgggcgcgagcagcagccgaaaaagaaagggggcttctga

SEQ ID NO: 119247 - DNA, 900 bp, Enterobacter cloacae
gtgggtaacgtatctaatttagccgaagccagagaggccagaaggctccagaaaccgcgcacgaatgacggtaaggggtttgccttgctgcaccgtaaaattatggatgtgccgttctacaaggacgctgaggcggctcatttatgggttcacctgctcctgcgcgctaatcacgaaaagacgctggtatctactgatgtcggcgatgtgatctgcgaacgcggagagttcattaccgggcgaaacacgctggcaatggaaacgggcttgaccgctgatcgcgttaaatcactgctccgtaaattccagaatctgggcatgatcaccaccaaatcgaacaaccgttttactgttctaaaagtggtcaaatatgacgaatatcagtcaaatttttgtccagccgatgtccagccagtgtccagcccaaacgcagtcgtaccaatgcctgcggaggtggagtgtccagccgatgtccagccagtgtccacagataacaatatattaaataacttactacctaacggtagtaagtatgtcgcaaatgaccagaaaccggctgaagagaaaaagtcacgtttgtcatgcgatgaagtatggcaatgcctgaaagacgaactacctgaagcccggggatggagatgcctcactgatgagcgacgcaatctgatccgcaccttctggggtaaggctaacaagatttcccgcaacctggacggcaagccgatggatatggacggtttcagaagctatctgcgctacatcgctcagaactgccgctggatgcttgaagacagaccagaccagaaatccgggaagacctggcgccgcatgaaattcgataagttcctgaccgaaaagctctacatcgaagtgcgcgagggggatcgtgatgaccgctga

SEQ ID NO: 119248 - DNA, 147 bp, Enterobacter cloacae
atggcaaaaaaaccacgctatttccataccgctgtacataaaaacattacccgtgaccgctttgtccgttccgttaacccggaagtggccgaaaagatgcgtgccatcctggaagaactgaaacgtaaggagagtggccgtgggtaa

SEQ ID NO: 119249 - DNA, 546 bp, Enterobacter cloacae
atgcattcacttgcgtatcaacaaggtaacaaattttcgccaacggcgatgatttaccagaatcgccgggagccagaatcctcggcgttaaacatcgatgggatccgcgcagctgtgcgcgcctgggctgctgattgccgcagccgcgaatttgtcgctgcgctgattgttgaagagtggcgggctaccggcggcaccggactggatatcccgactgactcgcatcgccagatgcagaaagtgtttcgctggatcgatggcgacaccgagtacgccgccaacaacattcgacagctggcgccggcaatcatggccgtcctgccactggagtaccgcaaccgcctggcgccgcagaacgacacgatgtcgctgatcgcctctgcgatgaaagagtgtgcagaggctaaacaggcagtgctgctggacgctccagagcatcagaagctgaaagaggtaagcgagggtattgcgtcgctgttccgcctcatgccggagcaggtaggaccgctgatgacgatggtgacgtcgatgctgggggttatgtga

SEQ ID NO: 119250 - DNA, 567 bp, Enterobacter cloacae
atggttgagcttgctcatgcattgaatgtgcgcccggaatggctcagttctggcataggctcaatgcaggacgaaggacgcaaggaatccgctatcccaccagaatcggaatggggtaaagttgacgcttgggatagcaaaacagatctgccagatgacgaggtcgaagtgccatatctgaaagacatagaacttgcttgtggtgatggttcctgcttggaagatgactataacggattcaaactccgtttcgcgaagtctaccctgcgcaaggttggagcccagaaagatagcgtgctgtgcttcccggcatcaggaaatagcatggagccgatgatcccagagggaacaacagtcgctattaacacgaacgataaaaaaatcgttgatggcaaagtttatgcaatcagccaggatggatggaagagactaaaatgcatttatcgtgtgagccctactcgtatcgtgattcgcagcttcaacagtgaagagtaccctgatgaagaggctgatattgaaagcgtagagatccttgggcgcatgttctggacgtctactatctggtaa

SEQ ID NO: 119251 - DNA, 690 bp, Enterobacter cloacae
atgaaattacaacttatagcactatcttttctggccttaacaacgaacgcaatcgggtcaaccattctgagctgcgattacgctaagtccgacataagcaaaggtgctaatgcacctatgattcccggcggtaaaggtactgtagagtttgatggcaaatcctttaaagccacccgtccggctggcggcgtggtcatttccccgacaatcagtgaacaaaaaaacggaatgctttttcttgatgataagacaaaagtgttcgccgcaagcctttctaaaactgaattcgctatctcagaccgtattgctcgaataactgagcaatgggctaactgcattgatgtaagtccaacacctaacacttctgataacgagaaaccggcaactgtctggaaatatagatctctcacgaagcaggagattaatgctgttgagaacacagtaaaagaccaattgaaggatcctgaaagcgccaggttcaagcactcaaagtttgtgagcaacgggaaaggagcctactgcggcctagttaactcgaaaaactcatacggcggctatgctggaaacaccccattcatggtcatgcttattaataatggcaaaccacacgctggctttataggtatgggtggtgatgatgccgagaccttatcaacgatatcagtctgcaaagacaacggttatttctaa

SEQ ID NO: 119252 - DNA, 207 bp, Enterobacter cloacae
atggacaggttcaaaaaagctaatgcagcaataaagatagatggctactacctaccaagaccggaggattcattacttggaaagcaagaaattgctttcaacagagccaaggaagaggctctcacgcacctgaagaatcaagtaatggatatagaagccctcacctatgaggatttcagagcaatgcgagccagcaattttaaatag

SEQ ID NO: 119253 - DNA, 159 bp, Enterobacter cloacae
atgacagtcacccacaacggcaagcagtacaccgccaaaaagctcaacgataacgagtggcagctgacgtcggtatcgaacccgcgggaaaagctgacgatgaaccgctggcacatgaagctggctggcctcctgaaacaggttgaggtgaaggcatga

SEQ ID NO: 119254 - DNA, 285 bp, Enterobacter cloacae
atgaacgcatacctcacttacgaccgcatcgaagatcggcgctgggttgagcagcagctcaccgatgagaaagagaagtggatcgacgaccgggcgcaacaaatcatcgacatgatgcccaaacaaccgtctggcctcttccacttcacaatcccgattgactccagcccatacgaaggacttcgcagcgatgacgctggtaaggcctacaacgatttcatttcggcagttgcttacgcccaggcggaatacgactgggaacaccgtaccggctgcccgttttaa

SEQ ID NO: 119255 - DNA, 846 bp, Enterobacter cloacae
atggcaaacgaattaacaatcacagcgacgtcgcttcaggagataggcgtcgacgtctccacctggagcgctctgaagaacagcatctaccctggcgccaaagacgaatcggtaatgatggcgcttgattactgccgcgcccgccagctggatccgttgctaaaacctgtccacctcgttccgatgtacgtcaaagactcgaaaacaggtaaaggagactggcgcgacgtggtcatgccggggatcgggctttaccgcattcaggcagaccgctccggcgattatgccggggctcgtgagccggagtttggtccagacgtaactcagacgcttactggtgttgaggtgaccttccctcagtggtgcaaatacaccgtttataagcgcatgcccagcggcgaaatcgtcgagttcagcgccaaagaatactggattgaaaactacgccaccggcggccgcgacaccacggcgccgaacgcgatgtggaaaaagcgcccgtatggacaactggcgaaatgcgcagaagcccaggcattgcgtaaggcatggcctgaaattggacagcagcctaccgctgaagaaatggaaggcaaatcactggacgtagatatccgtgacgtcacgccccgcagcgctactgaagcgcttccaccagccgcaagcgaagaaacgcttcaggcgatcaccgatctcttaacatcgctgaataaagactgggagcgagacttcctccctgtgtgcagcgacatcttcaagcggccaattcttgaggcatcagacctcactgaagaagaggcacagaaagggttcaacttccttcagaaaaaagctaaggcggcagcatga

SEQ ID NO: 119256 - DNA, 681 bp, Enterobacter cloacae
atgacaccagaaatcatcctggaccggaccggcattgacgtaaccactatccaacagggcgatgaggcgtggcaccggctacgcctcggcgtcataaccgcctctgaggtgcacaatgtcatttccaagccgcgatctggcaccaaatggacgggcatgaagatgtcttacttccacaccctactcgccgaggtttgcaccggcgtctcccctgaggttaacgccaaggcactggcctggggcaagcagtacgaggaagacgcccgtaccctcttcgagttcaccactgacgtgaaagtcacggagtctccgatcttgttccgtgacgagagcatgcgcaccgcgtgctcccctgacggcctttgcagtaacgatttcggcctcgaactgaaatgcccgttcacctcccgcgatttcatgaaattccgcctcggcggttttgaggccattaagtccgagtacatggcccaggtgcagtacagcatgtgggtgaccggcaaagacgcctggtactttgccaactacgacccgcgcatgaaacgcgaaggaattcaccacgccgtcgttgagcgcgatccacagtacatgtccgatttcaacgaaatggtgccggagttcatcgagaagatggacgaggcgctggcggaaatcggcttcacgttcggggagcagtggaaatga

SEQ ID NO: 119257 - DNA, 429 bp, Enterobacter cloacae
atgaaacgcacacccttctaccgccggcccggacgaaccgggcaattctccggcctccgtgagcgcgctatctggatgattcagacgcgtggccgcccggtaacgggcagcgaaatcgctgagaagtttggcgtaacgctgattgagtttaaccgggtagccaacggcatcacccgcggctccggacagatagctcagatcgttgagtcggaaaaatggatcaacgaggacggcatttgcgaccgcactttcgacctgctcacgaagccaaaggtcgtaacgccacagggtaaatcacgactattcacccggcgcgccatagagcaatcgcaggaaggcagacggcaggaatgcattgctcgcgccgcccgccgtcgtcgcctgattgctcagggcctctacatagacgaaatggagtccatcctatga

SEQ ID NO: 119258 - DNA, 153 bp, Enterobacter cloacae
atgactcacgctcacgacgagatcagggttggcacactgtgccttcccttcattggtaacggctggctaatgccatggggtgaagtggtcagcaatccattaaaggcgcagcgactcgctgaggaatatcgggaaaggcaggaggcggcatga

SEQ ID NO: 119259 - DNA, 528 bp, Enterobacter cloacae
atgagcgaagaatatgtcagcgagcttgagctggggaagtgcggagaatattacgcaatttttaagctggccaagcagggttttgtttgtttcccatcagaccaggggttgccatacgacattgtggttgaggccaacggtaggctccttaagggacaggttcgctcgacgctgaaaatgcgagattacggcaaatcaaaaagtgtttaccggttcggaacgagaacgggaaaaggttatggccgcgcagcatcacttagtacatgtgacttctacgccttcgttgtcatcgatgaagagaagatagccttcatgtctacggatgaactggccagcacaaaaaatccaggaacgcttatccagacgatggagtttagatcttctagcggtatttacccggggagaatttattccaacggcacgcaaaggatgcttgattattcacggaatattgagagctacgaagatttcaaccgcgtcgtttctctgatggggggaagaagatgccgaatcaaaaatacagcttaa

SEQ ID NO: 119260 - DNA, 663 bp, Enterobacter cloacae
atgccgaatcaaaaatacagcttaataatggctgaccctccctggtcttacggcaacaccatcagcaacggcgctgccgccgatcactactccaccatgaaactcatcgacatcaagcgcctgccagtgtgggaactagctgccgaaaacgcggtgctggcgatgtggtacaccggcacgcataaccaggaggctatcgaactggccgaggcctggggctttaccgttcgcacgatgaaaggctttacctgggtgaaactgaaccagaacgcggaactgcgcatcaacaaggcgctggcagagggtgaagtaagcgatttttacggcttcctcgatctgctgaacgccgagacgcgcatgaacggcggcaaccacacaagggccaataccgaagatctgctgattgctacccgtggcgccgggctggagcgaaagcacgccgggattaagcaggtggtatatagcccgctcggtgcgcacagcgaaaagccgtgggaagttcgccaccggctggagctgctttacggtgatgttccgcgcattgagctgtttagccgcagcgcggcgccaggatggcatcactggggaaatcaatgcgccaccgccgcggttgaattgctaccaggctgtgccatccaagttgtgaaaacggaggccgcatga

SEQ ID NO: 119261 - DNA, 1047 bp, Enterobacter cloacae
atgacgccagccgcttattacaacgaaatcgacccgttcgctgcgcaatggctgcgtaacctgatcgccggcggtcatatcgcaccgggcgaagttgatgaaaggagtattgaagatgtcatacctgacgacctgcgaggattcacgcagtgccacttcttcgccggaattggcgtctggtctcattccctgcgcctcgccggatggcctgacgataagcctgtctggaccggttcctgcccgtgccagcctttcagcgcggcaggcaaaggtgatgggtttgctgacgagcggcacttatggccccacttcttccacctcatcagcgagcgcagacctcagcatgtctttggcgaacaggttgcaagcggtaacgcaaacacatggttcgaccttgtacaagctgacctggaaggaatgggctacgccttcgggattgtgccgtttgcggcagcgggcatcggtgcgccgcacatcagagaacgggcctactgggtggccaactccaacctgcaacacgaacccgcaaccggaaacaccacgggggctacagaatttggctggatcggtgaagttaactggatggcagacgccggttgccaacgacgcgaacggttcaacccattgctacagcgggaagaatcaggacggaaccccgaaaatctgcctgaaacttccgggaagtgtacttctgacagggtggccaactccgattgtgggggattctactggcggtccgaggccaccagacatgaagagaggtccagcgccaggtctccagtcggcagcagcattagcgggccccttgaggttaacggtttttggcgagatgcggactggctcttatgtcgagatggcaaatggcgtccagttgaacccggcacattcccgctggttgatggggctgccgcgcgcctgggacgagtcgagcccggggtggcaagagtggcaagcagcaaccgcgtcggcagactcaaaggctacggtaacgccataaacgcacaggctgcggctgaattcatccgggcctatatggaggggttatga

SEQ ID NO: 119262 - DNA, 141 bp, Enterobacter cloacae
atgacaccagcaaatgaaaacgccatccgcaccgcctggatcctatttgccatcacctgggctatctccaaataccacaacaccaagctggtcgataaagctatgtcgaaactcatagcggtaaggatggcgtcagcatga

SEQ ID NO: 119263 - DNA, 192 bp, Enterobacter cloacae
atgaacagagcctcacccgttgatttgaggaaaagcctcgagatagccaaccacctggcgcacatcggtattcgctttgtgccgatcccggtggcgaccgaggaagaattccagacgctggccgccgagctatctcgacggcttggaaatatggcgatcgaagccgagaagaatgaaggcggtgcagcatga

SEQ ID NO: 119264 - DNA, 219 bp, Enterobacter cloacae
atggacatcatcgacacagcagcagagattgaagagcttcagcgtaacgctgccctttccgctcaccgcatcaaccgcaatgctgtatcagctgagcattgcgcggagtgcggcgaggatatcccggcgccgcggcgctctgccgttcccggctgccagacctgcgctgagtgccaggtcgtcatcgagttgaggaataaacagagggggatccagtga

SEQ ID NO: 119265 - DNA, 657 bp, Enterobacter cloacae
atgatttttaacggagagatggtgcgcgccatcctcgacggccggaagacgcagacacggcgcatcatgaaggttcagccgtccgatggcttccacccaacgcataacggttacgatctggatttaaacgcccactggtacacgcctggcgtggtcgataaaaacggatacctgcagcctgcaaagaaagatgtgtttggcgttgcagatgagaatgaaggctacacctgccctttcggtgccgtcggcgatcgcatctgggtgcgagaaacgtgggctgaagctggtgctggcgcgccggacttgaaactttatcgcgcgaattaccctgagcacgttccaactcattacgagaatgtgccgccggatgatgaaatacgctggacgccttcgattcacatgccgcgctgggccagtcgtctaactttggagattaccggcgtgcgagtggagcgcttagccagcgtcagcgatgaagacgctgggaaagaaggttatcccgcaaatcctgcgccttacggcgggaccatggataaatggctgtggttccgcgggttatgggacagcatatatccagatcaaagcttcaggcacaacccttgggtctgggtaatcgaatttaaggtggtgcccaatgttcaggataatccagcctaa

SEQ ID NO: 119266 - DNA, 240 bp, Enterobacter cloacae
atgttcaggataatccagcctaatacctggtacgccgatccccacggcgcgccctgcaaaatcctccgcgctacccacgaagtaatccactacatccgcaacggtcgcacctgcatcgccagcatgggccgctttcaatcagaattcgaaccgctgaccaaagcacaggctgagcggatcgccgaagaaatcgaaacagcagaacacctgaagaagctgcgcgcccagcgtgcggcatga

SEQ ID NO: 119267 - DNA, 273 bp, Enterobacter cloacae
atgcgcattgaagagttaccgaagctaccgaagctgttccgggtcattgaggttgatttggatgtcctgagaaacggcattggcggcggtggcggcgtgatattcgaccttgatgctgtcgttaaacgcaaggttcgccgggttaagcatagcggcggctggaaatggcaactggttcgggaatggcacgatcaggagttgtgggattactgcttcgagcaggaccgggaatgtctagagcacctcaattatgacctgggccttatgcattaa

SEQ ID NO: 119268 - DNA, 201 bp, Enterobacter cloacae
atggctgcttttaatgtgggcgcattagtccagaagaagaccggcgggatcagaggaagaatagaaagcctgctggagccggaaaacgacaaggcccgggtttatgtcgcttgggatggcggcacttatcagatccattacgaatacgaacttcgtgcggccacaccagaccagccgcaattttataaaacgatgtcatag

SEQ ID NO: 119269 - DNA, 246 bp, Enterobacter cloacae
atgagcgaaatgaccttaatcgtgcccaacgactgggtaaccgaagaaaagctcgtcgagattaccggccttcgccctggcactatcgagcgggcccgcaaaaaatgctggatggtcgggcgggaatatctgcatgtttcccctgacggcgtgccgaagaaaaacagtgaatgcatgtacaaccgcaaggctgtcgaccagtgggttgagagcatgtcaaagaaacagccgggtgcgcgccaatga

SEQ ID NO: 119270 - DNA, 1296 bp, Enterobacter cloacae
atggctaagtcagcatacccaacaggcgtggagaaccacggcggaacgctccgcatatggttcatctataaaggcagccgggtgcgtgaaagtctcggcgtgccagatacaccaaaaaacaggaaggtcgctggcgagctgcgcgcgtcggtgtgcttttcgattaaaactggcaactttaactttgcggcccagttccctgactcaccgaacctgaaaagatttggcgtggagagcaaggaaataactgtgctagagctggctaccaagtggcttgaactgaagcgtatggagattagcaccaacgcgatgtctcgctatacatctatagcgcgcaacatggtgccaaggataggcggcgacaggctggcttcagcggtgacacaggaagacctgctgtttatcagaaaggaattgctgaccggttatcacgtcctgaagactggacagaaaacaccggtgaaagggcgctccgtcagaacagtgaacaactacatgagaaccatgtcaggtatgtttaactttgcagctgatagcgggtatgtaaaagcgaatccgtttaatggcatttctctgctcaaacgggctcgtaccgagccagatccgctaacgcgagaagaattcatccggatgattaacgcatgtacccaccagcaacttaaaaatatgtggtcgctggcagtttatactggagtacgtcacggagagctggtagctcttgcctgggaagacattgacctgaaagcaggcacgatgatcatccgccggaaccatactttgacgaaggagttcacccttccgaaaacggacgccggaacggaccgcatcatcaacctcattcagccagcgatcgacgtcctgaagaggcaggccgaattaacacgccttggcaagcagtaccaggttgaagtgaaactgcgcgagtatggtcgtactgatgtgcatccgtgcactttcgtgttcaacccacagatcgcagcgcgtaatggccgtgccgggcatcattacgctgtagggtcaattaaccagtcatgggaggcagcaatgcggcgcgccgggattcgctatcgcaaagcataccaatccagacacacttatgcatgctggtcgttagctgccggtgctaaccccaacttcatagcgaagcaaatgggacacaccgacgcgcaaatggtttatcgggtatatggatcctggatggctgaaaataaccaggaccaggtactcatcctcaaccagaaattgagtgagtttgccccatccatgccccacgccacaggatcggatggttattaa

SEQ ID NO: 119271 - DNA, 837 bp, Enterobacter cloacae
gtgggagcgccgataactgtcaccgtacctgaaggcaataccctgccgctcgaagcgtttgcagcgcagcacgggcaagggttaagcaatatgctggaagctaacccgggggtagatccgtttttaccacgtgccggtacagcgctggtggtgccgcagcagcttattctgccgccaaccgtgcgtgaagggattgtggtgaacgtcgcggaaatgcgtctttactattatccacccggcagcaacacggttgaggtgctgcctattggcattggtcaggccgggcgcgaaacgccgcgtaactgggtaaccgccgttgagcgcaaacaggaaggcccaacctggtcacccacgccaaatacgcgacgtgcttacgcgaaggaggggaaaacgttgcccgcgttcgtgcccgccgggccggataacccgatggggctgtatgccctttatatcggcaggctgtacgcgatccacggtaccaactcaaatttcggcattggcctgcgcgtcagccagggctgcattcgcctgcgtaataacgatatcaaatacctgttcgataacgtttcggtggggacgcgggtacagcttatcgatcagcccgtaaaagtgaccaccgagccggatggtagccgctgggtagaggttcacgagccgctttcacgcaatcgcgcggaatttgaatcaacccgaaaagtgccgctgcccatttcggccgcgcaaaggacgcagctgataagtgaaggggcgggcgctgagctggaacggcggtcggggatgccggtgaggcttgcaatgcccggtggcgttgcgctttccgggcctacaggaccgtag

SEQ ID NO: 119272 - DNA, 2694 bp, Enterobacter cloacae
atgataacagaaaagcctcaccatccgtattatcaacagaccgttgatgaaaccctgacaaatatccaatccagcctggacggacttaccagtgcagaagccaccgccagactggaaaaatacggtgaaaatgccttaccgcaaaaaccgggtaaacctggctggctgcgctttctggcccatttcaacgatgtccttatttacgtccttctggcggcggcgctgctgaagctgataatgggacactgggtggatatgtttgtcattcttggggtggccatcatcaacgccctgattggacatattcaggagagcaatgcggagaaatcgctgcaaagcattcgtaatatgctctccagcgaggctgtggtcatccggcagggcaaccatgaaactatcccgacgacagcgctggtgccgggagatatcgtggtgatacgcgccggggatcgcattcctgccgaccttcgcgtaatagaggcgcacaacctgcgggtggaagaagctattcttaccggcgaatccacggtagtggagaaaagcagcgatgcgctccacggggagttgccgttaggcgaccgttacaacctgctttattctggcaccaccgtcagctccggcgggggaaaagggctggtggtggcgaccgggggggagaccgaactcggccatatcaaccagatgatgtcggacattgaaaaacaccgtaccccgctgatggtgcaaatggacaagctcggcaagaccatttttatcaccattctggtgatgatgctggcgctgttcgttttcagtcttatcttccgtgatatgcccgtatcagagctggtgctgtcgctgattagccttgcggtggcggcggtgccggaaggtttaccggccattatctctatcatcctctcgctgggcgtgcaggcgatggcgcgtcgcaaggcgattattcgcaagctgcctaccgtggaaacgctgggggcgatgacggtgatctgctcggataaaaccggcaccctgaccatgaatgagatgacggtaaaagcggtgattaccgcggacaccacctaccgcgtggagggagacagctacgaaccggtgggcaatattcaccctgttgacgatccaacaccggtaaccgtgacccaggggtctgtgctggagcgctatctgcgcaccgtcgatctctgtaatgacagccagctgatcaaagatgagcaggggctgtggaaaatcaccggcgggcctaccgaaggcgcgctgaaggtgctggcggcaaaaatcccgcttccgccaattgacggcgaattgcgcagtaaaatcccattcgattcgcaatataaatacatgtccaccctttatcgcctgggcgacgaagaggtgatgttaatcaccggtgcgtcggacgtccttttccgtctttgccagcaccagcagactcaaaacgggctggagccattcaacctgcactattgggaagagaagattgaagagtatgcgcgcgaaggattgcgcatggtggctgcggcctggaaaccggccgccagcgggcagcgcgagctgacgcatgcggatctgcaagagggggtcatactgctcggcattgcgggcatgatggatcccccgcgcccggaagccatttcggccattgccgactgcttgcaggcgggcattcgcgtgaaaatgattaccggggatcatccacaaacggcgatgagcattggtcagatgctgggtattggcaacgcggcgagcgccattaccgggcgcgaactggaggcgatggacgaccaccagctgagcgaggcggcgcaaaaatacgatatctttgcccgaaccagcccggaagataaattccgtctggtgcaggcgctgcaaagtaagcaggaagtggtcgggatgaccggggacggcgtgaacgatgcgcctgcgctgaagcgggcggatgtcggcatcgcgatggggatcaaaggtactgaagtcaccaaagaagccgccgatatggtgttaacggatgataattttgccaccattgcccgggcggtccatgaagggcgtcgggtctacgacaacctgaaaaagaccattctgttcgttatcccgagcaacatcgcccaggccctgctgatcattattgccctgctggcggggaaccttatcccgttaacaccggtactgatcctgtggatgaacatggcaacctcggcaacgctgtcgtttggtctggcgtttgaagcgggtgagaaggacatcatgaaccggccgccgcgtaagtctaacctgcacgtgatggacggttacgccatctggcgcgtggtgtttgtcggcctgatgattgccatcagcgcctttgtgctggaggcctggctgcaaccgcgcggttactcggcggagttcatccgcaccgtgttgctgcaaacgctggtcactgcccagtggttttacatgctcaactgccgcgtcaccgacggcttctccctgagtaaaggtctgctggctaacaagggcatatggatcgtgagcggcgtacttctggcccttcagcttctgatcgtctatgcgccatttatgcagatgttgttcggtaccgaagcgctgccgttccgctactggatcattaccttcctgatcgggttcgcaatgttcatgattgtggaagcggaaaaagtccttacccggagatggcgcacgacgaaaggttaa

SEQ ID NO: 119273 - DNA, 1317 bp, Enterobacter cloacae
atggactccaccctcatctccgctcgccgcaacgaggagacaccttcgcttaaccgcgcccgccgcgccgctttaggtagcttcgcaggcgccgtcgtcgactggtatgactttctgctctacggtattactgctgcgctggtctttaaccgtgaattctttcctcagatcagccccgccatgggcacgcttgctgcgtttgccaccttcggcgtcggttttctgtttcgtccgctgggcgggataattttcggccacttcggtgaccgccttggccgtaagcgcatgctgatgctcaccgtctggatgatgggcattgccaccgcgctgatcggtattttgccctcctttgcatcgattggctggtgggccccggtgttgctggtgacgcttcgcgccattcagggctttgccgtcggcggcgaatggggcggcgcggcactgctgtccgtggaaagcgcgccgaagaacaagaaagcgttctacagcagcggcgtgcaggtaggttatggcgtgggtctgctgctctccacgggcctggtgtcgctcataagccagctcacgacagacgagcagttcctgagctggggctggcgtattccgtttatcttcagcattgtgctggtcgtggtggccctgtggatccgtaacggcatggaagagtcggctgagtttgagcagcagcaacgcgaaaaaccggtcgcgaaaaaacggctgccggtgatggaagcgctggtgcagcaccctggcgcttttctgaaaattatcgccctgcgcctgtgcgaactgctgacgatgtatatcgtcaccgccttcgccctcaactactccacgcaaaacctcggcctgccgcgggaattgttcctgaacattggcctggtggtgggcgggatcagctgcctgaccatcccctgcttcgcctggctggcggatcgctttggccgtcgacgggtgtatatcaccggggcgcttatcggcacactcagcgcctggccgttctttatggcgctggaggcccagtcggtcttctggattgtcttcttcgcgatcatgctcgcgaacatcgctcacgatatggtggtctgcgtgcagcagccgatgtttaccgagctgtttggcgcaagctaccgctacagcggcgcgggcgtgggatatcaggtggcgagcgtggtcggcggcgggtttacgccgtttatcgccgccgcgctggtgacgttctccggcgggaactggcatagcgtggcgatttatctgctggcaggttgcctgctttctgctgccaccgccctgttgatgaaggaaaccgcgcacagctga

SEQ ID NO: 119274 - DNA, 1773 bp, Enterobacter cloacae
atgcacaccacatcaccgcttacggccctgcgccagtggctacaggacaatcagctcgacgggatgattgtgccgcgcgccgatgcctggcagagcgaatcttgcgcaccgtatgatgcaaagctggcctggctgacgggctttgacggctcggcggggctggcgctggtactgaaagacagagcgctgctgtttgttgacggacgctatcaggttcaggcccgcgtacaggtcaatctccacgaggtggagatccaccatctgcacaacgagccgctggccgagtggctggcgaaaaacgttgcggccggcacgcgcatcggctttgatacgctgctgatgaccaatgcagagtttacgcggctctcggccacgccgtgcgaactggtaccgctcgcgcgctctccgttcgataccctctgggttgaccgccctgccgcccccgcagggcttatccgcgagatgcctgtagacatcagcggcgaaagcagcgccgccaaacgccagcgcgccgccgccgtgctggcagagcaccgcgcggattatctggccgttaccctgccggacaatatcgcctggctgctgaacgtgcggggctcagatatccccttttgcccggtgcctctgtcgtttgccctgctgagccgcgagggtgcggtggaatggtttgtggatgacagcaagctgaatgcgctgccggatgccgtgcggaacgccttcacgattgcgcctcaggaagcctttatcccgcgctgtaggcagcttgcgcagggtaagcgggtcatgatcgatcccgattccgcaccggtggcgttacgctttgcggttgaacctcagggggaaattatctggcagaccgacccgatcaccctgatgaaagcttcgaaaaacccggtggagctggcgggctatcgtgaatgtcatcaccaggacggtgcggcatgggtgaatttcctggcctggctgagccgggaagttcctcagcgggccgcgtcgggaatgccgctgaccgagcttgacgtgcaggcgaaacagcttgcgttccgcctgcaacagcctggctttgtcgagccgagtttcgccaccatttccgcttccgcgagtaacgcggcgatgtgccattaccactcaagcgaggccagcaacaagcccatcggccacgaccacttttacctgaatgattccggggggcagtaccgcaacggcaccacggacgcgacgcgtaccctggcctggggaaaggtcgatccacagcagcgtttgcactacaccgcagtgcttaaaggcttcctgtcgctgattacccttcagttcccgtccggcactcaggggcaccagctggatgcctttgcgcgccgtccgctgtgggagttgggactggattacgaccacggcaccgggcatggcgtagggcatcagcttctgatccacgagaacccgcaccgttttgcgcaaaaggtcaacccgtggccgctggtggcgggcaatattatgaccattgagccgggttactacctgggcgatagccacggtattcgcattgaaaaccaggtggagattgtcgaaagccgtccgggattttgtaagtttgcctcgctgacgctgatcccaatcgatttaagccaggtggagctgcatctgttgagcgagtcagaaaaacagtggctggatgagtaccaccagcaggtacgagaggcgctttcaccccgggtggacagcgatgcgcggccgtggctggtggaggcaacggcgccaatacgtgtgaaccggtag

SEQ ID NO: 119275 - DNA, 1233 bp, Enterobacter cloacae
atgataaaccgttcttcttccggtaatcgtctgggtcgtcaggcgttactttttcctctgtgtctggtgctttacgaattctctacctacatcggcaacgacatgatccagcccggcatgctggctgtggttgagcagtacaacgcaggtattgagtgggtaccgacatccatgaccgcctatctggcgggcggcatgtttttacagtggctgttagggccgctgtcggatcgtattggccgccgtccggtgatgctgacgggcgtagtgtggtttatcgtcacctgtctcgccacgctgctggcgcagagtattgagcagttcacactgctgcgtttccttcagggcgtgagcctgtgctttattggcgccgtgggctatgccgctattcaggagtcgtttgaggaggcggtgtgtatcaaaattaccgcgctgatggcaaacgtggcactgattgcaccgcttcttgggccgctggtgggagccgcatgggttcacgtcgcgccgtgggaggggatgttcgtcctctttgccgcgcttgcggctatctctttctttggcctgcaccgtgcgatgccggaaaccgccacccgcctgggcgaaaagctctcgcttaaagagctggggcgggattataaggcagtgctgaaaaatggccgttttgtcgcgggcgcattggcgacgggctttgtcagcctgccactgctggcgtggattgcccagtcgccggtcattatcatcagcggcgaacagcttagcagctatgagtatggcctgttacaggtgccgatttttggcgcgctgattatcggtaacctggtgctggcgcgtctgacgtcacgccgtaccgtgcgttcgctgattattttgggcggctggcccatagcggcagggctgattatcgcggcggtggcgaccgtagcctcgtctcatgcgtacctgtggatgacggcggggctgagtgtttacgcgtttggtatcggcgtggcgaatgctggcctggtgcgcctgacgctgttcgccagtgaaatgagtaaaggcacggtgtctgccgcgatggggatgctgcaaatgctgattttcaccgtcggtattgaggtgagcaagcatgcttatgcgtttggcggaaacgggctgttcagcctgttcaatctcgcaaacggtgtgctgtgggtaggtctgatggtggtgttcctgaaggacaaacgcgtcggaaatgccctgcaaccgtaa

SEQ ID NO: 119276 - DNA, 1290 bp, Enterobacter cloacae
atgtttctggcaggggctatttttctgtttacgctggtactggttatctggcagcccaaagggctcagtatcggctggagtgccatcattggcgccgcgctggcgctggcgagcggtgtgatccacgttaacgacattccggtggtctggaacatcgtctggaatgcgacggccacgtttatcgcggtaatcgttatcagtttgctgctggatgagtccggttttttcgagtgggcggcgctgcacgttgctcgctggggaaacggtcgcgggcggttgctgtttacctggatcgtgctgctgggtgcggccgtggcggcgctgttcgccaatgacggtgcggcattgatcctgacgcctatcgttatcgccatgctgctggcgctggggttcagcaagcaggccacgctggcgttcgtgatggcggcgggatttatcgccgataccgccagcctgccgctgattgtctccaacctggtcaacatcgtctcagcggacttctttaagctgggctttagcgaatacgcctcggtgatgatcccggttgatatcgccgcaattgccgcgacgctggtgatgctgcatctgttcttccgcaaggaaataccgccggaatatgacctggcaaaactccgcgagcccgcacgggccattcatgacctgccgacattcagaacaggctggatcgtgctgctgctactgctcgtcgggttctttgtgcttgaacctctgggtatcccggtcagcgctatcgcaacaactggcgcgctgattttatttgccgttgcgaaacgcgggcacgccattaacaccgggaaagtgctgcgcggcgcaccctggcagatcgttatcttttcgctggggatgtatctggtggtgtatggcctgcgtaatgccgggctgacggagtctctttcaggcgttcttgatcgcttagccggacacggactctgggccactacgctgggaaccggatttatcaccgcctttctgtcatccataatgaacaatatgccaacggtattgatcggcgcgctctccattgagggtagtgcggcaacaggcttgattaaggaggcgatgatttacgctaacgtgattggctgcgatctggggccgaaaatcacccccatcggtagcctggctaccctgctatggcttcatgtgctggcacagaaaaacatgaccattacctggggctactatttcaggacgggcatcataatgacgctgccagttctgtttgtgacgctcgccgcgctggcgctacgtctctccttcacactgtaa

SEQ ID NO: 119277 - DNA, 282 bp, Enterobacter cloacae
atggtggatatcactacccttgcccgtaaatggggctcaagactacttaaggccgtctggtttgtgttaattagcttcctggcaggacgtatgctgggtccttcaacagcttatattaaccacgacgttgcaactgctatttgcggcttcatctatggtgatattaatgcggagacaatgtacgaaacatatacaaatattgatattttgattctgttaacatctgcaacgatcgtctgtctcataacattgaagatattcaacaaaaccaggaatcattaa

SEQ ID NO: 119278 - DNA, 723 bp, Enterobacter cloacae
atgacgccaaccattgacctgcttcgttcccaccgttccattcgccatttcaccgatgagccgatcacccaggcgcagcgggacgcgatcatcgacagcgcaagaggcacctccagctccagctttttgcagtgcagctccattatccgcatcaccgatccggcgatgcgtgagcagctggtaacgctgacgggcggacaaaagcacgttgcccaggcggctgagttctgggtgttctgcgccgattttaaccgtcacctgcaaatctgtcctgaggcggagctggggctggcggaacagctgctgctgggcgtggtggatacggcattgatggcgcaaaacgcgttcacggcggcggaatcgctggggcttggcggcgtctatatcggcgggctgcgtaataacatcgaaagcgtgacgcaactgctgaagctgccgaaacacgtgctgccgctgtttggtctgtgcctcggctggccggcggataacccggatctgaagccgcgtattcctgctgcgatgctggtgcatgaaaaccactaccagccggtcgatcaggacgttctgcatcaatacgatgaagagctggcgaactactatctgacgcgcgacagcaacaaccgccgcgacacctggagcgaccatattcgtcgcaccatcattaaagaaaaccgcccgttcattcttgattacctgcacaaacagggctgggcaacgcgatag

SEQ ID NO: 119279 - DNA, 2724 bp, Enterobacter cloacae
atgaaatttatgaaaccaaaatatctggcgctctttattgcggcggccaccagctccgcatttgcagctgcgccgggtacgccttctattacatcgggcaatgataaatttgcgctggtagaagtggatcaggcggcacaggattacaacaacctcatcaaagtgcataaagagggtgttgatgtaaaagtggaatggaacgtctggagcggtgacgccccaacgtctgcaaaagtgctgctggacggcaagaccgtctggaccggcgcgggcagcgcggcgggttctgcgaccttcaaagtcaaaaaagggggccgctatcaggaacaggtcgaactgtgtaacgacagcggctgtaccaaaagcgcaagcaaactgattatcgtggcggataccgacggaagccatttgctgccgctgaatacgccgctgctggaaaataacaaagctttcgctcagcataccgataaagtcgtcggtgcctatttccctgagtggggcgtttacgatcgaaacttctctgcggataagatcccggtcgcgaacattaaccacctgctgtacggctttattccaatttgcggcggcgacggtattaacgacagcgccaaatcttcaggtgcactggaatccctgaaacgcgcctgtgctggccgtcaggactacaccgtggccattcacgatccatgggctgcgttgcagaaaccgcagaaaggcgtaagcaactgggacgatccctacaaaggtaactatgggcagctgatggcgatgaaaaaagcccatcctgacctgaaaattctgccatccattggtggctggaccctgtccgatccgttctatcagatggataacaaagtactgcgtgaccgtttcgtggcgtcggtaaaagacttcctgaccacctggaaagtgtttgacggcgtggatattgactgggaattcccgggcggcggcggtgaaaacgccaaactcggcaatcctcagaccgataaagccacctacaccgcgctgatgcacgacctgcgtcagatgctgaatgaactgtctgcggaaaccggtcgtacctacgagctgactactgcaatcggtgccggtaaagataagatcgaagacgtggactataacaccacgcagcagtacctcgaccatatcttcctgatgagctacgacttctacggtgcctggagcaataccgatctgggccaccagaccgccctgtacggtgcttcctggaaaccagacactaactacaccaccgataacgcggtgaaagcgatgctggagcagggcgttaagccaggcaagatcgtggtaggcgcaggtatgtatggccgcggctggaccggcgttcatggttataccggcgataatccatttaccggcaccgcaaccggaccaattaaagggacatgggaaaacggtatcgttgactatcgtcaaatcgtcaaccagatgctgggcaaaccgggctgggaatacaaatatgacgaagcggctgaagcgccgtacgtgttcaacaagtccaccggtgagctggtgacgtacgataacgcccgttccgttatggcgaaaggcaaatacgtactgaacaaaaacctgggcggactgttcgcatggtctatcgagtctgataacggcgatatcctgaacgccatgaacgaaagcctgctgggcggaagttccatcccggatctgcctgttgagactaaccatgcgccagtggcttcagctgccgatcaaaatgtcaccggtcctgcaaccgtgaccctggatggctctgcttccagcgaccaggacgacgatgcgctgacctataaatggacgcaggtttcaggcccttctgtgaccatcgccaatagcaccaaagcaaaagccagctttagcgttccggctgtgacaagcgaccagaacctggtcttccgtttgaccgtaaccgacgctaaagggctgagcaatgctgttgacgtccaggttgtgaataaagcgcctaaagccaaccaggcgccggtaatcaatgctatggaagccgttaccgttcagtccggtgaagcaatttctctacacgcacaggcatccgatcctgatggtgacgcgctgacctacagctggagcgtaccggctgatatgaacgcgaccggcactgattcggccaacgttcgcatcactgcgccagaagtgcacaatacttcttcctacaccctgagcgttattgtgacggacggtaaaaccagcgtgcagtctgacgtgcaggtgacggtggagcctaagccagctgacgaggtaacgcctcctgccgatgacgtaaccccaccggttgacgacgtaacgcctcctgccgatgacgtcacaccaccggctgacgacgtaaccccgccagttgacgataccaccggcagctgcgacgcaccagtcgatgccaacgccagcaaatacgctgcgtgggacgcgagcaaaatctataacaacggcgataccgtcagcttcgaccacctcgtgtggaaagcgaaatactggactcagggcaatcagcctggcttcggtatggacgcgtgggagctggtaagcaacgtgaagatgaactggcgttctgacctggtctacaacggcggcgacaccaccacctatgaaggtaacgtttaccgtgcgaaatggtggacccgtggcgataacccagcaaatagcgacgtatgggtaaaagaaggcgcatcaacagattgcaaataa

SEQ ID NO: 119280 - DNA, 450 bp, Enterobacter cloacae
atgactaatattaatagcttcgcccagctctacaccgaactctccctcaaccccgatctcccaaccctggccgagcgctgcaagctgctcaccgaaatccttctcgactgcaaatctctcccgcaaacgcagcccgtttgccgctgtctcggagcttatctggaagaggtaaaatccggcctcacagaatccatgcgtgattttcaggtggtggaatttgaggacgaagcggaacagccgcgacaaaaagagtggttgctggaagatacagaaacgaaatgtgactactgccgggcgttaaaccacgtgctgctggtttcgcattttgaccgcgatatgttgccgcacctgacgggactgttgcatgacattacccacgcgatagctgaagatttaatcgtacccatgaacccgtgcatgacaatacatctgccgacacagccacactaa

SEQ ID NO: 119281 - DNA, 714 bp, Enterobacter cloacae
atgcgcaagatcacactggcgctcagcgccgcctgcttattgttctcgcttaatagtaccgttgttgcgcgggcttctgcacccacgccgctttacaccggaaccaccgccgccattcttgccgaacaggcccccattcactgggtttcagtggcacaaatcgaaaacagcctgacgggtcgcccgccgatggccgtgggcttcgatattgatgataccgttctcttctccagccccggtttctggcgcggcaaaaaaacgtactccccggacagcgaagcctatctgaaaaacccggaattctgggaaaagatgaacaacggctgggatgagttcagtatcccgaaagaggttgcccgcgcgctgatcgccatgcacgtaaagcgcggcgacagcatttacttcgtgacaggacgtagccagaccaaaaccgaaaccgtctcgaaaacgctacaggatgattttctgatcccggcggccagcatgaatccggtcatttttgccggggaccaggaagggcaaaacaccaaaacccagtggctggaaaagaaaaatatcaaggtgttctacggtgattcagataacgacatcaccgcggcgcacgatgtgggagccagaggcatccgggtgttacgcgcctcgaactccacctaccggccgctgccaatggccggaaaatttggtgaagaggtgatcgttaactccgaatactga

SEQ ID NO: 119282 - DNA, 1014 bp, Enterobacter cloacae
atgaaaccttacgcagagggtctgattgtcggcaagttcgcgcccttacacgcaggacatgaattgcttatcaacgctgcgcttgcccggtgcgagacggtgtttatcatcagctattcgctaccggaaatgccggggtgcgaacccgaaaagcgccttcagtggctacagacgcgtttcccgcggtgtcgtcacctggtgttttcgccagagatcgcggcgggccatgatattgaaccgccgccgcccaacgacgcagatgccgatcgccaccgacactacgtggctaccctgtgcgaacgcttctttcactgccgaccggacgccgtattcactgcggaggattacggcgatggctttgcccgcgtattaagccagcgttttggcaaaccggtcacgcacgtgcggcttcagcgcccggagggccctgatgcgccctcaggcacgcttattcgctctgatgttcatcgctaccgcgagatgctctcggcggaggtttaccggagttttgtctttcgaatttgcttattgggcggcgagtcgacgggcaaaagcacgctttcccgggcgttggcagcagcgcttaacgcgccctatgtcgctgagttcgggcgcgaatactgggaagaaaagaacggagtactggaatgcgacgatctcctgcatattgcgcgcgagcaggtgcggcgtgaggacgcagccagcacggcgccttatctgatttgtgatacgtcgcccttaaccacgctgttttataccctcgaccagtatggctcggcgcctcaggcgctgcacgacttagccgggcgggactactcgctggttgtactgtgcggcgatgaatttccctttgtacaggacggtaccaggcaaggcgcggcgtttcgccgcaggcagcagtcgtggtatatcgctgaactggcgcgccgaaacatcccgtatttacgcgtcacagggtcgacgtctgagcgtatcgaacaaattcgtgggcatatccagaaacggttttcataa

SEQ ID NO: 119283 - DNA, 558 bp, Enterobacter cloacae
atgccaccatctgaaatggctgcttgtctggcctatgcgctctctgtctggctggcggccagaaacaatatcaacacgtggtggatcggtattctcggcagcgggctatacgcctgggtcttctattcagtgcagctctatgccgatgttaccctacagctctttttcattatcacgagcataacgggttgggtgcactggctgaaaggaaaccgcggagaggtattgccggtgcggcgaacccaccccagacattttctccttctgctggcctgtgccgtggcagtagcggcgctgtacgggcttttattgcatcggtataccaacgcctgggcgccctggctggactccattattttaaccttcagcatcctggcgcagttcatgctaatgggccgacgcctggagaactggtacgtctggcttgccgtcaatacccttgccgtgccgctgtatgcgatgaggggcctgcatttgaccgcggttctgtatctggtgttctggtttaacgcctggcacggtttatatcaatggcgtaaggagatccgcgcgcgatga

SEQ ID NO: 119284 - DNA, 984 bp, Enterobacter cloacae
atggcaacacgcattgagttccagaaacatggcgggccagacgtactgcaagccgtggagtttacccccacggcacctggcgagaacgaaatccaggttgaaaacaaagcgatcggcattaactacatcgatacctatattcgcggcggtctctatccgcctccgtcgatgccgagcggactgggcaccgaggcggccggtatcgtcagcaaagtgggcagcgcggttaagcacattaaggaaggcgatcgcgtggtgtacgcgcagtcggcgctgggcgcttacagctccatccataacgttccggccgagaaagcggcgcttttgccaaatgcgatcggcttcgagcaggctgccgcctcattcctgaaagggctgacggtctattatctgctgcgcaaaacctacgaaattaagcctgacgagcaattcctgtttcacgcagccgcaggtggcgtagggctgattgcctgccagtgggcgaaagccctgggggcgaagctgatcggcaccacaggcagcgcgcaaaaagcgcagcgcgcgctggacgcgggcgcatggcaggtgatcaactaccgggaagagagcatcgttgagcggctgaaagagatcactggtggcaaaaaggtacgcgtggtgtatgactcggtggggaaagacacctgggaatcttcgctggactgcctgcaacgtcgcgggctgatggtgagcttcggtaacgcctccggggctgtcaccggcgtgaacctgggcattctgaatcagaaagggtcactgtatgtcacccgcccttccctgcaaggttacatcactaatcgggaagaacttgaggaagccagcaacgagctgttctcgctgatcgccagcggggtgatcaaagtggatgtggcagaagcgcagaaatatccgctgaccgatgcgcaacgtgcgcatgaggtgctggagagccgggcaacccagggctcaagtctgttaattccctga

SEQ ID NO: 119285 - DNA, 489 bp, Enterobacter cloacae
atgaaaagacctgactgtattcggcactggcgggacgtggaaggcgccgatgacgcaacgtatccggacagcaatgaacggttttctattggcgcgccgctggcccgcaagctgggtctcggccgcattggtattcaccatgaacggctgccgcccggacgccgtacttcttatccgcatgcggaaagcgacgaagaggagtttgtttacgttctggagggttaccctgaggcctggatcaatggttatctgtggaagcttgaacccggagacagcgtgggatttcctgccggcacgggcgtgtgccatacctttatcaacaacaccgatgaagaggtgcgcttactggtggtgggtgaggctaataaaaaacataaccgcatctactatcccctcaatccggtgtatgccgtgacgcgcgaagaccactgggtagaccatccgcctcagttttttggcccgcacgatggaaaacctgggcgaaaataa

SEQ ID NO: 119286 - DNA, 369 bp, Enterobacter cloacae
atggccaataataccactgggttaactcgaatcattaaagctgccggttattcatggaaaggtttccgcgccgcatgggttaatgaagccgctttccgccaggaagcggttgccgcaatcgttgccgttgtcatcgcctgcttccttgatgttgatgctatcacccgcgtactgctcatcggatctgtccttctggtgatgatagtggaaattctgaatagcgctattgaggccgttgttgaccgaatcgggtcggaattccatgaactgtctggccgggcgaaagacatgggttccgctgccgtactgctgtcgattatcacggcggcgatcacctgggtcacgctactttggtcgcatttccgatga

SEQ ID NO: 119287 - DNA, 939 bp, Enterobacter cloacae
atgaaaatgaagaaaaatctcgtcgcgctgtgcctgtcagcgggtctgctggcctgtgtgcctggcgtcacgctcgctgacgtcaattatgtcccgcagaataccagcgcagcgcctgccattccgacagccgctctacagcaattaacctggacgccggtggatcagtccaaaacgcagagcacacagcttgcgacgggtggccaacagctcaatgtggctggcattaccgggccggtagccgcctatagcgtaccggctaatatcggtgagctaacgttgactttatccagtgaagttaacaaacagaccagcgtttttgcgccgaacgttctgatcctcgatcagaacatgacgccttccgcctatttccccagcagctattttacctatcaagagccgggtgtaatgagcgcggaccgcctggaaggggtaatgcgtctgaccccggcgctcgggcagcaaaagctctacgtactggtcttcaccactgaaaaagatttgcagcaaaccaccactctgctcgatccggcaaaagcctatgccaaaggggttggtaacgccattcccgatattcccgatccgattgcgcgccataccaccgacggcctgcttaagctgaaggtgaaaaccaacagcagctccagcgtactcgtaggcccactgtttggctcatctggcccgggtccggtaacggtgggtaatactgccgcgcctgtgtatgccgcgccggccgcagcaccagccgcagccccggccccggcgaaaaaagccgagccggtgcttaacgatactgaaacttactttaacaacgccatcaagcaggcagttaaaaacggcgatgtcgataaagcgctgaaactgcttgatgaagccgagcgtttaggttcaaccactgcccgttccacctttatcagcagtgtaaaaggcaaggggtaa

SEQ ID NO: 119288 - DNA, 1365 bp, Enterobacter cloacae
atgattactctgcgcaaacttcctttggcagttgccgtcgcagcgggcgtaatgtctgctcaggcactggcagtggatttccatggttatgctcgttctggtatcggctggacgggtagtggcggtgaacaacaatgtttccaggcaacaggcgcacaaagtaaataccgtctcggtaacgaatgtgaaacctacgccgaactgaaactgggccaggaagtgtggaaagaaggcgacaagagcttctatttcgacaccaacgtagcgtactccgtggcacagcagaatgactgggaaggtaccgatccggcgttccgtgaagctaacgtgcagggtaaaaacctgattgaatggctgcctggctctaccatctgggccggtaagcgcttctatcagcgtcatgacgtacacatgatcgacttctactactgggatatctctggtcctggtgccggtattgaaaacatcgatctgggcttcggtaaactgtctctggcagcgacgcgttcccaggaagctggcggttcttatgccttcagcagccagaacatctatgaccgtaccaaagataccgcgaacgacgtatttgacgtgcgtttagcgggcctggaaactaacccggacggcgtgctggaactgggtgtggattatggccgcgcgaacacgaccgacggctatgatcttgccgacggcgcgtcgaaagatggctggatgttcaccgctgaacatacccagagcatgctgaaaggctacaacaagtttgtgctgcagtatgcgatggactcaatgaccacgcagggtaaaggtctgagccagggttcctatggttcttccagctttaccatcacgaatcctgatggcacgacgaccaattacgccaacgatgtgattaacaacaacggcagcctctggcgcatcctggaccacggtgcaatcaccctggccgacaagtgggacctgatgtatgtcggtatgtaccagaaactcgacatggatgataaccaggggagtgactggtggaccgtgggtgtacgtccgatgtacaaatggacgccaatcatgagcaccctgctggaagtgggctacgacaacgtcaaatcccaggaaaccggcgatcgcaacagccagtacaaaatcaccctggcgcaacagtggcaggctggcgacagcatctggtctcgtccggccatccgtgtcttcgcaacctacgcgaagtgggatgagaaatggggctacgcgaagaacggtaacggcgatgccacccgttacgcgatctctgactccaccggtaacggtcgattctctaccagccgcggcgatgacgatgagttctccttcggcgcccagatggaaatctggtggtaa

SEQ ID NO: 119289 - DNA, 1545 bp, Enterobacter cloacae
atggatgtcattaaaaagaaacgctggtggcaaagcgacgcactgaagtggtcagtgataggtctgctgtgtctgctggtgggttaccttgttgttttaatgtacgtgcaaggggaatacctttttgccatcatgacgctgattttaagctcggttggcctgtatattttcgccaaccgtaaagcgtatgcctggcgctatgtctaccccggtgttgccgggatggggctgtttgtcctctttccgctgatctgcaccatcgcgattgcctttactaactacagcagcaccaaccagctcgcgcaggagcgtgccacccaggtgcttctggatcgttcttatcaggcgggtaaaacctttaacttcggcctgtatcctgcgggagatgagtggaagttagcgctcactgacggtgagagcggcaaaaactatctttccgacgcgttcaaatttggcggcgagcagaagctggtcttaaaagaggccgcggccctgccggaaggtgaacgtgccaacctgcgtatcatcactcaaaatcgccaggcgctgacccagctcaccgccgtgctgcccgatgacagcaaagtaaccatgagctcgctgcgccagttttccggcacgcagccgctttatactctggcggatgacggcacgctgaccaacaaccagagcggcgtaaaataccgcccgaacaacgatatcggtttctatcagtcggtgaatgccgacggcagctggggcgacgacaagctcagcccgggctataccgttaccatcggctgggataactttacccgcgtgtttaccgacgaaggcatccagaaaccgttcttcgccatcttcgtctggacggtagtcttctccatcctgaccgtgatcctgaccgtggccgtgggcatggtgctggcctgtctggtccagtgggaatccctgaaagggaaagcgatttaccgcgtgctgctgattctgccgtacgccgtgccgtcgttcatctcgattctgattttcaaagggttgtttaaccagagcttcggtgaaatcaacatgatgctgagcgcgctgttcggcatcaaaccggcctggttcagcgacccgaccaccgctcgctcgatgattatcatcgtgaacacctggctcggttatccgtacatgatgatcctgtgcatggggctgctgaaggccatcccggacgacctgtacgaagcctcggcgatggacggcgcgggtccgttccagaacttcttcaaaattaccctgccgctgctcattaagccgctgacgccgctgatgattgccagcttcgcctttaactttaacaacttcgtgctgattcagctgttgaccaacggcggtccggaccgtctcggcaccaccacgccggcaggctataccgacctgctcgtgagctacacctaccgtatcgccttcgaaggcggcggcggtcaggacttcggactggcggcggcgattgccaccctgatcttcctgctggtgggcgccctggcgatcgtgaacctgaaagctacacgtatgaaatttgactaa

SEQ ID NO: 119290 - DNA, 174 bp, Enterobacter cloacae
atgaagcatgtactggtcgctcccgccgttgagatcgcgggaaaaccctgcgtggtgatgatgtacatgatggcaggcatatcgctaaaagagttaggtgaacgcgttgccgatcttactaacagcagtgcttcattgcgggatgcactcgattttctgatcagcggttactag

SEQ ID NO: 119291 - DNA, 294 bp, Enterobacter cloacae
atgctcaattattacgctacacttcgccagttcatgcgcattccaatgggggttctcatgcgcggtgctaatagcattaaaaaatcagtgaatgtttccctgtcgccggacattcttgaagaggcgcgaaggcttaaacttaacctttctgccgtgctaacggcggctttgcaggagcaatttcgtgaacatcggcgcgcagagtggcttgaagaaaataaagcttctatggacgccattaaccagtgggttgatgaaaacggctcctttagtgactttcagaggtcgttctga

SEQ ID NO: 119292 - DNA, 1632 bp, Enterobacter cloacae
gtgttgacattgttacacctgctctccgcagtcgcactgctggtatggggcacccatatcgttcgtaccggcgtgatgcgcgtgtttggcgcacgtttacgtaccgttctcagcggcagcgttgagaagaagccgctcgccttctgtgcgggtattggcgtcacggcgctggtgcaaagcagcaacgccaccaccatgctcgtcacctcgttcgtggcgcaggatctggtggcgctcgccccggcgctggtgattgtccttggcgccgacgtcggtaccgcgctgatggcacgtatcctgaccttcgatctctcctggctgtcgccgctgctgatttttattggcgtcattttcttcctcggccgtaagcaaagccgtgccgggcagcttggccgcgtcggtattggcctcgggctgatcctgctggcgctggagctgattgtgcaggctgtcacgccgatcacccaggccaacggtgtgcaggtcattttcgcctcgttaaccggcgatattatgctggatgcgctgatcggcgcggtgtttgccattgtcagctactccagcctggcagcggtcctcctgacggcgaccttaaccgctgcgggcgcgatctctttcccggtggcgctatgcctggtcatcggtgcgaatcttggctctggcctgctggcgatgctcaacaacagcgcagccaatgctgccgcccgccgggtggcactggggagtttgctcttcaagctggtgggtagcctgatcattctgccgtttgtgcacccgctggcgaacctgatggacaacctctctctgccgaaagcggagctggtgatctacttccacgtcttctacaacctggtacgctgtctggcgatggtgccgtttgccgcgccgatggcccgcttctgcgagcggctaattcgtgatgaaccggagctggacgcgcgccttaaaccgaagcatctggacacctcggtgctggacacgcccgcgctggccatcgcgaatgccgcccgcgaaacgctgcgcatgggtgacgcgatggaaaccatgctggaagggttgcaaaaggtgatgcacggcgagccgcgcgaagaaaaagagctgcgcaggctggcggacgatatcaacgtgctgtataccgccatcaagctctatctggcgcggatcccgcaggacgagctggcggaagaggagtcgcgccgctgggcggaaatcattgagatgtcgcttaacctggagcaggcttcggatattgtcgagcgtatgggcagtgaaatcgcagacaaatccctggccgcacgtcgggcgttttctgttgaagggctgaaagaactggaagcgctgcacgaacagctggtcagcaacctgaagctggcgatgtcggtcttcttctccagcgacgtgccgagcgcgcgccgcctgcgccgcaacaagcaccgtttccgcatcctcaaccggcgctactcgcacgcccacgttgagcgtctgcaccagcagaacgtgcagagtatcgaaaccagctcgctccacctggggctgctgggagatatgaaacgtctcaactcgttgttctgcgcggtggcgtacagcgtgatggagcagccggatgaagatgatgagcgggatgagtattaa

SEQ ID NO: 119293 - DNA, 324 bp, Enterobacter cloacae
atgaaaaagacagttctcgctttgattatggttaatgcgtttaccgccacttccgcgttcgccgccgctgatgcgggcacctggtatggcggagcgaaattcggctggtcacactattttgataccaatatgggttcaaaagcgtttgataacaataattccgaccacttcgattttgaccatgataatgtcggtgggggtgtttatacgggttaccagattaccccatggcttgcggtagaaggcggttatgattatttaggcaacatgcagatcaagggtcagcatggcgcaggggcgcaaatgaagacgcagggtctgtaa

SEQ ID NO: 119294 - DNA, 288 bp, Enterobacter cloacae
atgtcactgaaggccagctatgccttgaccaatgactgggatatctacggccgtgccggtgcgatgggctatcgcgctgaatccgatgtaagtggtcacaatcgttttgaaaccggtgtgcgcccgcttgcagctgtgggtactgaatacgccttcaataaaaactgggctggccgcctggaatatcagtgggtaagcaatgtgggtaatgcaaaccagatcggtgtgagcagcgacctgagttccgtcaccgcagggcttagctatcgctttggtcagtacgactga

SEQ ID NO: 119295 - DNA, 1983 bp, Enterobacter cloacae
atgaaatttaaaactctcgttagtgcgatggccgttgctggtctgctattggcctcgttgatctcattgcctgtcctggcacaaaaggaggtgaaggaagccactgcccatacgaaacaaatgaatgatgcactttatggtcaactgcccttctttgataaaaccgatttccgaaatgcgcataaaggctttattgccccgctgccacctgcggtgattaaaggtgaaaaaggcgccgttatctggaatccccagaaatacgcttttatcaaagaagggcaaaaagcgccggataccgtcaacccgagcctgtggcgtcaggcgcagctgaataatatcggcggtctgtttgaagtcacggaaggcgtctaccagatccgcaacctcgatctgtcgaatatgacaatcatagagggcaaagaggggatcacggttatcgatccgctggtgtctgcggaaacggctaaagcgggcatggatctttacgttaagcatcgcggcaaacgtccggttgttgccgttatttatacccatagccacgtcgatcattatggcggcgtgcgtggcgtaattgatgaagccggggtaatgtccggcaaagtgaaagtctatgcgccagccggttttatggaagaggcggtatcggaaaatatcatggccggaaacgccatgagccgccgtgccagctatatccacggaaacctgctgaaacccggtgtgaaggggcaggtgggggcaggtctggggactaccacctcagccggaacggtcacgctcatcgcgcccactcactctattaccgaagaggagcagaaagaggtcattgacggtctcacctatgactttatgctgacgccggaatcggaagcaccgtctgaaatgctctggtatgtggaagagaaaaagctgatcgaagcagcagagaacgtcactcacaccctgcacaatacctactcgctgcgcggggctaaaatacacgatccgctggcatggtcaaagtacatcaataacgccattgatcgttggggtgataaagcggaaatcattatcgcgcagcaccactggcccacgtggggtaacaaaaaagtggtgaagctgatgaaaagccagcgtgatatctaccgctatatcaacgaccagacgctcagactggcgaataaggggctgacgagggatgaaatagccgctaatttcgccctgccttacgggctggctaaatcctgggcaggccgtggctattacggctcggtaagcaacaacgtcaaagccacctatgtctactatcttggctggttcgacggcaatccggcgacgctcgatgaactgcctccggtcgaggcggcgaaaaagtatgtcgattacatgggcggagcccgcgcgatccttgaaaaagcccgtgtcgattatgcccgggggaattatcgctgggtggctcaggtggtcagtaaagtcgtttttgccgatccgaataataaggcggcgcgcgaactggaagccgatgcgtttgaacagctgggataccatgcggagtcagggccgtggcgtaacgcctacctcaccggtgcgcaagagttgcgtaacggcgtgaagataaagccgacgcccaaaaccgccagcccggatgcggtccgtgccatgtcaactgagatgatttttgactacttcggcgttcaccttaacggcgtcagagcggcgaatgccagaggcatttttaacgttgatttaggccgcgagggcggcaggtataagctggagctggagaatggcgtgctaaaccacagtgccaatatccaggcagaagatccggatgcaaccattacgctcagccgcgaaacgctgaacaaaatcatccttaaggaaaccacgctgaaaaaggcgcaacaggcaggagaggtgacgatcgtcggcaacgccgtgaaggtagatgaaatgctgcgctgcatggagagcttcagtttctggtttcctgtcgtcaccccttaa

SEQ ID NO: 119296 - DNA, 465 bp, Enterobacter cloacae
atgaaaaacgaacatggctttacgcttatcgaaacccttttcgccatctcgctggttgtgatcctcagcgcgacgggtctttatggctgggacagctggcaacagcggcagcggctctggcagacagcctgtcaggtgcgggattacctggcgttcttgcgaaacgacgcaaatcgtcacaacagcgagcacaggatcgcgcttcacgctgacgggaatcaggcctgccttgtcagcgctgtggtcccgggctgcgacagcggcgacccgttcgtgatgaaaccgttatggccggaggtcacgctgagcgacgtaacgcctgcgctgggattttacggcttaagggataccgcatgggccggacatattcgcgtgcagagccgcgccggtgcgtggtgggttattgtctcaaatggcggacgtatcaggctgtgtaatgccgcaggagaaagtctatgccagtaa

SEQ ID NO: 119297 - DNA, 2883 bp, Enterobacter cloacae
atgccaggcagcaccttgttcaaagcgtttgttttgtttatcgccctttgggctcccgtcactcaggccgattccggttggcaacctgtccaggaaacaatccgtaagagcgataaggacacccgtcagtatcaggcgattcgtcttgataacgggatgaccgtgctgctggtttccgatcctcaggcggttaaatcgctctccgcactggttgtgccggtcggatcgctggaagatcctgatgaccatccgggactggcgcactaccttgagcacatgacgctgatggggtctaaaaaatacccacagcctgacagcctgtccgaatttctgaaaatgcatggcggcagccacaacgccagcactgcgccgtatcgtaccgcgttttacctggaagtggaaaatgatgcgcttgacggggcggtggaccgtctggcggatgccatcgccgcaccgctgctggataaaaaatatgctgaccgggaacgcaacgccgtaaacgccgaactgacgatggcgcgcacgcgagacggtatgcgcatggcgcaggttagcgctgaaaccatcaatccggcgcatccgggttcgcgcttctcaggcggcaaccttgaaacgctgagcgacaagccgggtagcccggtgctcgatgcgctgcatgcgtttcgtgaaaaatactattccgccaatctgatgaaagcggttatctacagcaataaaccgttgccgacgctggcaaacatggctgcgcagacctatggcagggtgccaaataaaaatatcgatctgccgcagattaacgtgccggttgtcacggacgcgcaaaaaggcattgttattcactatgtgccggccttgccgcgtaaggtgttacgcgtagaattccgtattgataacaacacggctcagttccgcagcaaaactgacgagctggtgacctatcttatcggcaaccgcagcccgggtacgctctccgactggctgcaaaagcaggggctggtggaaggtattcgcgctgactccgatcccgtcgtaaacgggaatagcggcgtgctggccatctccgcgacgctgaccgataaagggctggctcaccgtgacgacgtcgttgcggccattttcagttacctctctctgctgcgcgacaaaggcgtcgataaacgctacttcgacgagctggcgcacgtgctggatctcgatttccgctatccctctattacgcgtgatatggactacgtcgagtggctggcagataccatgatccgcgtgccggtggaacatacgctggatgcggtaaatattgccgatcagtatgacgccggggcgctcaaagcgcgtctggcgatgatgactccgcagaatgcccgcgtctggtatatcagcccgaacgaaccgcataacaaaatggcctacttcgttgatgccccgtatcaggttgaaaaaatcagcgaacagaccttcgcgggctggcagaaaaaggcgggggaaattgcgctgaagttaccggagcttaacccctacatcccggacgatttctcgctgatcaaacctgcaaaggcctatccgcatccggagctgattgttgatgagccgacgctgcgcgtggtctacaccccaagccgctatttcggcgacgagccaaaagcggatgtcagcgtagtgctgcgtaatcctaaagcaatggacagcgccagaaaccaggtgctgtttgcgcttaacgattatctggccggtattgccctcgatcagctcagcaaccaggctgccgttggcggtatcagtttctccaccaatgccaataacggcctgatggtgaatgccaacggctatacccagcgtttgccgcagctgttccaggcgctgctggacggttatttcagctatacgcctacggaagaacagctcgagcaggctaagtcctggtatgcccagatgatggattctgccgagaagggtaaagcctacgatcaggcgattatgccagcacagatgttgtcccaaattccttatttccagcgcgaagatcgccgcgcgttattgccctcagtcaccttaaaagaggtgctggcttaccgtgattcgctgaaaaccaatactcgtccggagttcctggttgtagggaacatgagcgaagatcaggctaaaacgctggcacaaaacgtgcgtgcgcaactgggttcaaaaggcgatgagtggtgccgtaaccaggatgtgctggtagagaaaaagcagaatgcgatcttcgaaaaagcgggaagcagcacggattccgcgctggccgcggtgtttgtccctgtcggatatgacgaatttaccagctctgcccagagtgcggtgctcggtcaaattattcagccgtggttttacaaccagctgcgcaccgaagagcagctgggttatgcggtattcgctttctcgatgaatgtgggccgtcagtgggggttgggcttccttctgcaaagcagcgacaagcaacccgcttacctgtggcaacgttatcaggcattcttcccgcaggcggaagcaaaactgcgcgccatgaagccggaagagtttgcccagatccagcaggcggttatcgcccaggtgatgcaaccgccgcagacgctgggtgaagaggcctcgcagctgagcaaagattttgatcgcggtaatatgaaatttgattcgcgtgataaaatagtggccgaaataaaacagctgacgccacaaaaagttgccgatttcttccatcaggcggtagtaaaaccgcagggtatggccatcctgtctcaggtttctggcagccagaacgggaaaacggactacgtaaaatcaaaagagtggaccgtctggaagagcgtcagcgcgctgcaacaaactatgccctggagtaagaaagaatga

SEQ ID NO: 119298 - DNA, 1326 bp, Enterobacter cloacae
atgagcaatgttacgcacccgccgaaaatcggctttgtctccctgggctgcccgaagaacctggtggattccgaacgcatcctgactgaacttcgcactgaaggctatgacgtggtgccaagctacgacaacgccgacatggtgatcgtcaacacctgtgggttcatcgacagcgcggtccaggagtcactggaagccattggtgaagccctgacggaaaatggcaaagtgattgtcaccggctgcctgggcgcgaaggtggatcagatccgcgaagtgcacccgaaggtactggagatcaccggcccgcacagctacgagcaggtgctggaacatgttcatcactacgtaccaaagccaaagcacaacccgttcctgagcctggtgccggaacagggcgtgaagctgacgccgcgccactatgcttacctgaaaatttccgaaggctgcaaccatcgctgcaccttctgcatcatcccgtcgatgcgtggcgatttggtgagccgtccgattggcgaggtgctggcagaagccaaacgcctggccgacgcgggcgtgaaggagttactggtcatctcccaggacacctccgcctacggcgtggacgtcaaacaccgctccggcttccataacggcgagccggtaaaaaccagcatggttggcctgtgcgagcagcttgctaagctcgggatctggacgcgtctgcactacgtctacccttacccgcacgttgacgacgtgattccgctgatggcggaaggcaaaatcctgccgtatctggatatcccgttacagcacgccagcccgcgcattctgaagctgatgaagcgtcctggatccgttgaccgccagctggcgcgcatcaagcagtggcgcgagatctgccctgaactgaccctgcgctccaccttcatcgttggcttcccgggtgaaaccgaagaagatttccagatgctgctcgacttcctgaaagaagcgcgtctggatcgcgtgggctgcttcaagtacagcccagttgaaggcgcaacggccaacgagctggcggaccaggtaccggaagaggtcaaagaggaacgctggaaccgctttatgcagctgcaacagcagatctctgctgaacgcttgcaggagaaagtgggccgcgaaattctggtcattatcgacgaagtggacgaagaaggcgcgattggtcgcagcatggcggatgcgcctgaaatcgacggcgcggtgtacctgaacggggaaaccaacgtcaagccgggcgatattattcgcgtgaaggttgaaaacgccgacgagtatgatttgtggggcagccgggtttaa

SEQ ID NO: 119299 - DNA, 1041 bp, Enterobacter cloacae
atgcgttatcaaaaactgggcaataccggactgtttgtttctgaactctgcctcggcaccatgaccttcggcggcgagggcggcatgtggggcaagattggccagctaaggcaaaacgaagccgagcagctggtgggccgcgcgctggacgcgggcatcaactttatcgacactgccgacgtctattcggaaggacgctcggaggagatcctcgggcaggcgctaaaaaacctgaacgttccacgtgaaaacgtggtggtcgccacaaaggtgtttggtgaaacgggcacggcgggagtgaactcacgcggcggctcgcgctatcacattatcgacagcgtaaaggagagcctgcgccgcctgcagctcgatcatatcgatctctatcagctgcacggtttcgaccccgcgacccccattgaggagacgctttacgcactggataaccttgtacagcacggtcacgtgcgatacatcggcgtctcgaactggactgcgtggcagattgccaaagcgctcggtatttctgaacgtcttgggctggcgcgtttcgcatcgttgcaggcgtattacaccattgccggacgtgacctggagcgcgagctggtgccgatgatgcagagcgaaggcgtcggattgatggtctggagcccgctggcgggcggcctgctgagcggaaaatacggtcgtgacgggcagagcgaaaccggaggccgccgtctggaatttgacttcccgccggtgaataaagatcgcgccttcgactgcgtggacgtaatgcgcgtcattgccgagcgtaggggcgtctccgtggcgcaaatcgcgctggcatggctgctgcatcaaaaagcggtgaccagcgtcattattggtgcgaaacgcgtcgatcagctggacgataatattgccgccaccgagatccgcttaagcgaagacgagcttaaacagcttgatgccgtcagcgcgctgccgcgcgaatatccaggctggatgctggagcggcagggggaataccgtcgtagtcagctcgcgcagcagtaa

SEQ ID NO: 119300 - DNA, 1524 bp, Enterobacter cloacae
atgatacacagacgtttacaccccctgatgataatgatgctgctggtgggctgcgccgtcggtccggactaccaacagcctgcaccgcccgccaccacgcactggaacgataagggcgacggcgcggtgaaatcgcaaacgtcctccgccgccaccaacccgcgctggtggaaaaccttcggctcgccgcagctcgacagcctgattgaacgcgccatcgccggaaatctgacgctacagcaaaccgtattgcgcattgccggcgcgcgcgaacagattaaccaggccggcggggcatttttcccgtcggtgaatggcaatgtgcaggcgacgcgccagcagcttgggctgcaaggggagctgaaatcccacggcgtgtatgaccagttgaataatgtcgatccgcagctgcgaagcgcgttaggcccgctgacgcagccgattaacctctatcagggcagcttcgacgctcagtgggaaatcgacctgtggggcaaggtgcgccgtcaggtagaagcggccgaggcgcagcagcgggcggcgatcgagcagcgtaacgatgcgctggtctcgctggaggccgaagtggcgcgggcgtggctacagctgcgaggggcgcagagcatcattgccacgcttaatacgcaaattgaaagcgcgcagcagacgctggatctgaccgaaagccgccagcggggtgggctgtcaccgcagatggacgtggagaacgcccgcgcgcagctgggcaatcttgaagcccaattgccacagtatcaggcgcaggaacgccaggcgatgaacgggctggccatcctgctcggcaaaccgccgggggcgctggatgccgaattacaatccgtgcagccgatgccagcgttgccggatattgtgcaaaccggcattccgtcaacgctggcgcgtcgtcgcccggacgtgcgcgaagccgaggcgaacctccatgccgccacggcgcaaattggcgtctcggtagccgaactgttcccaagcttcaccctctccgggcagtttggcctgcgtaacagcgaatccggctggctgaccgactggagcagccacttttacagcttcggtccgcaggtctccatccccatcttccagggcggtcggctggtctccagcgtcaaagtggcccgcgcacagcaaggggcggcggtgctggactatcgtcagacggtgctgacggcgctcggcgatgttgaaaacgcgctggtgagctatcgcactgaccagcagcgtgaggcgggcctggcgaaaaccatcgacgcgctgcaaaacgcttttgatctcgccagcgacagctaccggcaggggatcgccagttttattgacatgctggacgcccagcgtcagctcgctcaggccgaacagcagcgggcgcaggcgcaggtgcagagcgcacttgacctggtggcgctctacaaagccctcggcggcggctgggagccgtatcagcaggttcagctgccagactacagcgtctttggcgatgccccgcgcggatag

SEQ ID NO: 119301 - DNA, 411 bp, Enterobacter cloacae
atgaagtggcaacaacgcgttcgtgtcgcaaccggtttgagttgctggcagataatgttgcatttactggtcgtggccgtactggtgatgggctggatgagcggcacgctggtgcgtgtcggcttagggttatgcgtggtttacggcgtgaccgtgctgtcgatgctgtttttacagcgtcaccacgacgcgcgctggcgtgaagtgggtgatgtgctcgaagagctcaccaccacctggtattttggtgcggcaatgatcgtcctgtggctgttgtcacgcgtgctgcaaaacaacctgctgctggccctggcgggtctggctatcctcgcagggcctgcggtggtgtcgttgctcaccaaagagaaaaagctacgcgatgtttcgtctaaacatcgcataggccactga

SEQ ID NO: 119302 - DNA, 1251 bp, Enterobacter cloacae
gtgaagatcgctcgcaaaaacaaactgtggataagtttgtgcatatttttaatacgggtgaataacagttctataaaactgatactgaaaaattatttatcaaataaaatcaattatttgaaattagatcacttaagatcccatcccactgatggttatttagtctatgtggatataagacgtaagcaccctgtctatatagaaaatttcgctgcatggcaggaaaagccgcagcctcttcgtgtgaaagcgccctggtctgggccaatatctgataagatcggcgcccagcaccggatagccggctgcttaattacagctaactatctgaaaaaattcattatgtcgaaaatactcgctgcgataaccttattgctaagcgtcattttaactattctggttaccatcgcctgttctgtgccaatcatcgttgccggaataattaagctcctgctgcccgtccctccggtatggcgttcagtgtctgctttttgtaattttatgatgtactgctggtgtgaagggctggcgatcctgttgtatctgaacccctggttaaagtgggacgttcagggccttgagaagctgaataaaaagaactggtatctgctgatctgcaatcatcacagctgggccgacatcgttgtattgtgcgtgctgtttcgcaaacatattccgatgaacaaatactttctgaaacagcaactggcatgggtgcctttcattggtctggcctgctgggcgctggatatgccgtttatgaaacgctattcacgcagctatctgattcgtcatccggaacgccgcggtatggacgtggaaactacgcgccgttcttgcgagaagtttcgcgcgcatcccaccaccatagttaatttcgtcgaaggttcgcgctttaccgaagagaagcgccagcagactcgctctccgtatcagcacctgttgccgccaaaggcagcgggtatcgcaatggccctcaacgtgctgggtgagcagtttgataaattgttgaacgtaacgctctgctatccggaaaacgacaggacgccgttctacgatatgctcagcggcaagctgacgcgtatcgtagtccgcgttgatctgttgcccatcgatacggaactgcacggtgattacgttaacgataaaaacttcaaacgtcgtttccagctttggctcaatacactctggaaagagaaagacgaacagatagcggagttaaaatcttcatacaaaaacgccggtcaatga

SEQ ID NO: 119303 - DNA, 228 bp, Enterobacter cloacae
atgagtaattatctgaaaatccggtttagtaccttttcgttgcttgttagtttaagagaacaaggtaaagtgtgcgtcaaggcgaggatgccagcaggaaaacgacttaaggataagggtcaggagcgccaggaggcgaagactcaggattgtcaggacgaccggcgcctggaggcgtttttaacaggaaacggaaccgtatcacggacggtagtagccaagggataa

SEQ ID NO: 119304 - DNA, 744 bp, Enterobacter cloacae
atgtccttcctgttaatcaggagggaggcctttctgtacctgatacatggacaaattatgaatagaatcatcaccgtactgatcgtgtcgtctgtgtcctgcccggtttttgccggggcctatgtcgaaacgcgcgaagcgtacaatacggcctctgagctgcacgaggtgatcctgcgtgcgggctataacttcgatatgggcgcggggctgatgttcaccaacgcttataacgtggggaaatgggacgaactgaagcacagctataacgaaatcgagggttggtatccgctcttcaaaccgaccgacaaactcaccttccagcccggcggcttgatcaatgacagcagcgcaggatcgggtggagcactctatttagatactaactataaatttacggactggttcaatctgacgttccgctatcgctataaccataacaattacgatacgccggactataacgggcagatggataaaaacgacacgcacgaattcgccaactactggaatttcaaagtgacggatgcgtttttctacacctttgagccgcactttttccagcgggtgaatgattaccacagcaaaaatggcaaagatcatcactgggaaattaccaacaagttcagctataaaatcgacagaaactggctgccgtacctcgaactccagtggctggaccgatggaatgattacaaccgcgagcagtaccggattcggttagggttacgttattccttctaa

SEQ ID NO: 119305 - DNA, 1425 bp, Enterobacter cloacae
atgacacacaatactgatccgttaaccctgaaattgagcctgcgagagaagtgcgcctacgggatgggcgattttggctcgaacctgatgctctgtattggcacgctgtatctgctgaagttttacacggacgagctgggcatgcccgcgttctacggcggcatcatttttctggtcgccaagttctttaccgcgtttaccgacatgctgaccggggtgctgctggactcccggcgtaatatcggcgcgcgggggaaattccggccattcattctctacgcctccgtcccggtggcgctggtggccacggcgcagtttatggccaacgactttagcctgacggtgaaaacggccctcgccaccgtgctcttcatgatgtttggcctctgctacagcctgatgaactgcgcctacggtgcaatggttccggccatcaccaaaaacccgaacgagcgcgcgcagcttgcggcgtggcgtcagggcggcgcaacggtaggactgttgctctgcaccgtcggctttatgccgattcaggcgctgttcgtcagccagccctcactcggctatctggtggccgcgctggtgttcgtcaccggggggctgttctgcatgtggtggtgctacagcggggtgaaagagcgctacgtcgagcttacgcccgatcaccataagcccggcattctgaaatcattctgcgcaattttccgcaatccgccgctgctggtgctgtgcatcgccaacctctgtaccctcgccgcgtttaacatcaagctggcgatccaggtctattacacccagtacgtgctgaacgatctgcatctcctgtcgtggatgggctttttcagtatgggctgcattctgattggcgtgtttctggtgcccggtgcggtaaagcgctttggcaagaaaccggtctatctgggcgggctggcgctgtgggcggtgggcgacgtgctgaatttcttctgggggaccagctccctgctgtttgtgctcttttcctgcatggccttcttcggcacggcgtttgtgaacagcctgaactgggcgctggtgccggatacggttgattacggcgagtggaaaaccgggattcgcgccgaagggtcggtgtataccggctataccttctcgcgcaaaatctccgcggcgctcgccggttttctgcccggtatcatgctgacccagattggctacgttccccatgccgtgcagagcgcgggcacgctgctgggtttgcgtcagctgattttcctctggccgtgcggcctggcgatcgttgctgccgtgaccatggggctgttttataaactcaacgaagcgcgcttcgcctttattatcgaggagattggaaaacggaaaaaacagacagcaaatacccctgagataaccaccaacaataaagcgtcagcagtcactttataa

SEQ ID NO: 119306 - DNA, 2025 bp, Enterobacter cloacae
atgcgtaccctacacaatattgacctgaaaaataacgaaagtggtttttccctgcgctggcaggaccgtctgattttatcccactctgcggatgccccttgcctgtggatcggcgcaggtgaggcggatatcgagatgtttcgcggcaacttcagcatcaaagacaagctcaacgaaaagattgccctgacgaacgcgaccgttacgcagcaaagcacgggctgggcaatccgctttacccgcggcgacgcggtgagcgcgacactgctggtgggcgtagatgctgaaggccgtctggagctgaagctgaaaaatgacgccgccagccataaccgcatctggctgcggctggcagctcagcctgacgatcatatttacggctgcggcgagcagttctcgtatttcgatctgcgcggcaagccgtttccgctgtggaccagcgagcagggcgtgggccgcaataagcagacctacgtcacctggcaggccgactgcaaagagaacgcgggcggcgattactactggaccttcttcccgcagcctaccttcgtgagcacccagaagtactactgccacgtggataacagctgttatatgaacttcgacttcagcgcgccggacttccacgagctggcgttctgggaagataacgccacgctgcgcttcgaatgcgcagaaacctacgtcgatctgctggaaaaactgaccggcctgctggggcgtcagcctgaactgccggactgggtttacgacggcgtgacgctgggtattcagggtggcaccgaggtgtgtcagcagaagctcgacgccatgcgcgagggcggcgtgaaggtgaacggcatctgggcgcaggactggtccggcatccggatgacctccttcggcaaacgcgtgatgtggaactggaagtggaacagcgcgctctatccgcagcttgatgagcggattgcgcagtggaaacaggaaggcgtgcagttcctctcctatatcaacccgtacgtcgccagcgataaagatctctgcgaagaggcggcgaaacgcggctatctgaccaaaaacgccaacggcgaggattaccacgttgagttcggcgaattctacgcgggcgttatcgacctgaccaacccggcagcctacggctggtacaaagaggtcatcaaaaagaacctgatcgaactgggctgcggcggctggatggccgatttcggggaatatctgccgaccgataccttcctgcacaacggcgttagcgcggagatcatgcataacgcctggcctgccctgtgggcgaaatgtaactacgaagcactggaggagaccggcaagctcggggagatcctgttcttcatgcgcgcgggctacaccggcagccagaagcactcggtgatgatgtgggcgggggatcagaacgtcgactggagcctggacgatggtctggcgtccgtcgtaccggcggcgctgtctctggcgatgaccgggcacgggctgcaccacagcgacattggcggctatacgacgctgttcgagatgaagcgcagcaaagagctgctgctgcgctggtgcgatttcagcgcctttacgccgatgatgcgtacccacgagggcaatcgccctggcgacaactggcagttcgacggcgacgccgaaaccatcgcgcacttcgcgcgcatgaccaccgtgttcaccaccctgaagccgtatatcaaagctgcggttgcgcagaacgcgaaaagcggcctgccggtgatgcgtccgctgttcctgcactacgaggacgacgcgcgcgcctacacgctgaaataccagtacctgtttggccgcgatctgctggtggccccggttcatgaagagggacgccgcgactggtcgctctatctgccgcaggacagctgggtcaatgcgtggacgggggaaacctgccagggcggtgacgtgaccgttgatgccccgctcggcaaaccgccggtcttctatcgccagcaaagcgaatgggcagatctgtttagcaccttacgtcatatctga

SEQ ID NO: 119307 - DNA, 1242 bp, Enterobacter cloacae
atgaaatggtttaataccctgagccataatcgctggctcgaacaagagaccgaccgcattctcgatttcggtaaaaacgccgccgtaccgaccggctttggctggctgggcaataacgggcaggtgcgtagcgatatgggcacccatctgtggatcaccgcccgcatgctgcacgtttacgcggtggcggcgaacatgggacgtcctggtgcgtacgccctggttgagcacggcattaatgccctgaacggtccgctgcgcgacaagcagcacggtggctggtacgcctgcgtaaacgatgaaggcgtgattgatgcgtccaagcagggctatcagcatttcttcgtcctgctgggcgcggcgagcgccgtcaccaccggccatccgcaggcacgcaagttgctggacgacgccatcgaggtgattgagcgctacttctggagcgaacaggagcagatgtgcctggagtcctgggatgaagccttcagcaaaacggaagattaccgcggcggtaacgccaacatgcacgccgtggaagccttcctgatcgtttatgacgtgacccacgaccgtaaatggctcgaccgcgccctgcgcatcgcctcggtgattattcacgacgtggcgcgcaaaggggagtaccgcgttaacgagcatttcgacaccaactggaacccgatccgcgactacaacatcgataaccccgcccaccgcttccgcgcctacggcggcacgccggggcactggattgagtggggtcgcctgatgctgcacctgcgcgccgccctggaagcgcgctttgaaaccccgccggaatggctgctggaagatgcgaaaggcctgttccacgccaccatccgggacgcctgggcacccgacggggccgatggatttgtctactccgtgggctgggacggtaaacctatcgtccgcgaacgcgtgcgctggccaatcgtcgaagcgatgggtacggcttacgcgctctacaccgtcaccggtgaggcgcagtacgaagcctggtatcagaagtggtgggattactgcatcaagtacctgatggattacgaaaacggttcatggtggcaggagctggacaccaataacgaagtgaccaccaaagtctgggacggcaagcaggatatttaccatctgctgcactgcctggtgatcccccgcctgccgctggcgccgggcttagcgcctgccgtagccgccggattactggatagcctggccaaataa

SEQ ID NO: 119308 - DNA, 213 bp, Enterobacter cloacae
atgaaaagcatcaaaacttttgtcgcagtaatcgctctggctacatctttcggttctttcgctgcgcagactgtgaccgcatccgcctctacgctggacggtgcagaagctaaaatcgccgcacaggctcaggaagcgggcgcgtcatcctacaaaattactcaggcattcaccggtaaccgcgtacacatgaccgctgaactgaacaaataa

SEQ ID NO: 119309 - DNA, 2124 bp, Enterobacter cloacae
atgcaagatgccatttttcgacttgaaagcaatacggttgacgtggtgctaaaaacccacccgttcgccgaaattctctactgggggccgcaccttcagcacttctcgccgcaggatgtcctgagtattgcgcgcccggttgctaacggcaggctggacgtcgactcccccgtcacgctgatggcagagctggggcacggcctgtttggttcgcccggcatcgaggggcatcgtcaggggctggacggatcgcctgtcttcaccaccacaggcgtacaacagcaggggcaaaccctgacggtaacggcggaagataaacaggcgggcctgcgcctgaccagtgaattaacgctggatgccagcggcgtactggtggtgcgccatgggttaaccaacctgaaaacgcaggcgtggcaggtggatcgctttgccgtgacgctcccgattgccgagcgcgcgcaggaggtgatggccttccacggacgctggatcagggagtttcagccgcaccgcgttacgcttgagcacgacagcttcgtgattgaaaaccgccggggtaaaacctcccacgaacatttcccggcactgatttcaggtacgccgtcattcagtgaaatgcacggccacgtctggggtgtgcatctgggctggagcggcaaccaccgcctgcgcgcagaggtgaaaaccgatggccgccgctatatgcaggccgaagcgctctacctgccgggtgaaatggcgattgaagagggggaaacgctctggacgccgcgcctgtatgccagccactccccgcacgggctgaacggcatgagccagcagttccaccgttatctgcgcgacaacgttatccgcttcccggaagataaaccgcgcccggtgcacctcaacacctgggaggggatctacttcaaccacgatccggactacatcatgcgcatggccgacgaggccgcagcgctgggcgtggagcgctttattatcgacgacggctggttcaaaggccgcaacgatgaccacgcggcgctgggcgactggtatctggacgagaaaaaatacccgaacggccttaagccggtgatcgatcacgttaaacagcttggcatggagtttggtatttgggttgagccggagatgattaacccggattccgatctgtatcgcgcgcaccctgactgggtgctggcgctgccgggctacgcccaggcgaccgggcgacatcagctggtgctcaatcttaatattccgcaggcctttgattatttggtcgagcgcatgagctggctgctgggcgagcatgcggtcgactacgtgaagtgggacatgaaccgcgagctggtgcagccagggcacaagggcaaagccgccgccgatgcccagacccgccagttttatcgcctgctggacgtgctgggcgagcgtttcccgcacattgagtttgaatcctgctcgtcgggtggcgggcgaatcgattatgaagtgctgacccgctgccaccgcttctgggcgtccgacaataacgacgcgctggagcgcaacactatccagcgcggcatgagctacttcttcccaccggaggtgatgggggcgcatatcggtcatcataaatgtcacgccaccttccgccagcacagcattcagttccgcgggctgacggcgctgtttggtcacatggggctggagctggatccgctcaccgtcgatgcgcaggagcgtgaaggctatcgccattacgccgcgctgtataagcggtggcgcgaggtcattcatcgcggcacccagtggcgtgtggatatgccggacgccaccactttggcgcagggtatagtgagcgaagacaagacgcaggggctgtttttggtcagccagctcgcgatgccggattacaccctgatgatgccgctgcgcatgccggggttagacgccagcgcgcagtaccgcatcacgctgctcgatcacccgaacattcagattacgggcgagggcgggcacaccatgcgcaagctgccggcgtggatggacgcgccgcaaacggtaagcggtgaatggctgatgcaggcgggtattgcgctgccaattctggatccggaaaccgccattctgattggtgtggaacgcgtgtaa

SEQ ID NO: 119310 - DNA, 963 bp, Enterobacter cloacae
atgattaagaaaatcggtgtgttgacaagcggcggtgatgcgccgggcatgaacgcggcaatccgtggggttgtccgtgcagcgctgacggaaggtctggaagtttttggtatctatgacggttacctgggtctgtatgaagaccgcatggttcagctcgaccgctacagcgtgtctgacatgatcaaccgtggcggtactttcctcggttccgcgcgcttcccggaattccgtgacgaacacatccgtgaagtggctatcgaaaacatgaaaaaacggggtcttgatgctctggtggttatcggcggcgacggctcgtacatgggtgcaaaacgtctgactgaaatgggcttcccgtgcatcggcctgcctggcactatcgacaacgacatcaaaggcactgattacaccatcggttacttcaccgcgctgggtaccgttgtggaagcgattgaccgcctgcgtgacacctcttcctctcaccagcgtatttccattgttgaagtgatgggccgttactgcggtgacctgaccctggcggcggccattgccggtggctgtgagttcgtggtagttccggaagtagagttcagccgtgaagatctggtcgcagagatcaaagccggcatcgcgaaaggtaagaaacacgccatcgttgctatcaccgagcacatctgtgacgttgacgagctggcgaagtacatcgaaaccgaaaccaaacgcgaaacccgcgcgaccgttctgggtcacattcagcgtggcggttccccaggcccgtacgaccgtatcctggcgtcccgcatgggtgcgtacgcgatcgagctgctgctacagggccacggcggccgctgcgtcggtattcagaacgagaaactggttcaccatgacatcatcgacgccattgaaaacatgaagcgtccgttcaaaggtgactggctggactgcgcgaaaaaactgtactga

SEQ ID NO: 119311 - DNA, 1539 bp, Enterobacter cloacae
atgacaaacaatcctccctcatcgcgtatccagcctggcgagtatggttttccccttaagctgaagccccgctatgacaactttatcggcggcgactgggtggcgcccgtcgacggtgaatactattccaacctgacgcccgttaccggccagccgctgtgtgaaattgccagttcgggcaagcgggatatcgatttagcgctggatgcggcgcataaggcgaaagataagtgggggcaaatgtccgttcaggacagagcggccatgttgttcaaaatcgccgatcggatggagcagaatctggagctgctggcgaccgcagaaacgtgggacaacggcaagccgatccgcgaaaccatggcggcggacgtgccgctggcgatcgaccatttccgctattttgcgtcctgcatccgtgcccaggaggggggaataagtgaagttgacaaagataccgtggcgtatcacttccacgagccgctcggcgtggtggggcaaattattccgtggaacttcccgctgctgatggcgagctggaaaatggcgcccgcgctggcggcgggtaactgcgttgtgctgaaacctgcacgcttaacgccgctttcggtactgctgctgatggaggtaattggcgacctgttgccgccgggggtcattaacgtggtcaacggggccgggggagagatcggcgaatatctggctacttcaaagcgtatcgccaaagtggcgtttaccggctcaacggaagtgggtcagcagattatgcagtacgcgacccagaacatcattccggtcaccctggagttgggcgggaaatcgccgaacatcttctttgccgacgtgatggatgaagaggacgccttcttcgacaaagcgctggaagggtttgcgctgtttgcgtttaaccagggcgaagtctgcacctgtccgagccgcgcgctggtgcaggaatccatttatgagcgctttatggagcgggcgatccggcgcgtggagtcgattcgcagcggtaatccgctggataacgttacccagatgggggcgcaggtatcgcatggccagctggaaaccatcctcaactatattgatatcggtaaaaaagagggggctgatgtgttgaccggcggtcgtcgtaaggtgctgggcggcgatttgcaggagggctactaccttgagccgactatcctgttcggtaagaacaacatgcgcgtttttcaggaggaaatttttggaccggtgctggccgtcaccacgtttaaaaccatggacgaggcgctggagctcgcgaacgacacgcagtatggcctgggggcgggcgtctggagccgtaacggtaatctggcctataaaatgggccgcggcattcaggccggacgcgtatggacaaactgctatcacgcctatccggctcatgcggcgtttggcggctacaaacagtcgggcatcgggcgcgaaacccataaaatgatgctagagcactaccagcaaacgaaatgtctgttagtcagctactccgataaaccgctggggctgttttaa

SEQ ID NO: 119312 - DNA, 819 bp, Enterobacter cloacae
atgcttgaattatccatagcacttccgattaaggttcaaaatggcgggttatttatctcccggggcgtgggtcgtcatcccgcacgaaaattatcttcgtgggagataatctttgtcgaaaaagggacattaacgatccaggaggaaaatacgctgtttgaggtaaacgccggcgagagtttattactttggccgaagcggcggcatgtcggcgtggaagattttccgggcgatctcaaattttactggctgcattttgaggtggatgaaggcttgcctgcgttgccaggtgcgacgctattgtcgattgagcaacactgtagcgtgcgggatccgcaatatgttattgcgttattccgtcagtttttaagcgagcaggaaaaattacagcgtagccaggcgctggagataattttgctgttaattttgcagcagatatcgctctcgccgggatatgaagataaagcggatgatgcgggcgcagcaatggcgtggaaggccaaacaacttatccgcactcactttcatttgcccatatccacttcacagctggcgaaagagctgcactgcaacgcagattacctggggcgagtatttcgccggacgtttcatttaaccctgacggaggcaatacaccgccagcgcgtcagggccgctgaaaaattgttgctgaacgatgcggcctcattaactgaagtggccacccggtgcggttttaatgacgtgggttatttccggcagatattctcgaaacataccgggttaacgcccgccgtctggaaacggcggtactgtaaagagcatattaattccggatga

SEQ ID NO: 119313 - DNA, 1254 bp, Enterobacter cloacae
atgacgttttcacaattcggcgacaaatttacccgccattcaggcattacccgcctgatggaggacctcaacgacgggctgcgcaccccaggcgctatcatgcttggcggcggaaacccggctcaaattccggagatgaacacctacttccagacgctgctggcagacatgctggaaaacggtaaagcaaccgatgcgctatgtaattacgacggccctcagggtaaaacagaactactgacgcttctggcggcaatgctgcgggaagcgctgggttgggatatcgaaccacagaacattgcactgacaaacggcagtcagagcgcgtttttctacttattcaatctgttcgccggacgccgcgccgacggcaccacgaaaaaagtgctgttcccgctggcaccggagtatatcggctatgccgatgccggcctcgaagaagacctgtttgtttccgcacgtccgaatatcgagttgttgccagagggccagttcaaatatcacgtcgattttgaacatctgcatatcggtgaagagacgggcatgatctgcgtatctcgtcccaccaacccgacggggaacgtgatcaccgacgacgagctgatgaagctggatgtgctggcgaatcagcacggcatcccgctggtgatcgataacgcctatggcgtaccgttcccgggtatcatcttcagcgaagcgcgtccgctgtggaacccgaacatcatcctctgcatgagcctctccaagctgggcctgccgggcagccgctgcggcattatcattgctaacgagaaaatcatcaccgccattaccaacatgaacggcattatcagcctttcccctggcggcatcggcccggcgatgatgtgcgagatgatcaggcgtaacgacctgctgcgcctgtcaaatgaggtgatcaagccgttttactctcagcgcgttcaggaaactatcgccatccttcgccgctacttaccggaggaacgctgcctgatccataaaccggaaggggcaattttcctgtggctgtggtttaaggatctgcccattacgacagagctgctttatcagcgtctgaaaaagcgtggcgtgctgatggtgccgggggattacttcttcccgggactggataaaccgtggccgcatacgcaccagtgcatgcgcatgaactacgtcccggacccggaaaaaatcgaagcgggtgtgaaaattctcgccgaagagattgagaacgcctggcgcgaggccggttaa

SEQ ID NO: 119314 - DNA, 1572 bp, Enterobacter cloacae
atggccgatattgaaattcgacaggcgtcgccgacggcgttctatataaaagtgcacgataccgataacgtggcgattattgtcaacgacaatggcttaaaagcgggtacccgctttccggacgggctggagctgattgagcacattccgcaggggcacaaagtcgcactggtcgatatcccggcgcagggcgaaatcgtgcgctacggcgaagtcatcggctatgcggtgcgcgctatcccgcagggtagctggattgaggagtcgctggttgagctgcccaccgccccgccgctggagacgttgccgctggctacccgcgtccctgagccgttacctccgctggagggttataccttcgaaggttaccgcaacgcggatggcagcgtgggaaccaaaaacctgcttggcatcaccaccagcgtgcattgcgtggcgggtgtcgtggattacgtggtgaaaattattgagcgcgatctgctgccgaaataccccaacgttgacggcgtggtggggcttaaccacctgtacggctgcggcgtggcgatcaacgcgcccgcagcggtcgtgccgatccgcacgatccacaatatcgcccttaacccaaactttggcggcgaggtgatggtgattggcctcggctgtgaaaaattgcagccagaacgcctgttgcagggtactgaggatgtgaaagccattccggttgacgaggccagtattgtgcgtcttcaggatgaacaccatgtcggcttcagatcgatggtcgacgacattttacaggtggcagagcgccatctggagaagctgaacaaacgccagcgtgaaacctgcccggcctctgaactggtggttgggacacagtgtggcggcagcgatgcgttttccggcgtcaccgctaacccggcggtaggttatgcctccgatctgttcgtgcgctgcggcgccacggtgatgttctccgaggtcaccgaagtgcgtgacgccatccacctgcttacgccgcgcgccgtcaacgaggaggtgggtaaacgcctgctggaggagatggcctggtacgataactatctcgacatgggcaaaaccgaccgcagcgccaacccgtctccgggtaacaagaaaggcggcctggcgaacgtggtggaaaaggccctcgggtcgattgccaaatccggccagagcgcgattgtggaagtgctctcacctggccagcgaccaaccaaacgcggtctgatctacgcggcaacgcctgccagtgatttcgtgtgcggcacccagcaggtggcatccggcattacggtacaggtctttaccaccggacgcggcacgccgtacggcctgattgcggtaccggtgatcaaaatggcgacccgcaccgagctggcaaaccgctggtatgacttaatggatatcaacgcgggcaccatcgccaccggggaagagagtattgaagaggtgggctggaagctgttccacttcattctggatgtggcaagcggacggaagaaaaccttctccgatcaatggggattgcataactcgctggcggtgtttaacccggcaccggtgacgtga

SEQ ID NO: 119315 - DNA, 519 bp, Enterobacter cloacae
atgcaaccttcagaaaacaaaaaccccgccgaagcggggtttcgtaagaagttgaagctgaccgataagccgggttctgtcgtggacagtcattcatctaggccagcaatcgctcactggctcaagcagcctacccgggttcagtacgggccgtaccatgtgaacccctatttggccttgctccgggtggagtttaccgtgccacggactgttaccagccgcgcggtgcgctcttaccgcaccctttcacccttacctgatcccgcttacgcgggccatcggcggtttgctctctgttgcactggtcgtgggtttcccccccaggcgttacctggcaccctgccctgtggagcccggactttcctcccctccgcccgtctcccccgaaagggacgacgacgaagcggcgactgtctggtcagcttcggcgcgcagtatagagggtttgcgcgccgctgtcacccctggctacgcatgcctacctgcaatgtggccgcgatattgcgcgaggcgcggtaa

SEQ ID NO: 119316 - DNA, 1332 bp, Enterobacter cloacae
atgagcaacacagaaagcattatcgttggccagacaaaaacgtcctcctggcgtaaatcggataccacctggacgctcggcctgtttggtaccgccattggcgctggcgtgctgttcttccccattcgcgcaggctttggggggttgatccctattctgctgatgctggtactcgcgttcccgattgccttttactgccaccgcgcgctggcgcgtctgtgtttgtccggcagtaacgtctccggcaacatcaccgaaacggtggaggagcattttggtaagaccggcggggtggtgatcaccttcctctacttctttgctatttgcccgctgctgtggatttacggcgtcaccattaccaacacctttatgaccttctgggaaaaccagctccagatgcctgccctgaaccgcggcgtggtagcgctgttcctgctgctgctgatggcctttgtgatctggttcggtaaagacctgatggtgaaggtgatgagctacctggtgttcccgttcatcgccagcctggtgctgatttctctctcgctgatcccgtactggaactcagcggtgatcgaccaggttaacctgagcgatatcgccttcaccggtcatgacggcattcttgtcacggtgtggctggggatttccattatggtcttctccttcaacttctcgcctatcgtctcctcgtttgtggtctccaagcgcgaagagtacgagccggagtttggtaaagaattcaccgagcagaaatgttccaaaatcatcggtcgcgccagcctgctgatggtggcggtggtgatgttcttcgcctttagctgcctgtttacgctctctccgcagaacatggcggacgccaaagcgcagaacattccggtgctctcttacctggcgaaccactttgcgtcgatgtcaggcagtaaatccacgttcgccacggtgctggagtacggcgcgtccatcatcgcgctggtcgctatctttaaatccttcttcggtcactacctgggcacgctggaggggctgaacggcctgatcgttaagttcggctacaagggcgacaggaagaacgtctccgtgggcaagctgaacaccatcagcatggtcttcatcatgggctccacctggattgtggcctatgccaacccgaacattctggaccttattgaagccatgggcgcgccaattatcgcctctctgctgtgcctgctgccgatgtacgccatccgcaaagcaccggcgctggcgaaatacaaaggccggaccgagaacatcttcgtcaccgtggtcggcctgctgaccattctgaacatcgtgtacaaactgttttaa

SEQ ID NO: 119317 - DNA, 2295 bp, Enterobacter cloacae
atgaaagtaacaatcgatacgggcgtcgcgccttacagcgacgcatgggccgggtttcgcggcgaagaatggaaaaacgccgttaacgtgcgcgattttattcagcataactacaccccttatgaaggcgatgaagctttcctcgcgcaggcgacgccagcaacgacggcgctgtggcagaaggtgatggtcggaattcgccaggagaatgccacccacgctccggtggattttgacaccaacatcgccaccaccattaccgcgcacgggccgggctatattgaccaggagctggagacgatcgtcggcttgcaaaccgacaagccgctcaagcgggccctgcatccgtacggcgggatcaatatgatccgcagctcgttcgaagcctacggtcgcgagatggatccgcagtttgaatatctcttcaccgatctgcgtaaaacccacaaccagggcgtgtttgacgtttactccccggagatgatgcgctgccgaaaatccggcgtgctcaccggtctgccggacggctacgggcgtggacgcatcatcggcgactaccgccgcgtggcgctatacggcatcagctatctggtgcgcgagcgggaacttcagttcgccgatcttcaggggaaactggagcgcggagacgatctggagtccacgatccgcctgcgcgaggagctggcggagcacaaacgtgcgttgctccagatccagcagatggcggcgaactatggctttgatatttcacgtccggcgatgaatgcgcaggaagcggtgcagtgggtctactttgcctaccttgccgcagtgaaatcccaaaacggcggggcgatgtcgctggggcgcacggcctcgttcctcgatatctacattgaacgcgacatgcaggcaggaaggctgaacgaggtgcaggcccaggagctgatcgaccacttcatcatgaagatccgcatggtgcgcttcctgcgcacgccggagttcgacacgctcttctccggcgatccgatctgggccacggaagtgatcggcggcatggggctggacgggcgcacgctggtgaccaaaaacagcttccgctatctgcataccctgcacaccatggggcctgcgccggagccaaacctgacgatcctctggtccgaacagctgccgatcgctttcaagaaatacgccgcgcaggtctcgatcgtcacctcctcgctgcaatacgagaacgacgatctgatgcgtgccgactttaacagcgacgactacgccattgcctgctgcgtcagtccgatggtgatcggcaagcagatgcagttcttcggcgcacgcgccaacctggcgaaaacgctgctgtacgcgattaacggcggggtggatgagaagctgaagatccaggtggggccgaaaaccgagccgctgctggatgatgtactggattacgacaccgtaatggcgagcctcgatcacttcatggactggctggcagtgcagtacatcagtgcgctgaatctcattcactacatgcatgataaatacagctacgaagcctcgctgatggcgctgcacgaccgggacgtttaccgcaccatggcctgtggcattgccgggctgtcggtggcggcggattccctgtcggccatcaagtacgccacggtaaaaccggtgcgcgaccacaccggtctggcggtcgatttcgtcatcgaaggcgactatccgcaatacggcaacaacgacgatcgggtggacagtatcgcctgcgatctggttgagcgctttatgaagaaaatccaggcgctgccgacgtaccgcaacgccgtgccgacgcagtcgatcctgaccatcacctccaatgtggtttacgggcagaagaccggcaacacgccggacggacgtcgcggcggtacaccgtttgcgcctggcgccaacccgatgcacgggcgcgacagaaaaggggcggtggcgtcgttgacctcggtcgccaagctgccgttcacctatgccaaagacgggatctcctacaccttctccatcgtgccgcaggcactgggcaaggacgagctggtgcgcaaaaccaaccttgtcgggctgctggacgggtacttccaccacgaagcgaccatcgagggcgggcagcacctgaacgtcaacgtgatgaaccgggagatgctgctggatgccatcgcccatccggagaactatccgaacctgacgatccgcgtttcaggctatgcggtgcggtttaacgctctgacccgcgagcagcagcaggacgtgatttcgaggacgtttacgcaggcgatctaa

SEQ ID NO: 119318 - DNA, 420 bp, Enterobacter cloacae
atggatggtacgccgagaaaatgtaccttgccccgcgcgacgtcctattacaaccttaagcatttcttccacggtgagcctgaatctttcagaaactggaagcgtgcacgcaaagataaaaactggtcatggtttaaatggaactggctaaaaatcaataataaggttgtgaaagatggcggctggcatttctcctgggtaatgaccccagaaagaatttccgaaaaaatgtctaccatttctcataccgaatacgatctgccggaatttaataacccggaacatattatgaaggttatcaccaacgccgaagatatctggggacgagaccgaaaactggtcaggcaagaggtatcaaaacgcaccctgccttcttatctggtagacaatcagcaccattattcgcaatttattttatga

SEQ ID NO: 119319 - DNA, 1020 bp, Enterobacter cloacae
atgaaaagcgtagtgatccaacagccgaatgcgctggtgattgaggagcgtcctctcccgttgccgggcgcaggcgacgtccgcgtcagaattaaactcgccggtatctgcggttcagacagccatatctatcgcgggcataacccgtttgcgaaatacccgcgggtaatcggtcacgagttctttggcgaaatagacgcggttggcgaaggcgtggagagcacccgactgggccagcgcgtgtctgttgatccggtgatcagctgcgggcactgctacccgtgttccgtcggaaaaccgaacgtttgtacctcgctggtggtgctgggcgtccaccgtgacggcggcttcagcgaatacgccgtcgtgccggcgaaaaatgcctggcacattccggatgcgatccctgacaaacacgcggtgatggttgaacccttcaccattgccgccaacgtgacggggcaggcgaaacccaccgaacaggacgtggcgctgatctacggcgcaggcccgatggggctggtcaccgtgcaggcgctgaagggcgtttacaaggtgaagcaggtcatcgtggtggatcgcattgatgagcggctggggatggcgcaacgcagcggcgcagactgggtcttcaacaacagcgagcattcgttacaggccgcgctggatgaaaaaggcatcaagccgacgttaatcatcgatgctgcctgtcatccatccattttgcaggaagcgattacgctggcgtctccggcggcgcgcatcgtgctgatgggcttctccagcgacccgagccagatcgtgcaacaggggatcaccggcaaagagctgtcgatcttctcttcgcgcctgaatgccaacaaatttccggtggtcattgactggctggaaaaagggctgatcgaccctgaaaaactggtcacccatacatttgactatcaccacgttacagacgccatcgaactgtttgaaaaagaccagcggcagtgctgcaaagtcttgctcacgttcgaccaataa

SEQ ID NO: 119320 - DNA, 432 bp, Enterobacter cloacae
atgtataagaaaattttgatgcctgttgacgtgtttgaaatggatctaagcgataaagcggtacgccacgcggtcaacctcgcgaaatcggaaggcgcaacgatcaccctggtcaatattctccctaacagcagccgttcgttactgcgggggttcaatgccgatattaagaagttcgaagagtatatgaccgccgagtcggataagaagatgaaggcactgaaacggctctttgatatgtccccagaaaatattgattgtgaagtacgtttcggcaacgtacgcgatgaaatcatccagctcagcaaagaggggaaatatgacgttattgttattggatcaagaaacccgagcatgacaacacatctgctgggctcgaatgctgaaactatcctgcgctacgccactattccggtgttagtggtccgctaa

SEQ ID NO: 119321 - DNA, 219 bp, Enterobacter cloacae
atgtcatcaaaaatgataggtcttgttaagtggtttaacgatgataagggctttggcttcatctccccactcgatggaagtaaagatatccttgttcactcttcttctctacagggagagacattcaaaactctttttgaaggccaaaaagttaaatttgctgtcattgccggtaccaaaggtccgacagctgcaaatgttacgctttgcgataaataa

SEQ ID NO: 119322 - DNA, 690 bp, Enterobacter cloacae
atgtgtggacgctttgcacaagcccaaacccgtgaagaatacctggcctaccttgccgacgaaggcgatcgcgacatcgcgtatgacccggcccccattggccggtacaacgtcgcgcccggtaccaaagtcctgctgctgagcgaacgcgacgaactactgcacctcgatccggtgttctggggctacgcacctggatggtgggacaaagcaccactgattaacgcacgtgtagaaaccgcggccaccagcagaatgtttaaacctctgtggcaacatggccgggcgatttgttttgccgatggatggttcgaatggaagaagtcaggtgacaaaaaacaaccctacttcatccaccgggccgacggtcagccaatctttatggcggcgatcggaagcacaccgtttgagcgcggcgatgaagccgagggatttctgattgtgacgtctgcggctgataaaggcctcgtcgacattcatgaccgcaggccactggttttgtcaccagaagcggcacgcgagtggatgcgccagcatgttggcgggaaagaagctgaagagatagcttcagatggtgcagtgcccgccgataagttcgtctggcatgcggtaacgcgtacagtaggaaatgtaaaaaaccaggggaggaatttgatagagcaaatagaaatcaaatctgatcttagttag

SEQ ID NO: 119323 - DNA, 240 bp, Enterobacter cloacae
atgtttgttgaactggtttatgacaagcgaaacgtacaggggctggagggagccagggagataattctggctgaactgacaaaacgtgtgcaccggatttttcctgatgccagcgtgacggttaagccaatgcaggcgaatggcctgaatagcgatgccagcaaaagcgaccgggaaaagctgaaccgtatgcttgaggaaatgtttgaagagtcggacatgtggctgacgcaagagtaa

SEQ ID NO: 119324 - DNA, 420 bp, Enterobacter cloacae
atggaatttatcagacctacagaactgcgtgagattatcgcgcttccacttttcagtgatttagttcagtgcggattcccaagcccggctgccgattatgtggagcagcgcattgatcttaatgaacttctggttgcccaccccagctcgacgtatttcgttaaagccgcgggtgattcaatgattgaagggggaataagcgacggcgatttactggtggtcgatagttcccgaacggctgagcacggcgatatcgtcatcgccgcggtggaaggggaattcaccgttaagcgcctgcaactgcggcctaatgttcaactcaatccgatgaacagcgcttattcaccgattatcgttggcagtgaagacacgctggacatttttggtgtggtcacttttattgttaaatcggccagctga

SEQ ID NO: 119325 - DNA, 1191 bp, Enterobacter cloacae
gtggttgtcctctcaaataacgacggttgcgtgatagcgcgcagcgcagaggccaaagccgctggcgttaccatgggggcgccatactttaagcagaaagacctgttccggcgcgccggcgtggtttgcttcagcagtaactacgaactttacgctgacatgtccagccgggtaatgaccacgctggaagaaataagccctcgcgtcgaaatatattccattgatgaggccttttgtgatctcaccggggttcgtaattgccgggacctgactgattttggcaaggagatccgcgaaacggttttgaagcgtacgcacctgagggtcggcgttggcatagcccagacgaagacgctggcgaagctggcaaatcacgcggcgaagaaatggcagcagcagacgggtggggtggttgatttatccaatatcgaccgccagcgccggttgttggctatcgtgcctgtagaggacgtatggggcgtgggcaggcgcatcagcaagaagctcaatgcgatgggtatcaaaacggcgctggatctctcagagcagagcacgtggattatccgcaagcacttcaatgtagtgctggagcgaacggtccgggagctgcgcggcgagccgtgcctcgatctggaagagtttgcaccgacaaagcaggagatcgtctgtagtcggtcattcggtgagcgcgtgacagaatacgagcaggtgcgccaggctatatgcagctatgcggcccgtggcgctgagaagttacgtggcgagcaccagtattgccgctttatctcggcgttcgtaaagacctctccgttcgctctgaacgaaccctattacggcaacagtgcctcaatgacgcttctcacacccactcaggactcccgcgacattatcaacgccgcggtaaagtgcctcgacaaaatctggaaggagggtcaccgctaccagaaagccggcattatgctcggggacttcttcagccagggcgttgcccagctcaatttgtttgacaacagcgcgccgcgtgccggaagtgaaaagctgatggaagtgctggatcgtctgaacgcgaaagatggaaagggtacgctttattttgccgggcagggcatacagcagcaatggcagatgaagcgtgaaatgctttcgccgcggtatacgacccggtattcagatttactgagaattcgatga

SEQ ID NO: 119326 - DNA, 762 bp, Enterobacter cloacae
atgaaaccattatcgcttttattattgtcgagcctgacgttagtgggttgtggcgcgaacaataccccttcaaatacgcctgttccgggtgtaaaaacctccgtcgggacgagcacgcttgaagccggtgctcagcttatccagtcccgtccgcccattgatgcaatgagtgcctaccttgacggtttccatttttatagcggggataaaaatggccagatggaagcccatcattatgtaaccgtgttgaatgaagacgtgatgcaggcggtgatctacgacggtaacaccaaagatgcccgtttaatgggcgttgagtacatcattagtgagcgtttgtttaacacactgccgccggaagaaaaaaaattgtggcacagccatcaatatgaagtgaaatccggcagcctgattgctccaggtttacctgcagtggctgacaaagcattgatgagcaaaattgtgaatacctacggcaagacctggcatacctggcacaccgaccgcgataaaaagctgccgctcggcattccggcactgatgatgggctttaccggggaagggcagttagaccctaaacttctggcggacagagatcgacgctttgacgtgagcacgcaagccatcaaagaagaacgtaaggatattgtggcgcacccagttgctaagggagcggatgcctggcaacgtggtgaagagatccagcttaagcgggttaaaggttcaggtgagcatggccagggcgacacaagccatttttga

SEQ ID NO: 119327 - DNA, 3309 bp, Enterobacter cloacae
atgaaaagggtttttatgacggctgcattaacgggtttatttgtcagtaataatccgtatgcaggagaaagctatctggtctataacccacataatattgcggtatttgaagtgcgtttctttaatgttggcgacggcccctttatgccggactggccgaatgcgtctgagtcaacctgggatcttggccagcaacaaaaagaaaaaatactcgatgctatgcgttactgggctgaggttattacccccagcccagggcaactgcctgccattatcaatgtggggacgtttaacgacgagaatgccgcaggttccagcgattcagttaccgacggcattataagtctgacgcagttgcaaggcgcattgaacggtattgataccggagagctgacctttggctcccacgcccagttcatcatgggcaaactggattttgataacgttccctatgtgcccgcgcaattgccgcgcactggaaaggccgatctggtcagcgtcgctgttcatgagctggcccatggactgggaatatccaatatggttaccgatctgcaaggaagtggcacattcacgcccgctttcgataccgtgccttttggctcctggaccagccatctgcgcgatgaccgtggcaatcctgcccgaccagggcaagtaatattgtgtaatggatgcaataacagatgggatccacaaggctttgatgtacggcttgataaaggctatttcaccggcaggcatgtggatgaagtccttgcaggcgccatgcctggcgtgccggtgaaaatgttagcagacgacggctcggtcgatgataactacatgagccatatcgagctgaaaaacagcatgatgagccatcagaactaccgcaattacaccacgtttatggaagcggaactggcgttgctgcaggatatgggatatcagattgaccggcgtaactttttcggtttttcgctatatggcaacgggcaaacgctcgttaaccgcaatggctattttcagcgtaatcagcaggcggatggctatctggctggtcaatacaataccgctaatctgggagttggcctgcatgtgtatggcagtaataaccatatctttcaacaagcggacctgttgacgtcaggggctggcggcgcgggcatccgtatagatgggcaaaataacaccctgagcatcgatcccggtgtacggatatacgccgatggcgttaatggccgtggggtgatgtttgcctacggtaaacagcacagccttattcaacgtggcgacgttcaggcactgggagccagtggcgtcggtatcagttttgattttggcaataacctcctgggtaacgaggtggactatcgcggatcctggcttcatatcgtggacggctattacgatgcgttattacccgagttgcagggagcgctggtagacaatgccgacatcagcggacgggttgccggtaaaggcgcggcgatttatatatcaccgaacgcgctggtcggtaatataaatatattaacgggtgcccggctggagggtgatatttattcggactacgcccagcgggatgactatggccaacagcggttaacgctgcttaccttcggtcggaaggccaatgcgtacgggcaagcgacggaagctgccgatgctgatttcagctttacgtaccgcggaaacattgaaggtatcaataatctggcactggacgcgcacggagggaaaacctcgcttaatggcgatttccagatttacagcatgactatcgcgccaggtgccagcctgtccggcaacgccagctatacgcttaatgaggaaggccgctttgtaaataacgggatccttgcgccgggtaattcacttgggcaaatcaatatatccggtgcttatcaacaggggaataccgggcagttgttgttggaagtcgacgggcgcggcaggcatgatactctgcgagtggacggtcacgcacaatttgacggtcaactgacgtttgcgccgcagccggactggtacgcaacaaactggcgtctgaatacgcaagatttgctaaaaacggacgcttccgacggcaatttcagtgcggtgaacagcgtgctccgttcacccacgctaacgctgcaaacaacgccacagggaaagaatggctggcagctctcaatgctgcgcgcttcaaacgcatacagccggtatgcgcaggacgctaatgcgcgtcaggtagggcaagcgctggataaaattgtggcggaagctaagtcggatatacaaccgctgtaccgtactctggatttctcagccactgatggcgggagtatcagcaatgccttgccgcaactttctgcgggcgcctacagcgccatgttcgcaagttccctgcagcgtgaacagcagatagcgcggatcgttggcgggccaaatcctgtggttatgccgaagcaactgacggaaggcgaatggcgcagctttgccataccctttggcggcggcttctggcaacagcgtcagggtgacagtgtagggtacgacgccagcagttatggcattgtattcggtgctgaaaaacaaaacgatgagaatcacaactggatttatggctttcatggtgcggtcagcggtcagtcggtgacggtgaaatcaccagaaaccgcaaccgggaaaaccactgctttcgatctgggtgttcatgctcgttacggcgctgaaaggtccgaaggaatgtatttattcggcactggccgattgggtattgaagacagctggctggacagaaacattaatgtagaaacttacggagcaagccaccatgccacctggaccggattgtcaggttctgttacggccggcggaggctatcgatgggcgctgaataataatgtgaacgccggaccggtaacgtcattgaattacaccacattacatcgtcccggcgtgaaggaaagcggcaatgacggcagccgactgatgctgggttcgcagaccttcgattctctgagatcaagtatcggggtgaatggtaactggaatgtacccctcgcttcaggggcatcgttcgcagctgagctgcagctcagctgggatcatgaactgcttgatggcaacgtagtgcaacaagcctctttcgccaactatcgaagcacagggtttagttccaggaatcaggtgactggtcgtgacactctgggtgttaaggcaggtatgagctataaaatcaacgctgatgtcgaattgggcatcggggttgaaagcgaaatgtttcgttctggctatgactcgattgcaggtaatctttcagccacctggcgtttctga

SEQ ID NO: 119328 - DNA, 966 bp, Enterobacter cloacae
atgattgttaactgtatggtctaccgttcaggccaccccgccgaaaccgtagatattgaggatatcagcgaaatcatccaggataccgatgcgtttatctggctggggctttggcagcctgaacctgcttttatgtacaaagtccaggaggagttcggtctgcacgatctggccgttgaggatgcgcttaatgcacatcagcggcctaaaatagagcgttatggcagctcggcatttatcgttgtaaaaaccgtcagtggacaggacgacaatattgagtttggcgaaacgcatttgtttgtgggccgaaacttccttattacggtgcgccatggtgcttcagtgagctatgcacctatacgcgcccgtgctgctgaggccccggacatgctttcgtacggtccggcttatcctctttactgtattctggattttattgttgacagttatgcagagctgactgcgcgcctcaacaccaaaattggtgatatagaagcgacactttttcacagtgaatttgaccgtgaagctattcaggacgtgtattccctccgccgtaatctactcgggcttcgcaacgccgctcagccagtagaagaaatctgtacagagcttatccgcattcatgaagaacttattccaaaacccctcagggcgtatttcagagatattcaggatcacgcaagccatgtagtaacggatgtaaatgacatgcgtgagctgctaagcagcgcgatgcacgttaacctggcactggtttcagtgcagcaaaacgaagtcgtgaagaaactggccggttggggggccatcctcgtgatcccgacggtagtctttagcatgtatggtatgaacttcgaacatatgccggaactgaagacgctctttggttatccggctacggtcgctgtcacgctgggagcctgtgtattactgtggcttcggctcaaacgctctcgctggctttga

SEQ ID NO: 119329 - DNA, 858 bp, Enterobacter cloacae
atgcgttcagtcataatacccgtaaatgaaggtggatttctggcagccacaatttgggaaagaagcgatgccaaagcgatagtgctccttcatccggcaacggcggttgtacaggggttttataagggattcgcagaatatctttttaacagaggattcaacgtcctcacatacgattatcgcggcaccggcctctctaaatccgggctggtccgtacttaccgcgtttcgatgtctgactggatcgaccaggacgtcggatgtataaccgcctgggctaaagcacattttccagggcttagcctgttggcggtaggacacagtgtgggcgggcatgccgttctgctttcaacagccacccacgccctgcaagctgcggtcattgtagcctcacatgccggggtgacgagcaccatcaaacgcaccactgaaaaggtgcgtgtctggtgcgtattacgtgttctggctccgattctgtgccgtattttcggttacatgcctgccaggcgcctggggctgggtgaagatttaccggcgccagtcatgcttcaatgggggcgctggagcgcaatgcctggatatttttacgatgatccacactggaatgcacgccaacgggctagtgagatcaccctacccgtgctggtaatgggatttgatgacgatccctgggctaaccgtgaagctattgcgcggctgatggagccggtgcaacaagcaaaaatagaacgctgcgagatacggcacgcagagtttggtctttcgtccattgggcatatgggattttttcgtacgcgatgtgcggagaaattatggcccgtcgtcggtcaatggctggagagtcagtgcccggattga

SEQ ID NO: 119330 - DNA, 366 bp, Enterobacter cloacae
atgttgcattctcaatcttcgcgcgtcggcactattttgctgctgttggccgcggttataggcttcgcggtggcgctatacgcctggtggacgccgcttaccggcgtcacagacaccattggcgcactgggcgtggccattgccagcgcggtgctggcgatactgatctttgtgttacgtgcggcatcggggcgcggggcgcgtgttttcctgattattgtcaccctggtggtgttggcgggtattggttttgccgccgcgctgctgcaccagtacatcataacggcagccatggtggtcggcctgattggtctgattatgctgagcagccattccgcccgttacaaccattccgtcagaacctga

SEQ ID NO: 119331 - DNA, 837 bp, Enterobacter cloacae
atggcattcgtaacaacgaaagatggtgtcagtatttattacaaagactggggtccgaaggatgcgcagccgatcgttttccatcacggctggccgctgagcgccgatgactgggataaccagatgctctttttccttgcagaaggcttccgcgtcatcgccctcgaccgtcgtggtcatggtcgttccgatcaggtgagtgaaggtcatgatatggatcattatgcctccgacgcatcagccgtggtcgaaagccttgatttgcgtaatgccgtgcacgtcggccactccaccggcggaggccaggtcgccagatacgttgcgaagtacggccagcctcaggggcgggtggccaaagcggtactggtcagcgccgttcctccgctgatggtaaaatcagacacgaaccccggcggtacgcccattgaggtgttcgacggcttccgccaggcgctggccgctaaccgcgcccagttttacctcgacgtcgccagcggtcctttctatggatttaaccgagacggagcagaggtttcgcagggaacaatccagaactggtggcgtcagggtatgatcggtagcgccaaagcccactatgatggcattaaggcattttcagaaaccgaccagacggacgatctcaaagctatcaccgttcccgtcctggtgttgcagggtgatgacgatcaggtcgtcccgtataaaaatgcctcccttcttcaggataagctgctcgcaaacagcgagcttaaaatctatccaggcttcccgcatgggatgcataccacgcatgcagataccataaatgccgatatcctgacgtttattcgctcataa

SEQ ID NO: 119332 - DNA, 2640 bp, Enterobacter cloacae
atgaagggtaaatacaaagccgcaatcgcgctattactgctgctatttcttgtgccgctgacgctgctgatgacgctcgcccagtgggtgcccacgctcgccgggatctggcttcccgttggagcacgcatcgcgtttgaaaaaagccctcggctcacgcgccacgccctgatcatccccgatctccgttatctggtagaagagtgcgaaattgcccgcgtggaaaacgtgaccctgtcacaccccagccgctggcatctggatattggcgcacttgaacttaactctgtctgcctgagcaaattaccgcaatcggcgccgtctacggtggcgccgaaaacgctggcgcagtggcaggccatcctgcccaacacctggctgaccatccaccgttttaccctttctccctggcagcagtgggaaggtgagctgcatgcctcactcacgccagcccgccaggacatcacctataaaggcgagcaggtgagcattaaggggcagttgcgcggccagacgctctccatcacccagttcgatgtgcagctgccggaccagtcgcagcccgtgaagctggtcggtgaatttaccctgccgctggtgccggacggcgtaccggtgaaagggcatacggtcgcgacctttaacgtgccacagttatcctcgctggtcgatgccgatctggactgggaggataaacagggccagctggtggttatggcgcgggacaaccccgatccgctgctcgatttaccgtggcagatcaccgctcagcagttgaccatcagcgacgggcgctggaactggtcagcctccggtatgccgatgagcggtcgcatcggcctgaaggtggataactggcagcaggggctggaaaaagccaccttcacggggcggctaaacgtgctgacccagggagatgcgggtaagggcaacgcggtactgaatatcggtcccggctcgctcagtatggaaaacagcgctatgccgctacacctgagcggggaagccaagcaaaacgatctgatcctgtatgccagactcccggcgaagctgaccggcagcctttacgatccgcagcttacgtttgaacccggcgcactattgcgctcgcgcggacgcatcattgactcgctggatatcgatgagatccgctggccgctggcgggcgtgaagctcacgcaaaagggcgtggacggccgcctgcaagccattctgcgggcgcatgaaaacgagatgggcaattttgagctgcatctggacggccaggctaacgactttttaccggacaacggtttgtggcagtggcgctactggggtaaagggaacttcacgccgatgaacgcgcgctgggatgtccggggaaccggggagtggcgcgacaacgttatcgaactgaccgatctttccacggggttcgacaaattgcagtacggcacgatgctggtcagcaagccacgcctggtgctggatcacccggtgcgctggtcgcgggacccggataaccccacctttagcggcgcgctcgcgctcaatgccgggcaaacaagcttttcaggcggaagcgtgctgccgccgtccgttttgaccttcagcgttgacgggacagacccgacggtgttccagtttaaagggaatcttcatgcggatgacatcggcccggtccaggtgaatggacgctgggacggcgaacgcctccgcggtcaggcctggtggccaaaacagtctcttacagtgttccagccgctgatcccgccagactggaaaatgaccctgcgcggcggcgaaatgtacgcgcaggtggctttctcagcggcccccgaccaggggtttgaggccggggggcacggggtgctgaaagcgggcagcgcgtggatgccggataacgaaatcaacggcgttgattttgttctgccgttccgcttaagccagggcacctggtcactgggcacgcgcggaccggtaacgttacgaattgacgaggtgaaaaacctggtcacagcccgaaatatcaccgcggatcttcagggcgattatccctggaccgaagcgaacccgctcctgctcaccaacgtgaaggtggaagcactcggcgggaaaatcaccatgcagcagttgagaatgccgcagcacgatccggctttactgcgcgtggataatatttcctccagcgaactgataagcgcggtaaatccgaagcagtttgccatgtccggcccggtgagcggcgcgctgccgttctggctggacaatgagaaatggatcattaaagatggctggctgaccaacccggggccgatgacgctgcgcatcgaccaggacacggcggatgccattgtgaaagacaacgtggttgccggggcggcgatcaactggctccgctatatggaaatttcgcagtcgtggacaaaactcaatgtggataatctgggtgtgttaaccatgcaggcggccattaaaggcaccagccgcgtcgagggcaaaagcagtttcgttaacctgaattacacccatgaagagaacatttttaccctctggcgcagcctgcgctttggggacaatctgcaaacatggtttgagcaacatgcggcgataccccttctccgcggttcgacaggcaaggaaagtgaggaacaacaatga

SEQ ID NO: 119333 - DNA, 1500 bp, Enterobacter cloacae
atgtccgagtcacacgtcgccgtcctgcctggcgtgcagcagtttttagatcgccagcacggcctgtggatcgaagggcgtcaggcggcatccgatagcgaaaagcgtctgaacgtctacaacccggcgaccggagaggtcattgcctccaccgccgatgccagcgttgatgatgtcgatcgtgcggtgatgtctggctggcgcgcctttgtcgcccgaagctgggccgggcggcttccggcagagcgggaacgcatcctgctgcggtttgcggatctggtggaacagcatggcgaagagctggcacagctcgaaaccctggagcaggggaaatcgattaacatttcccgcgccttcgaggtgggctgcaccctgaactggatgcgctacacggcagggctgaccaccaaaattgccggtaaaaccctcgatctctcgattccactgccgcagggcgcgcgttatcaggcgtggacgcgtaaagagccggttggggtcgtggcggggattgtgccatggaacttcccgctgatgattggcatgtggaaagtgatgcccgcgctggcggcaggttgctccatcgtgatcaaaccctcggaaaccacgccgctcaccctgttacgggtggcggaactggcgagcgaggcggggatcccggatggcgtattcaacgtggtgaccggcagtggcgccgtctgtggcgcggcactgacctcgcacccgcgcattgccaaagtgagctttaccggatcgacggcgacgggcaagcagattgcccgcgcggcggcggatacgctaacgggcgtgacgctggaactgggcggcaaaaacccggccatcgtgctgaaagatgccgatccggcgtgggtgattgaagggctgatgaccggcagcttcctgaatcaggggcaggtctgcgcggccagttcacgtatatatattgaagctccgctgttcgacacgctggtcagcggctttgaacaggccgtgaaatccctgagcgtcgggccgggcatgtcgccggatgcgtttatcaacccgctggtgtcgcgcgcccactgcgataaggtccaggcgtttctggatgaggcgaaggcgcacaatgcggagctgatcgccgggaaccgggggccagacggcaaaggctattacgtttcgccaacgctggtggtcaacccggataatcatctgcgactgacgcgtgaagaggtcttcgggccggtggtgaatctggtccgtgtagctgacggggaagaggcgcttcagctggcgaacgacactgaatacggcttaacggccagcgtctggacgcagaacatcagtaaagcgctggagtacaccgacaggctacaggccggaaccgtgtgggtgaacagccacacgctgatagacgccaacctgccgttcggcggcatgaagcagtctggcaccgggcgcgatttcggccccgactggctggacggctggtgtgaaaccaagtcggtgtgtgtgcggtattaa

SEQ ID NO: 119334 - DNA, 483 bp, Enterobacter cloacae
atgaaagtcaatgagatagtaagaagccttgcgctggccggttttttcatttccgccagttcagcctgggccgcagaagcccctaaggatgcaaccgcagcaactcagcaggccaacaacgcactcttcaaccagcttcctttctccgataacaccgattttaccaatgcccacaaagggtttatcgccccgctacctcaggaaattatcaaaggggagcaaggcaacaccgtctgggatccacagcagtacgcctttatcaaggaaggcgataaagcgcccgattcggttaacccgagcttatggcgtcagtcccagctgattaacatcagcggcctgtttgaagtcaccgagggcgtgtaccagatccgtaacctcgacctgtcaaacatgaccattattgaaggtaaagaaggcattaccgtggtcgacccgctggtgtcggcggagacggccaaagtcgggatggatctttactattaa

SEQ ID NO: 119335 - DNA, 2274 bp, Enterobacter cloacae
atgggaagcaattcttctttttttgcccgtagaacggcactggccatggccgttgcgctctgttgcgcctggcaatcccctgtttacgctcacggcaacgaggcgcatatggtcccgatggacaaaacgcttcaggcgtttggcgcggacgtgcagtgggatgattacgcccagatgttcaccatcgctaaagacggagcctttgtgaaggtcaaacccggcgccaacaccgccatcgttaacggcaaaccgctgacgctccaggtacccgtggtgatgaagaacaataaggcctatatcccggagacttttatcaacgatgtctttcagtccggtcttgatcagacattccaggttgaaaaacgcccccatccgttaaacgcgctgacggctgatgaaatcaaccaggccgtagccattgtgaaagcctctgcggattttaaacccaatacccgctttacccagattgcgctggcggagccagaaaaagccaaagtctgggacttcgtgcttaacggcacggcggtggatgcgccccgccaggccaatatcattatgcttaacggcaaacgcatcatcgaaagccgggtggatctgaaggacaaaaagatcctccgctgggagccgatcaaagacgcgcacggcatggtgctgctggatgacttcaataccgtgcagcagatcatcaatgaaagcccggagtttgccgccgtgctgaaaaagcgcggcattaccgatccgaagaaagtgatcaccaccccgcttaccgtcggcttttttgacggcaaggatgggctgaaacaggaagaccgcctgttgaaagtgatcagctatctcgacgtgggcgacggtaactactgggcgcacccgatcgaaaacctggttgcggtggtggatcttgagcagaagaaaatccagaacattgaggaaggcccggtcgtgccggtgccgctcaccccgcgtccttatgatggccgtgaccgcgttgaaacggtgaaaaaaccgctggagattatcgagccggaaggcaagaactacaccattaccggggatatggtgcactggcagaactgggattttcatctgagcctggactcgcgcgtcggcccgatgatctccaccgtgacctataacgacaacggcaaaaagcgacaggtgatgtatcagggatcgctcgggggcatgattgtgccgtacggcgacccggatatcggctggtactttaaggcctacctggactccggtgattacggcatgggtaccctgacctccccgctggtgcgcggcaaggatgttccgtctaacgccgtgatgctcaacgaaaccatcccggactataccggtgcgccaatggagatcccccgggcgatcgccattttcgagcgttacgccgggccggagtataagcatcaggagttaggtaaacccaacgtcagcaccgagcgccgcgagctggtggtgcgctgggtcagcaccgtgggtaactacgattatatcttcgactgggtattccacgaaaacggcaccatcggcattgatgcaggggccacgggcattgaagcggtgaaaggcgtgcagacgaaaaccatgcatgatgccaccgcgaaggatgacacccgatacggtacgctgatcgaccataatattgtcggcaccacccaccagcacatctacaacttccgtctggatatggacgtggacggcatcaacaacaagctggtggccatggatccggacgtcaaaccgaacaccgctggcggaccgcgcaccagcaccatgcaggtgaatcagtatgatattgataccgaacagcaggcggcgcaaaagtttgatccgggcaccatccgcctgctgagcaacaccagcaaagagaaccgcatgggcaacccggtctcgtatcagatcatcccttacgcggggggcacacacccggtggcgacgggcgcgaggtttgccccggacgagtggatttatcaccgcctgagctttatggataaacagctgtgggtgacgctttaccatcccgacgagatgtacccggagggaaaatacccgaaccgttccacgcatgatacgggcctcggccagtacagcaaagataacgagtcgctgaacgaccaggataacgtcatctggatgaccaccggcaccacccatgtcgcccgcgccgaggagtggccgataatgccgacggaatgggtgcacacgttactcaagccgtggaacttctttgacgagacgccaacgctcggtaagaaaaaagagcagaaataa

SEQ ID NO: 119336 - DNA, 1206 bp, Enterobacter cloacae
atgcgtaacgcatttatttgtgagggtgtgcgtaccccggtcggtcgctacggtggaggattatccagcctgcgtgccgatgacttaggggccgttccgctgcgtgcgctgctggcgcgttacccgcagctcgatctggagcgcatagatgacgtgatcttcggctgcgcaaatcaggccggagaggataaccgcaacgtggcgcgcatgtcgtcgctgctggccgggctgccgcagaccgtttccggtaccaccattaaccgcctgtgcggctccggtctggatgcccttggctttgcggcgcgcgccattaaggccggggatggcgatctgctgatcgccggtggcgtcgaatccatgtcccgtgcgccgttcgtgatgggtaaagccaccgcggcgtttcagcgtcaggcggagatattcgataccaccatcggctggcgatttgtgaatccgctcatgcatcagcaatacggaactgacagcatgccggaaacggcagagaatgtagcggaattgttaaatataagccgtgccgatcaggacgcatttgccttgcgcagccagcagcgcaccgcgctggcgcagcagaatggcgttctggcgcaggagataatcccggtacagataacggggaaaaaaggcgcggtaacggaagtgagcgtagacgagcatccgcgcgccgaaaccacccttgaacatcttgccgcgctgaaagccccgtttcgcaagaacggtgtggtgacggcggggaacgcctctggcgtcaacgacggggcggcggcgctgattatcgccagcgagccgatggcgcttgcccaggggttaaccccgcgcacccgcattgtggccatgtcgaccgcgggcgtcgagccgcgtctgatgggattaggcccggttcccgccacccgtaaggtgctggaacgtgccggactcagtatcaccgatatggacgtcattgagcttaacgaagccttcgccgcacaggcgctgggggtgctgcgtcagctgggcttgccggatgacgcggagcatgtcaacccgaacggcggagcgatcgcgctaggtcatccgctgggaatgagcggtgccagactggcgctggccgcgagcaatgaattgcaccgacgcggcgggcgctacgcgctgtgtacgatgtgcatcggtgtgggtcagggcattgccatgatccttgagcgtgtttga

SEQ ID NO: 119337 - DNA, 1173 bp, Enterobacter cloacae
atgaaactaaacgcacgacaggtcgagacggcaaaacctgccgagaaagactataagctaccagacggcaacgggcttattctgctggtcaaaaccagcggggcgaaatactggcgctatcgctatactttcgccggcaaagaaaagatgctggcgctcggtgtgtacccggctgtttcgctggcggccgctcgcgaaaagcgagacgaggccaggcggaacgttgcagcaggtgttgacccagtaaaagtcaaaagccatgttgcagctgcggcagcaaagacgatcacgtttaaagagattgctacagaatggcacgaattcaagaagccacgctggtcacctggctatgcctctgacattctcgaagcattcaacaaagatattttcccagcggtgggtaagctgccagttgctgaaatcgaaccggttcagatgttgacggcgctgcgtaaaattgagaatcgcggcgcaaccgagaaagcagccaaaacacgcaggttgtgtggtgaggtgttcagctatgcagttgcgaccgggcgcgcgaagtataaccccgtcagcgaactgaacagcgcaatgaccgggcataaaggagagtctttcccgttcctgacggctgaagaactgcccgattttctcgcggcgcttgagagttacaaggggagcccgctgccccggctggggttgcagatcatgatgctggcagggctgcgtacttacgaactgcggcattcaaaatgggaatgggtagatttcgataatcggctgtgggagatacccgccgaatttatgaagatggaccgcccgcacctggtaccgctctccgatcagcttgttgtcttgctgaaggagttgcacggtctgacaggtcgatacgtgaatatgttccccggcaggaatgacccgtcaaaggtcatgagcgagaacacaataaacaggatgatccacacgctggggtataaggggagggtagtagggcatggcttccggcatacgttcagcaccatcctgaacgataaaggattcaactctgactgggttgaactccagatcgctcacgtggacaagaacaatattcgcggggtttataaccatgccctgtatatggaagggcgtcgggaaatgatgcagtggtatgcggattatattgaccagctgcgtttgatttaa

SEQ ID NO: 119338 - DNA, 189 bp, Enterobacter cloacae
atgacaccggttatctctgacactgacctgattaacatcaaagaggttgagcgctcagttggcctgaaaaaatccagcatttatgagcgcatcagtaataacgagtttccgaagcctaagaagctcgggagccgaacctcccgctgggtacgcggcgaggtcgaagagtggaaaaaacagtttctttaa

SEQ ID NO: 119339 - DNA, 1401 bp, Enterobacter cloacae
atgacctcatctaaaatctttatcccccgtccttatcaagacctcatcatcaaccacgaaatcgacattaaccgctgcaacatctgggcgggaatgggtatgggtaaaaccgtggcaacgctcaccacgctggaagatctcttcatggcgggagcggagacacagcccgcgctggttctcgcgccgctgcgcgttgccgccagcacctggccggatgaagcggttaaatgggggcatctgcgcaatatcgaggtacagccaattgtcggtaatgccaaagcgcgcgccgcggcgctggcgaacagcaacgccagcgtgtttaccatcaactacgacaatctggtctggctggtggaagagctgggcggccgctggccgttcggcaccgttatccccgacgaaagcacccggctgaaatccttccggctgcgcggaggtggtaagcgcgcggcggcactgggcaaagtggcgcataagcacgtccggcgctggatgaatctcaccggtacaccagcgccgaacggcctggtggatttgtgggggcaggcgtggtttgtggaccaggggcagcgcctagggcgcacctacggcgagtttacctcccgctggttcaactcaatacagtttccggggcagagctggacgaagctggagccgtttgcacactcgcaagacgagatacagcgtgcactggccgacgtgactatctccctggacgccgccgactggttcgatatcaaagagcccattcataacgtgatccgcgtggacatgccgccgaagacccgccagcagtaccgcgaaatggaaaaggaaatgttcctcgaactgaacggcgaaggcatcgaagcgccaaacgccgcggcaaagacggtgaagtgtctgcaaatcgccagcggcgcggtgtacaccgacgacgccgggagctggtccgaactgcacgacgcgaagctgcaggcgctggacagtattctcaccgaagcagctggcgcgcctgtactggtggcctaccactggaaacacgaccttgagcgcctgcttaaagcgtttccccgaggtcgccacctcgaccaggatccacagacgctacgtgactggaacaccggaaaaataccggtgctgttcgcgcacccggccagcgcgggccacggcctgaacatgcaggatggcggcaacatactggtgtttttctcgcactggtgggacctggaacagtaccagcaaattatcgaacgcatcgggccaacccggcagattcaggccggacacaaccgcccggtgttcattcaccacattatctctgccggcactatggacgaaatggtgatggagcggcgcaactcaaaacgaacagtgcaggacatcctgctcgatgccatgaaaaagagaggtatagcatga

SEQ ID NO: 119340 - DNA, 534 bp, Enterobacter cloacae
atgcttactgtatattgtgagaaaatgactaatactgggttaagtgccccgataataggcctaattggtatcgcaataggtgcaattcttggattggcaacgtcatattttacccaacgttggcaacacaaaaacgcgctgcagttggagaaccaaaaaacagaggtgaaactatttactgatcacgttctagctgatttgttaaaatatattgataccgaaaccgactatatacagcgcatatacgctataggaaacggcgtatctgttagtaacaatgacttattcggaaatcatcgcttggaacttgcaaagtacaatgctttacttggtgtttttaaggatgatgttcttattggtgattttaaaaagctacttacctatcgtgatagacttcaagaatttcctttaaaaaataatatgggtgaagtggttaccgattcaacaattgttttggatgaagctatagagttagcaagtaatattaaagccaacctatttgcgcattgctcatttaataagcctaataagtaa

SEQ ID NO: 119341 - DNA, 1023 bp, Enterobacter cloacae
atgcgtggttactctgcgctgatcacgcggtcaccggcattcaaggccagccgtgccgaacagttaaaaatggccgtcgggctggagaccattctccatacccgtgcgcgtacgatgggcgacctggtggatggctctgccagaacaacggcggtcgaagcgggtatggagcgcgtcaccgatgcattcggcaagctcacgttgatggggcacttcgatgatatgaacaaatcggtaaacggcatgatcacgtccgacggcattctctccggcacgttcgctggccgccgtctggctaagctcggcattaacgataatatggccgcgcgtatccgcagcgagttcgaaaaacacggtgaggtaatcaacggctggcatatcggcaattttgaaaaatgggacgatcagcacattgctggcgttttccagtcggcggtgctcaaagatgttaacaataccgttatcactccggggatcggtgatacaccgctgtgggccagtacaccgctgggtaaaactatcttccagtttaaatcattcgctaccgcatcctacaaccgagccacgctgggtggcctgcaggagggaaccggtcagttttattatggtaccgcttttcagattgggcttggcgcgctgacgtacgcgcttaaacagtccgcaaatggtaaagaggttgactggtctccgcagaaactggtcattgaggggatcgaccgttcaggtattcttggcccgttaatggaatataacaacatggcagagaaagcctctggtggtatggtggggctgggcgcattgctcggtactggaacacagtcacgttatgccagccgcggctttattggttccgcgcttggcccaacgttcggcctgctcgataccatcactgatgttactgctggcgtgcttaatggcgatgccggtgatcgggtgctgcacaacgtacgtacgctgctgcctggtaataaccttttctggatcgcaccgttgataaatcaggttgaccctggcatgcggtaa

SEQ ID NO: 119342 - DNA, 342 bp, Enterobacter cloacae
atgcatcaggattacaaaacacgccttaccgcgctcagcgataaacttaccgatgtggtgctcgaagaagccgatccggataactggccgggggcgggcaagaaaccgagcgagctgaccaaagacgaacgcggcgaccgctactgggataagaaaaacgcagctgcgtcgttgacactgctgattaaggtccactcccttatcggcatgcagacgcggggagggacaccctctgataaccctggtcaggatgatgaagcttttgcgctgggccagcaggtttcaaaagctgagcgagaggcggccgagattattgagcgcctgcagaaagggaaaaaatga

SEQ ID NO: 119343 - DNA, 1611 bp, Enterobacter cloacae
atgatttcgttcctcgccttctttttaatgtgggcggagcgaatgaactgggacgttccggactgccactatcaggcctgccactggctggagcatcgcggaaacctcgcggtgcttcgctgtttccgtggtttcggtaaatcaacgatccttgcggtgtataatgcctggcggtattactgcgaccgtcagtaccgtattctgcatcagtctgaatctgacggcaccgcgtataaaaccagccgcgatacacagaacgttctgcgtaaccatccgcttaccaaaggcatgctgccggacggtcaggggacggttgaacagtggtgggtcaatggcgcgctggatttacgtaacggcagtatgtatgccaaagggatcctgtctaacgttacctccgcccgtgccaacgaatgccagaacgatgatgtagaggtaccccgtaatatccagacgcctgaggcgcgcgaaaaactgcgctatcgcctgggcgaacagactcacatccttatcccggggggccgcaaactctatatcggtacgccccatacgcatgacagcctttatgacgaggtggagtctatgggtgctgactgcctgaccatccggctatttgagaaagaaaaacgtgttgaggcgaaagacgccaccctgctgcattacgacttatctttccggccagaatatgttttcgcctggatccataaaagcgcccgcctgctggtggaagatgtcgactacaaaattacgtcaagcggtgttgagtttgccaccgcgcccgataccgttatcgacttctatgcggattgcgcctggcctgagcgattcactcgcgaggaaatggagaatcgacgtaaagaaacgcgcacggttaacgagtgggatagccagtatcagctgcacagtaaacccgttggcgacgttcgcctcgatcctgaccgtatccgtgagtacaacatccatccgcagatccgctatgcgaaccgtacggcctcgctctggctgggtaacgtgcaaatcgttggcgctgtcgcctggtgggacgtggccaccggcaaagttaaggccgatgcttcggcgttctctctgatgcttaccgatgcgcgtggacacctgtactggcacatttgccaggaacttaccggagagctggcggaattcgatgacaacgacaaaataacaggcgggcaggtggcgcagattaaagagctggtactcaagtatcagatcccggtggtatgtgtcgaagtcaacggtccgggcagcttcgcgggtaaattgctgcgtcaggcgcttaaaggtaccggctgtggcgttcgggaagaattcagcattaccaacaaacagaaacgtattctcgatgcgtttgaagcgccgctgtcgtcgcggttcctgtgggcgcataccgatgtactggacggccctgcctatgaccagatgcgtgattttaatccggctctgaccaaccagccggatgactttatcgattctggtgccggcgcaatcagtcagacaccagtacgtatcgggaaagtggtcgggattccgaccgggcatgcgcgcgaagattggcagttaagtgacggagatcatctggtcgacgtcgattactaa

SEQ ID NO: 119344 - DNA, 2406 bp, Enterobacter cloacae
atgtcggtacccaaccagactccctatactatttacaacgccaacggtctgacgacccttttccccttcgagttctatatcatcaatgccggtgatattcaggtatcaatcaacggtactgtcgttaccagcggatattccgtatcaggtgtcggtaacgtcggcgggggtgacgtggttttcgttactccacctgcaagcggtgcagtggtcatgctggaacgtgttgttcctacctaccggttaacggattaccaggacaacggcgatctgttggccgacacagtgaataaggatttcgaccgcctctggatggcaatacagcgtgcctttatttatctcgggctagcgctgcgacgtccgctatttggtggtccgttcaacgcagaaggttataggatcgcgaatctcggtgacccgataaatgtgcaggatgcagcgaccaggaactatgtcgataatgtcagcctggtgcgtacgctgcgtgttcctgagtcttcagtctccattctgccgcctgctgatcagcgcgcaaacaagcttctggcgtttaacgctgcagggcaaccaatcgtcgttctgccagcttctggttcggcgtccgatgtaatgatagaacttgctaaacccgatggcgaaaagtacatcggcgaatgtccagacattgcaacgctacggacaatcgagccatctttcgacaagcagcgcatcaccgtacgggagcacaccgttggactgggaaaaacgggtggcggggtattctggtatgacgccacggatacgacgtcaacagataataatggacattatattgtcactactgccggagcgcgatggaagcgaaaagaagttgatgtgaaaccagaacacttcggttataacaccacttatacaggtgatcagaccagccttcttcaggcagcaatttattttgcagtagaaaaaaatcgtaagtttatcggttcaacaaggaatacaatttacattacatctactatttacataccaccattcttgaccgcagattggcgcggtatgaaaataaagacggtgacaaactctatcactgctgtgcgtctcagtagtggaagtgcgaccattccggcaccaccatataaacctgggacgcctcttgatcagctcgagatagaggggagatataaaacaggaacaacagcagttcctgatgagactttcacaacaaatggattggtgatcggtgaatcaacatcatcgcaaacatcagatctgaacattgtcaatctgatagttcgtggtttccagtcttgcataacggtaactggccctaatagttatcttctgaaatttgataatttgcattgtggtgttgcctggtttagaggttttgcatggacagcatcttctaactcaggtgagaatatacaattctttggtggttcaatttataactgcataaacactgctggaacagcacaagggttatatattgcaccaaccgcaagctcggttgagcttacatttaacggaacaagctttgattataacgacgtagatgtttctcaaaacctagggaacataacacttaatgattgtcatatggagaataataacaataatcccaagataactatagcaaatacagcatcaaaagagccttccaagttaaaaattaagggaggtagcatgggtggcggaccaggggcaaacagtcttaatccaactgtggaaagtgcgacaggaaggccttgttatattgatattacatcagcaggaacaagtgtggttattaacggattgcaagttgggagttattacaccactggcaacgttacgcaggttgtcagaaacagtggttcattaactatgcgtaagcttgaaatcggtattttacagaatgtcggacctgcaactacggaagggtggcctctaaacccttcattctttcagaatctactcacattattgggatttgggtcaatcaatggctggacacttaattctgccaacggcgttacactgacagcagtgacctcagtatcggcttcacatgacagtggtgctagacagcttgaaaggtcatcgtcaggtacggcaacaggtatgtctttttatcaggatgtgcgtgtcagacctggcaagacaatgatagtgaaagcatggttgcaaacccttgagatcatagctaacggcggtactgccactattcagacaactttcctgaatgaagacaaatcagtcactgtgcaatcagcagcgttagctcaacgagctgtaagcgctgatggcacccttactgaatgtgcaacagtgattccggttccggcaggggctgcatggatgcgcgttgcaatttacggtaccaacataccaacagggacaacatccagaatttatagctctggcgaacgcgttttggagatttag

SEQ ID NO: 119345 - DNA, 1473 bp, Enterobacter cloacae
atgattagttttcacaagaaggaattgtcgtcatttaacgccttcatgctttctcttgtcataattatattgggttattacccgcttattactgacagaatttatcttgttgatgatataaccagatctatcaaaggttactttggatggattgggttaggaagaccgctaacagaatggcttgctattgttttaagcacaagctctgtgaggctagcggatatatcgccattacctcagttattaagcatgcttgcactaagcactttggtaattattttgctaaagagcacattcaaagatattactgtaggtaatgttttaatatgtatcacaattgctgttaatccgcttacatttgggaatatgctttttaggtttgactcactgtctatggttctttctattttgttgcccgtgatggcatgggactcgctgaataaaaatagagtagttttcccatgcttactgcttattgcctgtctttcattttatcaacctgcaattgcaatattcccattattggtaataacaaactttcttcagtcaggtaaatacagcgagaaaacaataagttatattttaaaggctgtattatcaactttcattgcatgcatagtctattatctcgcagtggttaagttaacaataaatggatccgaacatagagccgatcttacttcaaactttgcccatgctattttatctgggttgagaaactcacttgagacagcatcacaatcatatggttatatttcgtgtgcaatcatttctattgccgccattatttttgctgtaacttatgtaaaaatatttattaaaatattaaagggggaagccaatagaacaaaatacataaacatattgataatgatggcaattccttttgtcattctcctttgtgctattggggtaaatttaattcttagcaatgggtattatcctgttagggttctgtttccggtaacatttattatatttatgatgctagcggttccggccaatagcagcaaaaaaataaataatatagcatcgattttatcaatatgtgttatattctcatctttttcagttatatatgcgacaacatctgcactttaccatcagcagagatatgattcatacatattgttctcactgacagataaattatcagcaataaataaaggaaaggatatctacatatttggtgccacagaagactctgaagcctctaaaacatcagcgcgagtattccctatacttaaacacataaaaaacaattattacgacatgactttaagccagtcattaattaataacggggtgagaaatattaatttttctggagaggcaaggaaattttcgcaagctctacagaaaaaggcttgtgatggcagcatggataaaatattttccacatatcaatattctatttttgagaatgaaaacaacctgcttatttcattaggtcaagacaactgtaaaaaatag

SEQ ID NO: 119346 - DNA, 924 bp, Enterobacter cloacae
atgaaaatttctcttgtcgttccggtgtttaatgaagaggaagcaattccaatcttttataaaaccgtgcgggagtttgaagggcttcagcagcatgaagttgaaatagtcttcattaacgacggcagtaaagatgcgacagaatcaatcataaatgcgctcgctgtggccgacccgcttgtcattcctctttcctttacccgcaatttcggtaaagaacctgcgctgtttgcaggcctggaccatgcaagcggtgaagctattatcccgatagatgttgatttgcaggacccaattgaggttatcccgcacctgatagagaaatggcaggccggcgcggatatggttcttgctaagagaacagaccgctctacggatggacgactcaaacgcaagaccgcagagtggttctataagctgcacaacaaaatcagcaatccgcagatcgaggaaaacgttggcgacttccgcctgatgtctcgagatgtggttgaaaacatcaagctaatgccagaacgcaacctgtttatgaagggtgtactgagctgggttggtggccgtacagatgtggttgaatatgctcgcgcagaacgcgtggcaggcagcacaaaattcaatggatggaagctatggaatctggcactggaagggataaccagcttttcaacatttccgctgcgcatgtggacttacatcggcctgttcgtggccggactatcttttctttatggcgcatggatgataattgatacgctggctttcggtaacccggtgcgtggatatccgtcaatgctggtttcgatattgtttcttggcggtgttcaactgatagggatcggagttttaggggaatatatcggaagaatttacgttgaggttaaaaaccgtcctcgttatattttgaaagggaaaaataatgattag

SEQ ID NO: 119347 - DNA, 363 bp, Enterobacter cloacae
atgttaaagatattcagtagatacgtttccgttggcgtgctcaacacagccatacactggctgtgctttggcgctctgcttcacttctttggggtcagccaggcgattgctaacgttctggcattctgcattgctgtgacgtttagtttttttgcgaatgcgaaatggacgttcaaatcacaggccacttccggacgctatctcgcgttcgtattattcatggggatcatggcaggcttgacgggttacttcgctgatactgtgggcgcccctcccgtggttaccctaatagcattttccggctttagcctggttgccgggttcatctactcaaaattcattgtctttagggatgcgaaatga

SEQ ID NO: 119348 - DNA, 225 bp, Enterobacter cloacae
atgaataacgtttcagacgtggcggcgggactttcctacggcacttctattggcagctttggctactggcttttgcaactgctcgataaagtcagtcccagccagtgggctgcaattggcgttctcgccagtattctctttggtctgctgacttatctgacaaacctttatttcaaaattaaagacgatcgtcgcaaagaggctcgggacaatggctaccagtaa

SEQ ID NO: 119349 - DNA, 540 bp, Enterobacter cloacae
atggctaccagtaaggctaagctcagcgccgctgttctggggctggtgcttgctggcgcatccgcaccaacaattctcgatcagttcctgaatgagaaagagggaaacagcctcacagcctataaagatggctccgggatctggacaatctgccgtggcgccacgcaggtagatgggaaacctgtggtgcaggatatacaactgacacaggccaaatgtgaccaggtaaatgccatagagcgcgataaagcgcttgcatgggttgaccggaatatactggtgccactgactgagccacagaaagcaggtattgcatcattctgcccgtataacatcggccccggaaaatgcttcccatcgacgttctatcagcgaatcaatgccggtgatcgtaaaggcgcatgtgaagcgattcgctggtgggttagagacggtggtcgcgactgccgcctgactaaaggccagaagaatggttgctatggtcaggttgtacgccgggatcaggaaagcgcactgacgtgctgggggatagatcagtga

SEQ ID NO: 119350 - DNA, 489 bp, Enterobacter cloacae
atgaataaaaaatataaattattaacaattactttatttgtgtttttctcaggcatccttgtcactatcagtaacatgactaaaagtggcaatgttaactgctctggaaccttacaaatgaattcaccgggcgatcaagagtttctctttaatggaaccatcagtgtggtgatacgaccgggtactgaaagtattatcagtatctttggtacttcggtatcagcaagacagccttcccccatcaatacgcatctcgttaatcgggatataacattcacggtcctgagcagaaacaaaagcgatttttacctgagtgatatgaagacaacagctcaccccggggacagcatgaccgagacagaggcctctgggctgcttttcgatatgtttgatctggaaaacaacaggcttaccgttcgaagatatctcaatacctttgtttttggcgatgttcctcttcctttatttatttgtgtgaaaaaaagataa

SEQ ID NO: 119351 - DNA, 858 bp, Enterobacter cloacae
atgctctatattttcaatgagaatattgtttatgatgacgctcagtgttctttaactaactgtaagagttatgactcgatccttcttccagcaacggcctcaaggttgctgtctttgtttatcagatatcaggggtcaactttaacccgtgaagaaatcctcaattgcgtatgggatgagtacggttataaagcgtccaacaatacacttacacaatatgtatcgttgattagaaaaaattttcagttacttggtgaaacagccgatatcatcatcactattccacgtaccggttttgtgatgaacaaagatgtagaagtgaaaatgatcgaacccggagcagaaaaacaagacctgttgcttccggatacccgttcattcagtgatgattttctagctgacacggtcgaacaggggatgtctcttacagagactaatacagatacaggcactgaagaggacagtacgacttccattacaaaaaacagtaaaagattagtatggtttcatggccttaatgcattgtcattaatcatgttcttacttatttgttatcatattcagcttaaaactaatgagatgaaagtatccagggtataccaggtcggtacgattgacagctgccctgtatatatgtttttcagaagtgcgcatgaactgcttcccgtgagactcaccttaactgaaaatatagccagagaatcaataccctgcctcccaggaagtttttatatctctcagcaggaagacagcctgatttttggtgagacaggccgtttattcattagcagatgcagttatcaggctggcaacaagaaaaagttatccagttgcaagagcgtatatagccatgaataa

SEQ ID NO: 119352 - DNA, 780 bp, Enterobacter cloacae
atgctgataatgaatgatacacttgaaaagaaatgttcttacaattgtgaaatggatgttacgcctttccttcagcctgttattaatacttatgataactgtatcgtgggagcagaaatcctctgtagagtaaaaacaaaaaaaggatacatacttaatcagctgcatatcgaagaacttgaggtgcctgagcgtgcagatttttatgcaagagagcttttactgaaaacggcagaactgttaaggaaaaatgacggcgcaggcgaaatcccatcgggctttgttttttctctgaatatcacctgtggtcagataagttctcaaactatcagaaatgcggtggtgaggtttaagagttatttcaaaacagacgtggtgatcctgcttgagatagtggaaagaaatattactgatgcgaccagtgatattctgaatgcaatcacattctataattctatcggagtgaagttcgctattgatgatgctgggataaacactgctgcaatgaaattttttggcgtaagtaatgtttcaattctaaaactggatcgctcggttacgcagataaaagagaactttgaactaatttaccggaagttaattgatggcatcgtaaaagtatcctctctgtgcggggtgcatattgttgcggaaggagtggaaaatcaacatcaaaaagaagctctggaaaaggctggcatcatacatatgcaagggtattttttttcacgacctttatccgtagctgctttttgtgattttataaaacactaccgctga

SEQ ID NO: 119353 - DNA, 588 bp, Enterobacter cloacae
atgacagtaaaaaaaacagtttttatcatctccgatgattatttttaccttaatgggttggggtttttattaaagaatgaaaataatctgaatgtttttcgtcattatgtagatcaaaaccagcaggaatgtttttctgatggtattccttatgatgtccataatgaaaaaagcatcattatactggcagtggatgacttgaatctcatcagaaatttcgctgcacgttttagaactaatattatcttttctctgagaacccttggtaaaagagaaatggcggtttgttataaaggcgccctggtaatcaacagatgcctttcatcaacgcggatgttagatgtaattaagaagtacgagagggtaagttttatgcctggcatatctcttactcaaaaagaggaacaggtgattttcaactattttaacttaaccggtgcccagtttagttcctttaagtataaaactggggttaagaaaattagtcattataaacgttctgcttatcagaaaatgttggttaatggtgatggggaagctcattttgtagtgaaagcattaagtgaaattagaacagggatgctataa

SEQ ID NO: 119354 - DNA, 549 bp, Enterobacter cloacae
atgaaaaaaagtgctattgcgttaacgctgtttgctgttctgggtgcaactgtaaattctgcgaatgctgcatcgacaggaaccattacctttaatggtcaactgactgccactacctgtgatgccgtcgttgatacacagggtgcagatgcaacggttattctgcctaccgttggtaccaaccagttgactactgcaggccagaccgcggggcgtacgggatttaatattgccctgactaattgccagggcactctgcaaaacgcctccgcgttctttgaagcaggtccgaccgtggatttagccagcggacatctgctgaataagaccggaacggcaaccggcgtcagcctgcagctgcgtgatgagtcctctgctactggaggtgtcattgtggcgggtaacggcaatcaggctgccaacacaacttatgttgatgtttcatccggcagtgcaaatctgccttattcagttgagtattttgctgatgctgcaaccactgccgggacagttatcagccaggtggtttactccattcagtacatgtaa

SEQ ID NO: 119355 - DNA, 711 bp, Enterobacter cloacae
atgcctatgcagcggaagcatacctttttttttattcagacactatgcatactttttctggtgctgcttagcgcgcccgtgaaagccagtattgttattaccggtacccgggtgatttactctcagggcgagcgctctgtcagtgtgaaacttaataataatggtaaatcccccgtacttatccagagctgggttgatgatggagttatgagtaaatctccggataccagcactgccccctttattgtgacgcccccgataaaccgtgttgatcccggcaaaggtcagacactacagatcagttttaccggaaaacacctgccttcagataaagagtcagtattctggcttaacgtgcttgaagtgccagcacgtaacagtgcaaagaaagatgataattttttacaaatcgcttttcgtacccggataaaacttttttatcggccgcaggcgcttcaggggaaatccattgaagctccggataagctcgaatggaaaaccgtagacgggaaattacaggccatcaataaaacgccctggaatgtatctatttctggcgtaaaagcgaatggaaaaaagaccgaagggaaaatgatagcaccttttgatgctgagtcgtttccgttgcaggtaaggcatggacaaacgattcactttgacgccgtcaatgattatggcgcagtcactgcgaaatctgctgctgttcaataa

SEQ ID NO: 119356 - DNA, 1398 bp, Enterobacter cloacae
gtgaaaaaccataataaatatttccgcaagagctttcttgcagcagctgttgcgggtttttgcagtatatcgcattcaactgaagcaatggaacacacaggagcgcagcctgagaatcctctgtcagaagtgatacctgaccccgggaccggggacgttgaatttatcagtgatgtactgatgttacaaaacaatcaacccgtcgatatcagccgcttttcaaagcgcggttttcttttacccgggaaatattatgcctctattcgggtaaatgggagtgaagtagggaatgaaaatatcgagattaaaacccgggcggataactctggttatgtctgtataacgcctgaattactgaaagcgatccctctggcctgggaaagaatcaatgagaccgacacagtgcgactgccaaattctgatggctgcaccgagatcttatctcgcatccccaatgccagggtcgagttcgatgccggagagcaggtactggatattacgttgccgcaaaaatatgtccatcgttctgcgcgtggtttcgtgaacccggagctctgggatagcggtatacctgctgcatttctcagctatggccttaacgcctggacaagtcagtccagtcattacgattataaatcgttgtttgcctcgctgaataccggtttcaatctcggagcatggtatttccgtcataatggctcttattcctggtcagatgacgggaaaaaggattatcagtctctgaactcgtatgcgcagcgggatattccgttcattaaaggccgcttacttgtcggccagtctaatactacaggcagggtttttgactcactgcccttttccggtatgcaaattgccagtgatgagcgcatgtatccggcttcgctgcggggttatgcacctgaaatcagggggatggccagaacgaatgcgaaagtcattgtacgccagaacagcgccattatttacgaaactaccgtatccccgggtgaattcgtcattaacgatctttatccgacaggatttggtggtgacctgacagtgaccgtccgggaggcagatggcaatgaaaacttttttctggtcccatataccgcgatgccccagctcattagaccggggtcgtaccgcttttcctttacggcgggtaaattacgccagctcaaccttagagataaaccagagttttatgaggcaacctggcagcacggactgtcaaattacctgacgggctatactggctggcaacaaagcgacggttattatgctgctcaggcaggtatggcattaggaacgcaggccggggcgatttctctggatatcacccagtcgcacgcttctttcgcgagcaacccgaacggtcaggagtatagccataaaatgaatcgccacggataa

SEQ ID NO: 119357 - DNA, 2088 bp, Enterobacter cloacae
atgcaacaggaatctgtagacagtaaaaaagtcctccgcccagatggttcgttcatggagtggttcctcactccgaacgtacagtttggcctgctggccatactgaccgtgctgggtctgtttctcccctttaccatgctgctgagcatcctcatccttccgccgctgatggtggcattcacggatcgtaaattccggccaccgctgcgaatgccgaaagactgcgaaatgttcgacgacaccctgaccacggaaacccaggcggaataccgtctggggcccattcgcatcccgcataaggtccgggagcgaaagaaagcgaagggaattttatatgtcgggtatgagcggggacgcctgttcggccgcgagctgtggctgaacatgacggacctgctgcgccacatggtattttttggtaccaccgggtcgggtaaaaccgaaaccttctatgggtttatcgttaacttcctgctgtggtgccgtggctactgcctctcagacggtaaagcagataacaagctggccttcgccacctggtcgctggcgcgccgtttcggccgtgaggatgattattacgttctcaacctgctgaccggcagtattgacaggttcgtgaacctggtgaagcaggaaagcatccccgcgcaatccaactcagtcaacctcttcagcgttgccccgccgaccttcatcatccagttgatggaatccatgctcccccaggtgggcggggattcggcacagtggcaggatacggcaaaagccatgatgtcggcgctgatcaatgccctgtgttataagcgcgcccgcggcgaactgcttttgtcacagcgcactattcagaaaaacatgtcgctgccggcaatggctgcgctgtacgtggaggcaaagaaaaacggctggcacagcgagggttacgccgcgctggaaagttatctggaaaatacaccaggcttcctgctggccaacgcggaatacccggaaacgtgggaagcccgcgccttcgaacagcataactacatgagccgtcagttcctgaagacgctctccctgttcaatgaaacttatggccatgtttttccggaagacagcggcgatatccggatggacgatattttccacaatgaccgcattctcatcgtcatgatcccgtcgctggagctgtcacgcggtgaagcggccacgcttggccgtttatatgtgacgctgcagcgaatgaccatcagtaaggacctgggctaccagctggaagggaaaaaagaggaagtcctgctcactcacgcgctgaataatcaggcgccatacgggctgatttatgacgagctgggccagtatttcaccagcggtatggatacgctgagtgcgcagatgcgttcactggaaaaaatgggcgtattttcctcccaggatcacccgtcgctcgcccgcggcgcgaacggcgaggtggattcgctgatcgccaatacccgcgtgaaatattttgagtcgattgaagaccggaaaacctttgaaatactgcgcgaaaccgtcggccaggattattattctgagctctccgggcaggaagccgaacacggcacgttttccaaaacggtccgggaaggggatctgtaccaaatccgtgaaaaggaccgcgtgaacattcgtgagctacgtaagcagaccgaaggtcagggggtaatttctttccaggatgccctggtacgcagcgccgcgttttacattccggacaatgagaagttttccagcgaactgccgatgcggataaaccgctttatcgaggtattgccgccatcgccggcaacgctgtacagcatttatccggaacgcaaggatgatgaactggcggaaaccaacccggatgcaatgcgattcccgccgatcaagctgttcggctacgacaaagcggccaacagcctgctggaaaaaattgaggtcttctacgagctgcagtgtggcgcaatttcaccggaggaaatgtcggtgtgcctgtttgaactgttcgctgaatggcttgatggaacggaaacggacgacgtgctttaccaccaggaagacgatctgttcccgatgatcgagatgtaa

SEQ ID NO: 119358 - DNA, 951 bp, Enterobacter cloacae
atgaaactcaccgtaaaaaccgatcgcaacacactttatctttccgctgacggaaactaccaggaacaagccctgcactccttccccctgtcagcctgtcattttggacttggccatgatgccggcagcggccacatcctgacgcacaatacgttttctggtgaagcggtgcagctgttccgctttgaaaacgaatatcaggccatcgaggcgctgaacaatatccgtaaaaagctgaaacagcagcgcggactcaatgccgtgcgccggctgtctaactttatcttctggccagtcgccgcgctgggctttatcgtctccatcaacggcgcgttgatgaatatgcatcagccggcacagccactgcaggcaaactcgtatgctcccgcgccgggtctgcagcagcctgccactgcgccggagcagctgcaggttcaggcagcacctgaagcccctaaaaaactggctgataacgacttgctgtcactgaaagatgccgtcaccagcggacgctttacaatctcgctttcaaccgggcataaacacaccctgtatgtgttttccgatccgatgtgcccgcactgccgcgcgctggaaccccgactgcaggaactgagcaaacgctataacgtcgagattttccccgtgtccgtttatggcgacctgcgctcgatggtccgcgccgctcctgtactcgataccgggaaagatacccgactgaaaagctgggaagacacgattaacatgggatacaccaccatgaacccgaaaattgacgatccgaaaacagccccggataccaccggcgcccgcctggttgacgcgaacaatatggcatttgcgaaattcgggtttatcggtaccccgtccatcgttgccgattcgggtgatgtgatcccggtttccgtcgtcaaagacgatgcccgcctgcagcaggcaataggagaataa

SEQ ID NO: 119359 - DNA, 1308 bp, Enterobacter cloacae
atgcaaaaccagccacaacggaaagggggaggggatgatggcctgatgattatcggggcccttctcatcatgatcacagtgatgtggtttggctttcgtgattatgtgatttacggagtctgtcgcctgctttactggatctacggtgtactgccggacgccattacaccgggtaatgcggccgagcgccgggacatgctgctgtcggcggcgcggtataaccaccaggtttcgctgtgggactttatcagcgtgatgaacgacacggccagcgtgctctttcccctgttcattttaatcatcgggttgttcgtctgggttatctcgcgcaatccttactaccgtctgacccgtaaactgaccatccggaaccttccctgggtgatggtaaaaaactatccggggatagctcatatcctcgcccggtttggccacctcgatcagctgctgctgaatgaagatccggaagaagcacgcagcgcgcagtcacccgttgagtttgcccaggaacataacctgattgataccgctaagcgccgcctccgtaaaaaagccgcacataaagtcttcctgtcacaggtaaacttggcccccgaaggggcggccctttccctggcgccctgggaaaaagcgctcgcagcctcgtttgtacatctgcggtttatgggcgaccggccaacggctaaatccattctcgacgatctcaaccgttcctgcctgcggactaaagacggtttccctgattattcgctggccgccgggttctggaccgtcgccagccagtgtgaagcgttccgagaatttgcaaaggggcgccgcagctcccgttcgctactctacgcgctgttcgatgatgacctgcagctgccatccgctaatttccggtggcttaaaggtgtggaccgcacgttatggtatgcactttcaagcgccggccgcgggaagttcttcattgagggaggtggtgttattgcctggagtcagtgcgaaagttaccggctgacgctcgatgaagaaaaggcggcgaaattcccgccgaccgtgcgggcggccgtgctgggccttgagctggatctgctccattaccgccatattgaccgccgcgatcccgccattccggtcgctcactggcaggaagacgttataccgccatttgcatttgaatctgacgctgaagcggaagacgagccggctacgccgcctgcagctccgcacgacaccccgaacaacagtctgcgactgacagacgatgaaccgacgccggctaaacctcagccggcaacccgacccgatcacctggaactctaa

SEQ ID NO: 119360 - DNA, 396 bp, Enterobacter cloacae; identical to SEQ ID NO: 95944

SEQ ID NO: 119361 - DNA, 351 bp, Enterobacter cloacae
atgaaattcaccacgaagattgctcttattctggctgcatccgtaatcagttgcagtgcctttgctcagagcgtatccgcgccgaaaaccgattctttactgagcagcattctgggtgagcaggtacagacaaaccaacatcttgtacaactgctggcaaaggatcaggatgccggtattacactgaccccggaacaaaagaaaacctcttgcctgtatgaaagtcattactacagcagtggcgcaccacttaccgtcggaaaagaaacactccgctgcacgctgagtggcgaaatcccgacatgggaaaatgtgaacgagggcaatattgtctctgtcgaaggcaaataa

SEQ ID NO: 119362 - DNA, 654 bp, Enterobacter cloacae
atgattcagtcacgtaataaatatctgcagtttatgctggttctgctggcagcctgggccatagcctggggggccatgtttgtcatggggcaggctgttctgctctatgggctggggaaaaatacgctgttcttcagtcatggtgctgtactggtgtacctgctgtgtgttttcctggtataccgccgctgggttgctccgctaccggtcgttggccagctgagcaacgttggcgcactgtggctggttggcgcgatggccgtggtgtatgtcggtgaatttctgctgggtaaagtgctggacctgcccgctgagccatttatgacgaaactttttgccgataagtccatacccgatgtgatcctgacgttgctggccgtctttatccttgccccgctgaatgaggaaatcctgttccgtggtgtcatgctgaacgtcttccgttcgaggtacaactggacgatgtggctgggcgcgctgataacgtctttgctgtttgccgccgtgcatatgcagtatcagaacctgctgaccctggcagaaatgttcctggtggggctgattacatcagctgcccggatcagaagtggcggcctgctgctgccggtattgctgcatatggaagctaccgcgctgggtttactgttgggctga

SEQ ID NO: 119363 - DNA, 258 bp, Enterobacter cloacae
atgcataccactcgactgaagaaggttggcggctcagtcatgctgaccgtcccaccggcactgctgaatgcgctgtcgctgggtacagataatgaagttggcatggtcattgataatggccggctgattgtggagccgcacagacgcccgcagtattcactggctgagctgttggcacagtgcgatccgaacgctgaaatctcggcagaagaacgtgaatggctggatgcgccggcggctggtcaggaggaaatctga

SEQ ID NO: 119364 - DNA, 333 bp, Enterobacter cloacae
atggaaagaggggaaatctggcttgtctcgcttgaccctaccgcaggtcatgagcagcagggaacgcggccggtactgattgtcacgccggctgcttttaaccgcgtgacccgcctgcctgttgttgtgcccgtgaccagcggaggtaattttgcccgcacagcaggctttgctgtgtcgcttgacggcgccggcatacgtaccaccggcgttgtgcgttgcgatcaaccccggacgatcgatatgaaagcccgcggcggcaaacgactcgaacgggtgccagagactatcatggacgacgttcttggctgtctggccaccatcctgacctga

SEQ ID NO: 119365 - DNA, 435 bp, Enterobacter cloacae
atggcgctggatctcgtttatccccggccttcagtggaaggtgacgcactccctttttttgccgagcccgttgcggccggctttcccagcccggccgcaggctatgaggccaatgaacttaacctgcatgattactgcgtgcggcgtccggccgcaacgtacttcttgcgtgtgtccggcgattctatgcgtgatgcccgcattcatgatggcgatgtgctggtcgtcgatcgggcagaagagccccggcacggcagcatcgtgattgccagcatcgataatgaatttacggtcaagcagctgcagctccgcccttacccctgcctgatgccgctgaatccggcttttccgccaatcaggtttgatccagaggcgctgcagatatggggtgtggttacgttcactgtcatgagacaccgcccgtgtacgccttaa

SEQ ID NO: 119366 - DNA, 546 bp, Enterobacter cloacae
atggggtgtggttacgttcactgtcatgagacaccgcccgtgtacgccttaatcgatgtcaattcgatgtactgcagctgcgaagaagcgttccgccctgatttacgaggtcgccctgtggtcgttctcagcaacaacgacggggcgcttgttgcggtcaatcgcgcggcgaaagcgcttggcgtgcgccgcggggagccctatttccgctgccgccgcctgctggaacagcataacgttgccgtattcaattccaactacaccctttacgcctcattctccgccagatttgcaaccgtggtggagagtctggcgccgcggacatttgtttactcaattgatgagctctttgcggatgcctctcatatggagggagtgatgacgccgcaggcgtttggccagcttttgcgggctgaagtgctgcgccagacaacgctcacctgtggagtcggcgtcgcgccaacgaagacgctggccaagctgtgcaaccatgccgcaaagacgtggcctgctaccggggggttgtggcgctcagtgatcctgtaa

SEQ ID NO: 119367 - DNA, 744 bp, Enterobacter cloacae; identical to SEQ ID NO: 25800

SEQ ID NO: 119368 - DNA, 210 bp, Enterobacter cloacae
atgaaagatgaaattcgccacgaaaaacccgttgaagtgaatatacaactgacacacagagaagcgcaggctctggcgcaactggttaagcgtctgggattcagtgactgccgcggcctggcgacgtcagatattgaggcatatctgatgatggatggaatcaaccagatcatgaaagcactggctgaagagggctatgcaccacgataa

SEQ ID NO: 119369 - DNA, 219 bp, Enterobacter cloacae
atgttcagcatcatttatcacgccggcgcagccgtccttttcctggtcatgagcctggcggccggcgccggcctcctgcttcatagccatgaatatacgacaggtcatttctggaacatgacggggctgtgcattgtgtcaactctcgtctggatctgggctgtagctcaggcaaaagaagcctggtacatttcacgaaacatcaaaaaaggactctga

SEQ ID NO: 119370 - DNA, 684 bp, Enterobacter cloacae
atgaacagacgtcttcacctcatcaccacctgtacccggcgcaaggcgggcagcgtggaggataccgtttttccgggcgacacttcccttgatgacgcctttgacggctggtacaggctgatcgcccaggctgcccgccgtcctggcagggtgctggaaacgggagagctttaccggggcgcacactggctgcgtgcccgcggtatcgcggcgcggtggccgggcatcgagctgtgggccatgtcggccggtctggggctgcgccaccataccgatccggcggtcgcgtatgaggcaacgtttcacgccatgcccttcgcgccggcgaccgtctggggctcactgacggcacggcccccgctggctggccgctgcgcctccctggctgagctgatgcaacgctgcccggacgagcgctttgtgatcgccggttcacccgtgtatatcagcgcggctgagcaggatattctggccggcgtgccggcactgcatgatgcggccactcagctgattatcgtgacctcacagggctatcgtggtccgctgcagccgtttctgaaaagaagccgcgcggacatgatggcgaccctgaaatcgaacatgacgtgcctgaatattgcctgcgccggcgccctgattgacgccatgatgcaggcagacgcccggcaggcggcgaccatttaa

SEQ ID NO: 119371 - DNA, 258 bp, Enterobacter cloacae; identical to SEQ ID NO: 25801

SEQ ID NO: 119372 - DNA, 1275 bp, Enterobacter cloacae
atgaccggtttttttgaacgtaaaaagcgggccaaaaacgcccagctgaccgtgcgtctcgatgagcagctgaagaaacgcgccgaactgcgtctggaggcaatgggcatgaccgccacggaagcagtggagcagctttaccgcttcatcgccgatcacggccggatgcccgtcacggagcgtatcgtcacatttgacatccagtcacagcgcggccgcgccatcgccctcaatcccgccgacgctgtgaccgaaaacacccggcggtttctgcagtcgctgggagctgtggaagtggtctgctgcgatcccgctgcatttgaacaggcggtactggagtacttcagcctgtatgtggccgaccaggctgcctgtttactggccggtgtactgaacgtcacgttcatggttaatgccgccagtcgcgtgaaagatgactggcatgacaggctgctgtccctgttacagcgcgactttgatttcagcgaagaacagtcagtgacgttcattaacagcatcgtggacagcgaacatgtcgatcctgccatcgtcagtcgaaataatacggcctggcggagcggaaaaagcaccgggtccggcgccggcgctgaacaggccttactggataacaccaacgtcagggtcttctatccctccggggaagcgcccgtctccggcgagatcggcgccgccgtcctgcagcgtttcctgacgttcctggcggagcggggcgtcagctgcagcgatccgcagagactgaccgaaagcgccggccgtgcatggggcgtgcgtgaaaatatgatcgggaatatgcccccggacatgcagcaggccataaacgatggcgtcatttttgaggccagcgctgacacgccggacttttcccctgagctggcggcggcgtttggcttcacacaggcccaggcagaagcggtgctgaaacccgccctgaccgccagggatctccccggtttcctgcagcgctttctggcgttcctggccgaccggggtatcagctgcagcaatccccggcggtttactgaaaaggtcacggaatacgccagccatgagggaccgcaccggcttattgcaatgttgatgtcgcgcatcagggatgagggggtcagttttgtctttcacaatgaatccccggacgaactgccgcgcctggccgcgtcactgcccggcgaactggccgataccttcgggtttacgggatggcaggcaacaacaatactgcgtcaaatccagccggcacggccggggcaggattag

SEQ ID NO: 119373 - DNA, 357 bp, Enterobacter cloacae
atggaatatgaagcgtacaaggttcgcggctacggcttcggactgaagaaagagatcaccggcgtgctgggtcgttaccccacgcaggaagaggcgcagaaggtcgcggacgactacacgcaggcctgcctgcgggataacctgccggacagttacgatatgggcatggtccggccggtcgctgccggcgaacctgctgccctcgatccggacgtgtttcgcggtccgggcgcgccgttcctgatggatgccggccagataaccacgggtcacacggtatgcctgggcaaagcagcggatggaaaacggttttattttggcggggagcattccgatggccaccaaacatataaatga

SEQ ID NO: 119374 - DNA, 579 bp, Enterobacter cloacae
atggccaccaaacatataaatgatgagctctggaatcgcattgaggcgctgaccgtcaaagcgaacaccatgcatgggctgctgcggccgattaaagaggctgaagtactgcatcttgtcctgcagcgtggcctggagctgcttacggacgacgatctgctgcagctgggcaagtaccggcggccgattggattcgtgctgcgtcggccgggcatggagatgctgaagctggatactctgagtatggctgacgccgctactatcctcatgcgcagcggaccggcaacgctgtgcatctggagtcgtgacgatatcctgcgtcaggccggtgaagatgtgatccgcgaacgactgccggatgcagccctgctgtcggagggggatgaccgggcccggttccagacgctgctgcccggattctggaacgccgcgcaccggggggaaacggccgtgatttccctgcgggctgacagtgcggattacgcgattgcgcgtataaccgatctgatgtgtgaagccctactgggttataaagggcagcgggcctggcggccagctgaagacgaacagggggaataa

SEQ ID NO: 119375 - DNA, 408 bp, Enterobacter cloacae
atggtgactcagcctatggtgcttctgggcgcggtacaccccgtagcgggttatctcttcctggaagtgatccctgacagtgaggttggcttcgttgatatatatcagctgaccgaccgtctttatgttggcgattatctggtcattaacaatccggaatggcggcggcgtgaacctgcatttgacggccggccgtgggatgaatgggtgatccgtgaacacctgtcccgcatagactggtattcgaatgacaccattctgaggttatgtcagaggcacaatctgtcatgtgctgacctgcaaaagtggggagaaaacgtggcacgctggaaggatgtaccggtgatggtagcgcgtgaagaagacgacgtgtccatcacacttctttcagggtttacagataactga

SEQ ID NO: 119376 - DNA, 546 bp, Enterobacter cloacae
atggatatcaactactacgatgaacatcaggaagaatttgaggcggttaaactggcgctgaagggcgaaatggagaggatctggggctccatgctgaaagaacgcggggacaatctggatgatgaagccacgtacctgaacctgtttgaagaattgcagtataacttctctccgtccagtttcagtaagctcaccccggcgcaggaactggataaagataaaatagcggcctttgtggccagaacccgcggctataagcacggcatcacgatcaaatgccggccgggtcgcccgcagaagtggctgaaaggccgaatcaaaccacttgaggacgcggaaggcacaaacctgtgctggatcgacacggccaccatcgtgcatatcggtgccggtcagcagtttgacgatcagtattacctcacagtgaccacacagaccgggcagagttaccgcgtgaatgaactccgtctgccaggtcgtctgctggaagcagcccaggacagcctgttcagggcactggattcaaccaccggcggttacttctga

SEQ ID NO: 119377 - DNA, 471 bp, Enterobacter cloacae; identical to SEQ ID NO: 25802

SEQ ID NO: 119378 - DNA, 249 bp, Enterobacter cloacae; identical to SEQ ID NO: 95962

SEQ ID NO: 119379 - DNA, 588 bp, Enterobacter cloacae
atgaatgagtccatccatgttgtcggctcttttatccttgcgggtatcctgctgtatggcctctggctgggtacacggcgacgccggcgccggcacgaacggaaacaggccagcgcggtacgtgtgatcgataaaattaatacgtttccgcatttcgggcagaaaattgcctatctgcgcaagattgacccgtttgtgttcgaagagctgctgcttgaaggctttgaacgccgaggctttgaagtgatccgtaaccgccggtataccggtgacggcgggattgatggccgtgtgaagattgatggccagacctggcttatccaggccaaacgctataccagctatattgccgttggccacgtccgtgacttcagcgacctgctgaacgccaccggtgcccgcggttttttctgccataccggcaaaacgcgcgaaggaaccaaatcgctcattcgcggagacagccgtatgatcctggtcagtggccagaagctgctagaccttattgccaccgatgcgccgtttatcccgtatccgggataccggccaccggccgaaatggttcaacctgaacaggagacaacatga

SEQ ID NO: 119380 - DNA, 486 bp, Enterobacter cloacae
atgaaattcaaaggatacgtcgccgccctgccggcactgttgctgacagggtgcgccatgctccccggacagcccaccgattatgaccgcttctgtaacgtctcaggcatcgccagccacggcgaaacctaccgtgtcagtgacagccaggatttctggttaaccccgaacggccgctatctcagccaggctgagtacagcagtccggctgatacgcttcagaaactgacgggtgtggtcagtggtgaagatcctgaccaggtgcggaagaacgccgtcagggtaagggtgttccgcgtcgagagtgaaaacagccataaaggtgcgtgcctgcctgtgcgttatgacgataatggcgcacagcgtaaaatggattcactgactaacggccgccgtatggtggtattcagtgaagatgaaggtcagtctggtcagcagatttacaacaaaagtcgtggtacaggattcagttacaggttgttatga

SEQ ID NO: 119381 - DNA, 249 bp, Enterobacter cloacae
atgagtggattgaaaggccgccgaatcagcgcggatatgtttgctatgatgttaaaagtacctgtcggggagctggtttttgcagcccgacacaaccagccgctacacggacaggcgctacctccttacgggatcggcggcgggaaaagctggagctcgaccgcctccacccgcagtatgacgtttgatatgcaggatgcggtcgatttcagcgagaaatttcataaaattcagtcgcctgacggctga

SEQ ID NO: 119382 - DNA, 741 bp, Enterobacter cloacae
ttgaacactttccccctgcaaatttctcagaattcacgtagcgacgccatcgggaccgggcgcgtgacatatgcctacttcgattatgccgatgcgctggcgctgcgggagatggccagccaggctgatttacccaaatacctgctggccccggaggtgtcggtgtttctgcggtatgtgccagacctgcgccagcaggtccttttcgataccctctggaacacgggcgcgcgtattaatgaggcgctggcgctgaccggcgccagctttcagcttgacggttcccggccgtttgtccggctgaagacgcttaaacagcgtcagcgtggccgcggcaggccgggcaaggatgaggaggtgttccgtcttgttcctctgaccgatcctcaatatgtcaggaaggtgcgtgaatttctgaccaccctgcgtattggtaaacagcagctgctctggccggtgcagagtgataacacgccgcgtaactggatcaggaaggcactggacctcgcaaaacgtgactctgtcacttttagtatccctgttacctgccacacgttccgtcacagcttctgtatgcacctgatccagcatggggttccgctgaaagttgtacaggcctatgccgggcattcccggctggaaaccacagaaacctacacgcgcgtgtttgcgctcgatgtcggccgtcagtatggcgtccggttcagcctgccagacagtcatctaacgcttccggaataa

SEQ ID NO: 119383 - DNA, 975 bp, Enterobacter cloacae
atgcgtatttttgttgacgacggttccaccaacatcaaactggcatggatggaagatggtgcggtcaaaacgttgatcagtccgaacagcttcaagcccgaatggtccatgacgttgctgacagattcatcagtgccggcttccgccaactatgaaattgacggggaaaagtacagctttgaccagctgagcccggatgccgtgcgcaccacggaaacccgctatcagtacagtgatgtgaatgtcgtcgctatccaccatgccctgatgcagtccggcattgaaccgcagccggttgatgttgtggtgacgctgccgctgggcgagtacctggatgaaaacgatcagcctaatatggccaacatcgagcggaaaaaagcgaacgtgaagcgcgcggtggccgttcaggggcgtgagagctttaccgtgcgtaaagtcagcgtactgccagagtcggtccctgcaggcttcagtgtgctgaaggatctggacgatctggactccctgctgattgtggatatcggtggaaccacgctggatatcgcgcacgttcgcagcaaaatgtccggcttcaccaagacgcattgcgatcctaaaaccggtgtatccatcatcaccgaagccgtaaaacatgcactggataccagcgtgagcacccgtaccagttcgtattttgccgaccgtctgatccaggcgcgaaatgacgaaacgtttctttcccgttacctccagaatgctgaccagcgggcccaggtgatgaaggtactgcatgagcgggaaaaagccctgacgcaccgtgtcaccgattcagttggccgctttgccggtttcacgcacgtcatggttgtcggtggcggcgccagcctggtcgccggcgcagtgaagcaggccacgggggtgagtgaagatcgtttcttcgtcagtgataacccgcaattcgatctggttctgggtatggtggcaatgaagggctga

SEQ ID NO: 119384 - DNA, 444 bp, Enterobacter cloacae
atgactgataaccgtaagtgctcgttttatatctacccggagcgcaatgcggcggaccgggtagctgacggctttcttgagaaactgcctcagaaagagcgtggccgcgcgatgcgcgccatgatgctctgtggtgctgcgttgatgaagcaggacgaacgcctgccgttcctgatcgctgaatttctgacggagagcacctcgatgcaggatattcagcggatcatcagcagtacgctgccgcagcaggatacaggagagatggcgcgtctggttgaggcgtttctgcaggccaccggcggtggcagcaatacggtgtcgccggcaggcggcgctgcgccggaaaacagtcccgccgtgactcccgaaccggcagcaccggaggataggaatctggaagaaacccgtaagaacgtccagcatctgttcccggatgatgattaa

SEQ ID NO: 119385 - DNA, 564 bp, Enterobacter cloacae
gtgaaaaaatatgtgctgttaaccctgaccctcatcgccggcgccgtggcagcaaacccggtaacagcggccggcaatattgccggcgatgtccaggcgcaagctgcgactgaagtgaaaaccgggttttcacccggcgggaccgcattaaatctggttctggattcaatcgaccacgcgcagcatgagattctggttgccgcgtacagcctgaccagtcgtcctgttgccggcgcgttgcgtgccgcaaaaaaacggggcgtatcggtggtggtggtggccgatcgcaaagcgaacgacaaccggtacaccgaagtgaactttctggccaataaccgcgtggcggtgcggatcaacgataactacgaggccatgcatgataaattcatggtctttgaccgccgcgccgtcttgaccggatcgtttaacttcagcgccagtgcagacagtcgtaatgcggaaaatgtggtgctgatcagcggcgcgcctgcagtaactgaagcctacgtgaacgagttttcccgtttatggggcgaaggaaaggacgtggccccacggtactga

SEQ ID NO: 119386 - DNA, 507 bp, Enterobacter cloacae
atgcaatcattccccctgttcgtttcccgtgtcgtacctgtgatcaccctgagccattgcctgcggcagcggcgctggtccctgcacaacacgccatgccagattgacctgagatcaggttgtcacctgcgctcacagcctttcggcacgctatccagacgggaaataagcgaccggccaccggctatgccccgcggttactggttcaggcaatgcagccgggatgtcatgttaacggggcgcatcgatcaggcagatcctatgaaacaggtctattacaacgaaggctggagcggtccgaacaagtatacgtttgaagtttatcagctggagaacgggcgttaccgggcgctggcccgcaaatggaatggcaaaatcaacaaggtgcagcaggaaacgcagtacctgtctgatacgcgggaggggctgaagcaccaggactatccccgcacgcgccaggtgaaaatttttctgaattcagacttctgggagaagggtaatgattaa

SEQ ID NO: 119387 - DNA, 480 bp, Enterobacter cloacae
atgattaagatggttagcgtcgttccgcagccggaaacagtgaagacgctccgtgaaaaaatgggcatgactgaaaccgcattaggggctgtcatggggtacgaactgcgcgcctggcagcgtaaggaagctatcagcgacgatctcagccagtacaacaagaccagtcttcgcccaggcgaatataacatgctgatgctgatcgccggcgtgcatcctgattaccgcctgaacaggacgttcagcccggatgatatggttaaagagcccgccacggccgaagacgttcgccgcctgcgtcaggcgctggggctaaaacacgctgaaattgcagcgctgtttggctataaaccggcgtcatggcagaccaaagaaaaggctgctcagcgcggcgtaaagctcaagaccggggaattcaatttcctgttacttctggccggtgagcatccgtcactgcagctggttgagaaggcgaaataa

SEQ ID NO: 119388 - DNA, 411 bp, Enterobacter cloacae
atgatcaccacacgccgaatgttaatgctgtatgcctgccttgtgcccgtagccctgacagggtgtgatctggctgattatttcccgaatgtgccacagcccgtgcccgtgatttcgcccggctatcaggttgatatcgatggccacccggtccgaatatcaggatttgatgactgcccgcgggaaaaagatgaagcccggcacgcagctgcacaagatgagaaaggctgcattgtgctgtctgcagagcgttccgaggtgaaggtcagactgtatcagccagccggcgccgtcaccgaaacctggcggatcatccgggaaaaagacgcacgccagaacgatattattcgcctgcagcgcccgaacggtgcgcttgtgatgcaaaatttacaggggaaagagtctccttaa

SEQ ID NO: 119389 - DNA, 264 bp, Enterobacter cloacae; identical to SEQ ID NO: 83557

SEQ ID NO: 119390 - DNA, 363 bp, Enterobacter cloacae
atgaccatgcaatcagaacttgtttttactgatcctatgctcaacgtcgttattgctgaagttaagcgttttaattgcccacttctttttgtcaaagatcatggcgtgtatgtgatggcggcgaaaggtgagaaaaacagtaatgggatgcacaatgtctgttacgccaatggtttcaatccggatacaacggattttgacgagctctgggaccggatgcgtgatgcctgtggcggagatgatttttgcgaatccctggacctcgatccgaggtcgattgaacttctcagccgtaccaaaccctgcctgaaaataatgctttcagagacggaactggaagttattgcagggggacagaaataa

SEQ ID NO: 119391 - DNA, 450 bp, Enterobacter cloacae
atgaaattttcagcagaagaactcaacattatccgccaggcggacgccattattgccggtaaaattaccacaacggattttatcaccggcgccgacgccgcgcgttccttactgcggtttcgtcttgctgcagaaccacgcgaatcattctgcgcgttctttcttaactgccacaacggcgtgattgcgtttgaagaactgtttaagggaactatcagcagcgtcaccgttcatccgcgtatcgtcctgcaacgcgccctgcatcataatgccgccgccgtggtactggcgcataaccatccttccgctaacactgcacccagccaggctgacaagctgatcaccgagcgtctggcgcaggtgctggggatggttgatgtcaaagtcctcgatcacctgattgtgggcggcagcgatatttactcttttgctgaacatggtctgatttga

SEQ ID NO: 119392 - DNA, 267 bp, Enterobacter cloacae
atgggcaataaatataccgtgccgcttaacgtgggcgcgatccgcgaaagctgtttccgtcccgctgataaatggaccccgccgacgggggatgaactccgctatctgctggaaaatgtgctcaacctgagtcaggaggggctggcgcgacatgttggcgtgaacggcagaacggtgcgccgctgggtgaacggagaaagtgacatcgcgtattccgtctggtgcgtcctttgcatcgatgccggcttaccgccgatctggaaatag

SEQ ID NO: 119393 - DNA, 180 bp, Enterobacter cloacae; identical to SEQ ID NO: 95978

SEQ ID NO: 119394 - DNA, 861 bp, Enterobacter cloacae
atgtcatctgaaaaaactctcccgtcggtcgatctgatgtcctgccagcatggcggtgaagtgatcccgtctattgctattgagcgcattatctcgttgcggaatgaaggtattcgcgtctatctcgacggcatagacaagctgcgaaaagcgcgcgatctgatgcagcaggccggaggctgtcagtacctgtatgactacgacaaagccgtagagagcgcgatcaaatggagcgacaccagaccagaccaggccgaaacggctatttcccgcgttatcgacggaaaaatctgggatcggctgatgtcggaaaccggcatgtatacgctgatgagcaacaaacaacgtcaggaatgggatcggcaggtggcaggcgaagaaatgccgccgataacgctggagaacgttatgagtacgttccggcacctgaacgcaagcaaggccgatactttcacgcaagggctgattgatatctttaaatccctgtcgtgggattataaaaccaataatccctgcatgtttggcaagcgtatcatcatcgcgccgttgctcgatgtctggcgcagtggctgggtgcgcttcagctcagacgggcacaccaaaattgacgatctggcgcggccgttctacgtgctggacgggcgtaacgtgcctgattaccgcgtttctgacggtgccaaactggatgcctttttcagtgaaaaccagttcaacggtaaggtgttcgagtgtgattacttcagcgtgcgatattacaaaaagggcagcgcccacattacgtttaaacgcccggagctggttgagaagatcaataatctggttgccagtcactatcccggaatgttaccccctcgcgtgtaa

SEQ ID NO: 119395 - DNA, 339 bp, Enterobacter cloacae
atggctattcaatcccttcagttccgtaacggctccgtttctcttggtgatgtttttgtttccagctggggttatgagcagacaaatacctatttttatcaggtgatcgccctgcgcggtaagaaaaccgccgtactgcgccgcatcgctgcgcagcaggtgaaagcagacagtgcaatgtctggcgaattaaagccggtattgaatgactttaaaggcgaacccgtgacccgtcgtatctgtgaaaaccatgagcatccgtctgtcagcattgacgagtacgaacaggcttataagaccgatcctaacgaaagccatttttacagcacctggggctga

SEQ ID NO: 119396 - DNA, 231 bp, Enterobacter cloacae; identical to SEQ ID NO: 95981

SEQ ID NO: 119397 - DNA, 411 bp, Enterobacter cloacae
atgcacggtaacgtaaatgaaatttgcgcaaggcttctcgatagttttgaaccacagcagcggatcagccttctgatctggactgctgaagatgtccatgactgcaccagtgatatgaacctcactgacgatgaggccgaagccgttctggcagaaatcgcggaatgcagttcacacagccgttatggcgtcggaaaagataccgtctggagcctggcaaagcaggtgcgcgaagatgccgcccgcgatcgaaagatagaggtcaatgccgaggcgctgcaaaaagtcgtggcgctggcggcgcagtttatccggctggaagaaatccagtctggtgaaggagctgcacgccgactttatccgcaggagtctgaggcgctggagtgcatcacgaaggcgattaacggctaa

SEQ ID NO: 119398 - DNA, 306 bp, Enterobacter cloacae
atgtcccagaatgaagcctattacgacacgctggccctgattgaaaaggggcaatggtgtttcggcagtatggacgaagaaaacgaagagcgggcaatcaaggccgctaaggcgctggcgctgtttgcgcgcctgaatgagcaggactgcgacggacacccggtttccgaaatcatcgttgattttatcgctaacctgatgcacctgggggaagcgataaattttcgtgtgctcgatgaggaaagcgcggtgatcccgttggtcaggatcgcagccgtacactttaacgctgaaacaaagtcatag

SEQ ID NO: 119399 - DNA, 441 bp, Enterobacter cloacae; identical to SEQ ID NO: 21629

SEQ ID NO: 119400 - DNA, 285 bp, Enterobacter cloacae
atgttaacactaactgatattcgcgccagcaatacggtgctggttacggaatttggcggcgtgcgtgctgtgcatttctgtcttcatgaaaaattaagcggtaacgacaacgatctgtggtttccgcttgccaatggggccgacctgttcgaggcgctggaaagcattatgtgcatcaattttgccgctgctaacgttgtctcgctggagttcctgcggcagaacgggaagtgcaaagactaccggatcacctacaacaaggccaaattcaagccattaagttag

SEQ ID NO: 119401 - DNA, 222 bp, Enterobacter cloacae
atgaaagaagcagaccaaaaaaaagtgaatgccgtaatggcaattgctgattatctcggtgtaaaaaatcaaatcgaggtgatcgaatactcagccgaatcagtgcaggttgagtggcgaaatcctaaaacaaaacagcttattcatcgtgattacacttttgcaaattcctttgtaaaagactttgaaaaagctctgaaatcgaacatgaagttttactga

SEQ ID NO: 119402 - DNA, 435 bp, Enterobacter cloacae
atgtggaaacgtggcgaaaacaaagtgattctgatggggcgttctggcaaagatgcagaactgcgttacaccccaaacggaacggccattgcgagcctgacgctggctacagaaatcagctatagcgacaacgaagggaaggagcaaaaagaaacggaatggcatgatattgtcatttttggaaagaaagccgaagcagctgggaagtacttcaaaaagggtatgatgctgtattttgtcgggcgcattcgtaataacaaatggcaagggacagacggcaaaatgcgcagcaataaggaaattgtgatcgataataacggcgaaatgcagatgctgccgggagctgggccacgtaacaccagtgcagaaggccagggaggcattgaaaatcatgatgaaccgccgttcccggatatgaatgattacccgcagtga

SEQ ID NO: 119403 - DNA, 312 bp, Enterobacter cloacae
atgaatatcagtgaacaatatcgggtggcggtcgtcagtaccggccatgtaaaaaaagaagacgcggaactactggacaaggtctgtaacgatgacttgtccggtcaaggtttgttctggatcgagaaaaatcgctatgggtggatattgcgtatttctgctactgaacaatggcgagtggaattaaccagggcggggatcagtgcaagtgctttggataatatagccgcgttaaatggtgccgggttcgactggatttggtttgaccgggatgcagaacaggtgccagaactgaccgtttgggagtggtaa

SEQ ID NO: 119404 - DNA, 537 bp, Enterobacter cloacae
atggcgaccttatacccttttgaggtttatacccttattgtgtcagaattaatcgtaagccattttaatgatgtcgctatggtatatccgggaagcgaagaaattaaaaagaactatgacagtgaattaagtgctgtacaggtagttaatggcatcagagaaaaactgattgaagatggtgttatacagtgcgaacagtgcccactgctatccgagtgggatgagaacaaggttatcaaccagctaattaaagattaccgcctgattctcaatcgtgactatgaactaaaccgtgttcgtcagcagctggccccggagctgatcgcacagatagaaaactggaaagagcagaagtattccgattctgcgaaggaatacgaggtgctctatgaaaccatcaacatcaacggaaaggaggttacaggcaaactaaacgtagttgcagtaagtcgctttgatgctgttttcatcgtagggcagcgtcacgctaacgataactttttggttttggatgtgaaggaggtgatgaatcattga

SEQ ID NO: 119405 - DNA, 141 bp, Enterobacter cloacae; identical to SEQ ID NO: 21635

SEQ ID NO: 119406 - DNA, 366 bp, Enterobacter cloacae
atgcctgcaaaaaagaaagcattttatagcagtgaggacatcggaaaattcaaaagcattctcgacgacttgcctgatgtgacgtcagaaaggcttgagaaaaagcacgtactcgatgagcttaaatctgacattaagaagctgaaagattcgaaaggatatgaagataaagagatactgaaattcctcaacgatgcgggtttttcagacgttacattacgtgatatcaaggacattactgccggacgagttggaaaaaaaagaaccagcaacagccgaaaaaaaatcactggagttgacgaagatcagcgcacacaaaatggctctaccggtcagaattctgacgcttcaggtccgcagtattaa

SEQ ID NO: 119407 - DNA, 318 bp, Enterobacter cloacae; identical to SEQ ID NO: 25804

SEQ ID NO: 119408 - DNA, 1980 bp, Enterobacter cloacae
atggtgatacctaaaatcattgagggccgaagggacaaaaagtccagctttggtcagctgattaagtacatggcagacaagccgtctcaggagttgactgatacagttcagcctactcctgagactgctttagctgttaaatcggatatgttcgaagggttaaacaattacctgacccgtaagcagaaagtgatcagcacaccggtggatgttgagccaggtgtacagcgagttgtggttggtgatgttacctgccagtacaataccttctcgctcgatggtgcagcacaggaaatgaattcagtttctcagcaaagcacacgctgtaaagatccagttatgcactatgttctctcatggcctgactatgaaaagccgaatgatgatcaggttttcgattcagtgaagtttacactggcatcgatgggcatgtccgatcaccagtatgttgctgccatccaccgggatacagataacctgcatgtgcatgttgctgtcaaccgcatcaatccccagacatataaagcagcctcatcgagctttaccaaagacacacttcaccaggcgtgccgcttactggaattgaagaatggttggtcccattcaaacggtgcatatgtggttaatgaccgtcaacagattgtccggaaccctcacagcaagaaagagcgaggcaactggcgctcactcgatcgcatcaacaagatggagaataaagagggtgttgaaacgctctatcgctatatcgttggtgatgaacaggtaggcggtagtcgtcaaaacttgatccatgtttcagctgggcttcgtgaagccaaaagctgggatgatgtgcataagacatttgcaggcatcggtcttcgtgtcgaaaaagcacaggggaaaaagggctacgtaattacccacgaacatcaaaaccagaagacggctgttaaggcgagtctggtatttaacaaggcacaatataccctgaagtcgatggaagagcgctttggtgaataccagccttcacatattgaaccggccaaagtatcggtatttaaaactgcatatacccctggtgcttatcgtcgagatgccaataaacgtctgcagcgtaaaattgagcgcgcagaagaaagaatgcttctcaagggtcgctatcgcgcctaccggaacaatttaccgatatattctccggataaagatcgcatcgccgatgaataccggaaaattgcccaacatacccggttggtgaaaaataacgtccggcattctgtttcagatcctcataccagaaagctgatgtacaacctggcagagttcaaacgcctgcaggcggttgccaatctgcgtcttagcttgcgtgaagaacgcaacggtttcagggcggctaacccacggctttcttaccgagagtgggtcgaacaggaagcactgaagggtgataaggcagcgctcagccaaatgaggggctttgcctattcctccaggaagaaggagaagtataaacagcagctggttgagcagatcgggttcaaccgtacctttaacgccatcaccagtcatgatcgtgatgatgtggccgtaatggcctcagcacgtcatggtgtcaagccacggcttttgaaagacggtactgttatctttgagcgcgacggtaaaccagtagcggctgatcgtggtcacattgtgctgacagaaagtaatggaatcgacaaagagaaaacggctgaccttgcaattgcattaacgattgctggtaaagccaaatctgttcgtgttgatggtgacggcgagtttaaggaactgtgctgtaatcgtatcgtcgatgcagctgtgaaccacaatcaccctgtcgcgcagggcattaccttcacagatgccgctcagcaggcgtatgctcaaaacgagaaacatcgtttgattcgtgagcaaaataatagtaaaaatgaaatgcaattaagaagtgaaagcgacgacaaattcaatccgaagtaa

SEQ ID NO: 119409 - DNA, 501 bp, Enterobacter cloacae
atgaaaatcaaaatgcaaacggtcctcgcggccgtttctttgttagctcttgccggttgtgcctctcaaagcgaaaaggaaaaacaaatctctgcacagcagctggtagatcaggaattgcgtgagcaagccattaagataaaactcgcacaggatgagctttaccaggctggagccattaacaggacccgttacaaattccctaccattatcaatgcaaacagtcagtatgttcgtgtgagctggcagggtgatgcttacgaattactggagcaactggctaaacagcgtggccttcaattcaccagtcaggggatcaagttaccgcttccactcaatatcgatgttggtggttcgaaggttacgtttgaacagttgctgaccctgatccgacaacaaacgcagtaccgtgccaccatcaaccagaaacccggtgaactgcagctgctttacctcacaccatcgaagaaaggttcattcctcagagggacccgcccatga

SEQ ID NO: 119410 - DNA, 780 bp, Enterobacter cloacae
atgaaacttaaactgatcgtgcttttgacgttaccgctgcttgctgcgaacgttgcacgcgcggacgactccgatgttaaaggcctggattactacatggacccgccaagccaaagtgacgatgaggccgatgttactggcagtatgctaaacgacgcagcgcacaccataggatttcgcggcggtaaggcagaacgcgctaaagaaattcgcgccgcgctggaaaatcagcgcagcaaccttgattacatgtattcgttccagccgctgatctcttctgaaggctacctgccaccggtcattgctgaagctaaagacgttgcacacattaccaatgagcaaatccgaacggccaaccgtgcctacgacattgttgtgccggcacgctttgtcagtaacccaccgacctggaaaagctatcttctgaccggattgatggcgcagcggatcgaattgcctgaaccggcggcgatgccgaaagacggcaaacaacgtgatatctggaaaaaggctgtcgcgctgggctggtctgacggccgccaaaaagctgatgagatattcactgctaatttcaatcgcctcacacgggattacaccggcatgttgcgctacagcacgctactgcagcagggcatgataaaggctccagttatcacacagcagcagcaaacagttacaggggataaaaaccgtctcatgctgggtgataaaacgaaacgtatgaagcagcaagctgagtttgacatcaacaaacgcagctggaaaccgaccatacgttga

SEQ ID NO: 119411 - DNA, 1164 bp, Enterobacter cloacae
atggaagcattcaattttggtccaacgctgacgccacagacgctggaacgttttctcgtacactgctctaacaatgaagtgtccgatatcttgttgcagggtggggataagatctgggtagaacgtcatgggcgccagctgcccatgacagattacccaatcgacaccctggagctggaacgcaccgttgataaggtgttcgggcaggagatcaaagggatactgaaaagcgctgcggttgttaataccgctatccagctacgaggtgatgaagcgggcacgattggactcggccgcggcgaaacgcgccggttccgtgcgaacttcactcaggccgatatttataaaacagaagcggcaatgtctctgacactccgtgttctgaatgagtttattcctcagcttaaacaaatgggcattgagcctgagctgtttaattctctgttgccggcttccggcctcggactgatttgcggtgaaacgggatcgggtaagtcaaccctgatggccagcatcttccagtattgcggtgaaacgtaccaggaccggaaaatcatcacggttgaagatcccatcgaatatcgcctgggaagtagagactggattgcgccggcgccggcacagtcacagattgggcgtgatatagattccttccacaattttatcactctctccgggttacgtcgttctccgaagattatgggggttggtgagctccttaaccgcctgtcatttgaagctgctgtgctggcaggtaaatcaggccatttttgtctcggaacactgcacgtcaaaacggtcggagaggccatttcccgatcattgcagaactatccgccggaaatgcgtgaagctgccgcctttgacctgctgagtatcctttcgtacatcatcgtgcaacgcttgcttaaaacaaaagatggccggcgcaaggctgtccgtgaatatctcgtcattgataacagcctgcgccgcaaactctatgacgttgattacagcaagtggggccgctacatcgacgacctgttgatcgctgaaaaccgcagtctgattcagaacgcctgggtaatgcaccaggaaggtttgatcgacgaagcggaagtcatcgaggtcgcaggatatatggactatctggcgttaaaagagggcaagtatggacattaa

SEQ ID NO: 119412 - DNA, 261 bp, Enterobacter cloacae; identical to SEQ ID NO: 83582

SEQ ID NO: 119413 - DNA, 3216 bp, Enterobacter cloacae
atggcgaaacctgaaattgcaactgaaagaacccgtctgagtattccctttgacgatcgccaacgtgcaatacgtgcggccggcaaactggctgatggcagtaatgctctggactacgtgaaggaagaaaaggtgtggtatgcacagccgggggccaacctgagccggctgaaagagtggatttttgaccccaataaggtgatcgaagaaccgcccctggatattcaggccattgaagatgaatttacggcgtggcttgaagagcgcggtgccattatcaaagaccccatagagttcgatggccagaagcattatgtcgatacagtggacggtaaagctggttcaagaaagggggtgtatgccgctttcctggatggccggcctgcagggtggtacagggactataagaacggtggtgaaattcagaaatgggtatctaccggcgcagcccctaaccctgaacaaatggccatgctccgtgctgatgctgcggcaaggcgtgaacaaagagctgcagcgcaagcggataagtttgatcagaccgctaaccggttgatggaagaatataaccggcttccggatgccacgggagatctggcatacctgaaaaacaaacaggtcattgccgctaacggccttaaagctgatgagcggggcaacgttgtgatccccctgtttaatgctgatggcgagttcaggacccttgagcgcatctggtccgacggtagtaaacaccttgaaaaagacggccaggcatgggggagttttttcgttgtgggtggccaactgaaggatggtgacaacctgctttatgccgagggatatgcgacagcagccagtatcagcgaagccatcaatcagcctgtgatcatgacggttaatgccggcaacatggtggaagttgctggccgcctgaaagacgcctttccaaacagcactcattacttccttgctgacaatgacatttataaagacgagaacgttggactagaaaaagcgacagaagctgcagagctgactgccggccatgttctggtccctgcctttagcaacccgaaagaagggcttacagactacaacgatttgcatgtctctgaagggctggagcaagtcagattgcaggtagaaggagccattaatcaaataaacagggtagacactatgccgactgataacccgaacattactgacgttaatcacagctcgactgacagcgctgccgttgcagcccctgaaaatgccgcgccggtggccagcgcccctgcagctgctgaaccggtggaagccgcgccggtggccagcgcccctgcagctgccgaaccggaggaaaccgcaccggtggccagcgcccccgcagctgccgaaccggaggaaaccgcgccggtggccagcgcccccgcagctgccgaaccggaggaaaccgcgccggtggccagcgcccctgcagctgctgaaccggaatacgccgcaccaacagatcgagacggtgatgatgaaaagagtaatagcgccagtgatcttgaggcgtatgccgctatgatggcctttggcggtgaaacaactgacaccgctcagcaaaagcctgaagggatagcgcccagcgaacctgtagctaataccgccccggctgaaaatgaaaccgaggagaagaagaaaaaaacaaacgaagaactggaaaacggcatacgctgggcaaccaacgataatgcagaaacgcccccaaaagaacgtatagacctggaagggttaattgcccggtttgggtacagagcagagaaagactatacggcgtatacgcttgatgggcaggatgcgttttacgattacggctcacatctgcgtatggctacccctgaagccagccagagtgacgagatgatcctggcggccgttcttaccgcggataagcaacatcatcgtggtattgaaatcaccggcagtgacgaatttaaagagcgagtgtttaaccttatcagtgaatacaacattgaggtgaaactgactaacccagaacaaagggttaaattgctcgaactcaaaaaagcaaatgaaacagcaaaagaaacggcaaaagaaaatgttgctgattcaaaagcgaataagcaggaaggggtaaacgaaaaggcaaattcatcagttcagcaaaatggaatgcgctgggaagaatcggcctctgtacaaccgaagaagcagaatgcatctgatactcaaaaggaagataaagctgcgggtgaatcctgggagaaaggcgttatcgtcgcgcatggacgtgctaagtatgagtggaaagatgatgaatccatgaactactttgtcaccctcaaaaatgaacatggagagaagacactctgggggaaagaccttgagagagcggttaaagatgctggtgtagacaccgaacgtcttgttacggtcagaaagctgggatttgtggatgttgaggtgaatgcacctgtccgtgatgaaagcaacaagatcgttcgttatgaaactatccagaccaaacgtaatgagtgggaagtaaaacctgtatacccacagccaacagcagggaatgaacaggcctataagccttctgaactggttccgtatgatgctgcaaccttccagaagctccgcacaacaattcagcagattaccggtgttgatctcagccgtgaggccgtgcctgaaaaagaactgtattggttcctgccgaatggtaagccagctcctgaaagcatgacaaaacccacaggctataaactccctcaagagtcaaaaaccgcgggtacacctttgctggtcgcaccgcataaaaaaggcgaacgacctgattattaccttgttgagtctcgtaaaggattcatgcaggggatcgcaaaggataaggaatctggcgagtaccatagcgtaattggtaaagtgaacaagcgtattgataaagatggaaactggaaaacgtatatgacactttcagcaatcaataaaaattctgaaagtggaattgttttgcacggatacggccatgttgatcagggaggtaaaaacctgctttacaaaaacacaattgcaaatgaaaaacagcctcagcatttacaaccggcctcagatgaggtaaaaaacaaaacagtaatgaagcagctttttcatccttctaatgctgcaaaaagaaaagatgatgaaaggagagaacagactcatgcaccagtcgcaaagtcagcgcctcggccataa

SEQ ID NO: 119414 - DNA, 513 bp, Enterobacter cloacae
atgcaccagtcgcaaagtcagcgcctcggccataaaacaaaaaccctactcgtagcagtagggttttcctgcatttctgtgagctcatttgcagccacacagacctgtgcagcatacgaactggcaaaagctggtgctgatgctgcctataaacaggaggttgaacggattaacaacgccgctaaaagtgaatccagtacatctgattctctcggacagtgcctggggtcgctatcggtatcactaaaaatccctcagtttccgtctatcagcgacatcattgataaggtgaaggatgaggtatgcaatacggttaaatcgaagattaatgagaggtgggggagcctgactaatacgacgctggacccgtggtcaacgatttcatcccgactgccagatacgtcaggtatcctgcccaacgcatcttctaagaatgtgcaattaaacaatccggcagctgcgagtggaagtggtgaggatgcaaacagtgatgcattcccgttccatttgtaa

SEQ ID NO: 119415 - DNA, 213 bp, Enterobacter cloacae
atgagctcaaaaaatatgaaatcagctgaagactggctgcatactgtcagacgtttcatgaatgaagattcgcttgatacgtatgtagactcaaaacgtgatgttctacctgccacagaatttatgcgtttactaaccgcggcggaacaccgccgcgttgaaatacgaaccggcaagctattcgataaaatcccgaaaggactcttccggtag

SEQ ID NO: 119416 - DNA, 411 bp, Enterobacter cloacae
atgagcgaacataatgattacgaatcctgtgcagttatcatgtgcgaacgacgaaaagccaccgccgttttgcgcaaaattccgccagaaaaccttgagcaactcattaatatgtggtccgacattgcacagggaatgatcgagaaatttaaggaagaacagaaggccactgaagagaaagccgcagccacaaagcggttcatggaagaacacaatattacggctgatgaagctctccagatcttcgaaaatctctttggtccgtccacgaaaagtaaatccacttttggaaaagtgaagtaccggatcgaagttgatggaaagtccataacctggacaggaaaaggtcgccgacctgcagcgtttgccgagatgagcgacgatgagctcaaaaaatatgaaatcagctga

SEQ ID NO: 119417 - DNA, 714 bp, Enterobacter cloacae
atgaaaacacaaaatggtgaaaatattatggatcaaactgactcggatcaaaactcagtcgttgatgatgacagcaacgcccttgctccagctcttgctgaagagagtaaccgaacggtgcaagaaatcgtatcgaaacatggtttaaaagtaattttgattcagacgctaatcatattagtcgcaatcattatcatcggtcttcagggttactggcttcaccagaaaaaaaccaaatatattgcaacgaatgggggcatgatcacggaagtacacccaaccgatgaaccggcttacacagcggaagaggtgatggactttgccaaccgtacaatgatcaaatcgctttcgctgaactttgtgaattacgaaaaccaattaaccagcgtccgtggcgattttagcgctgaggggtacgttagtttccgtaaagcgctgaccgatagtggactgctgaaagatatcagtgaaaaacgtctgaacgtaaaactttccacaacaccaggaaccctgatcacggaaggtcttatccgtggcaccaaaacctatgcctggcaataccgtattccggtgactgttcagcttgttggtcaggctcaggactacagaccacaaccttacgatttgatggttcaggtacgccgcgtcaaagaagacgaagatccacggggtattcaagtagcgcaggccattctcaaaccccggaactactga

SEQ ID NO: 119418 - DNA, 1152 bp, Enterobacter cloacae
atgaagattaaactgttaactgtacttatggccgcactgttttcggcaaattctgtatctgcagctgatgcaccgactggtaatggagcgccgcagcaaacggcgccagctgtgcctggtggtgatattgctcaatggcagcaggccagttccgggttgcccgtaaatcagcagtcacaggtgcaacagccaccacagcaaacagcacaggaacaaggtcagcagcaggcgcaaggccaacaaccacaggcacagccccaacagcagccaactactgcactgcctcctgcacccatgccgcagattcctccaccacagcagcaggttactcatgttaatccgcagacactggaagagttacctgcacctgttctgcagcagatccagcctattacccctggtcaggtgcggtctgcccgcagcgcaatggaagatatgagcgcggcggccaaaacctcaccattaacgccgatcccacgaatttcaagccagacggtatcactgtcagctggtgcatccattccgcaggtacgggtatttccaaaccaggcaacgacagtgacgttttcagatgcaaccggacacccctgggtattaggtgcccctccatataattcgagtccctgtgcttctggtggtgaactgtgtgttggctatattccaggatcggcggtattcacaatccagcctaccaatgcctatgccagcgggaacatcacagtgcttctgaaggggctggccacgccggtcattattaacgtgaagggggcagaaccctccgttaaatcaaaaaccgttgatgttgattatcgtctggatctccgtatcccgaagcgcagtcctgacacaccggtttataccgctacgcctgagaaaaaaatctcactgtatgacaagcagctgcagagcgtgctcgatggcatcccgcctgaagatgctcagcggttgaaacttaaaaacgcgccagggagtaccaaagtctggcagatcggtgatgagctctacgtcagaagtaacatgcagctgcaggatgagtttgaaaaaacgctttccgctatcgatggcacacatgtttacgtgctgccggcaacaccagtgctgactttttctgttaatggtcaggcgcgtgacgttgaagttgagctgaattaa

SEQ ID NO: 119419 - DNA, 1350 bp, Enterobacter cloacae
atggctacagataaaggtaaagaaaccagaaaaatgatgctctacgtcggtggtgctgctgcagtggtggcgcttctgggagggtactggttgtttggctcatcagatgagccggcaacgggagggtcgcaggtgaaagcccaggggctggaagggaaaactggcagggaaaaagctaatgatccccaatacaacaagctgctgaatgagtggaatgctgataattcagagaaagcggcgctcacgggggatagcttcatatccacgttgtcagccagtaacccggtggccgttgattacggcaccaaagcaccaccaccaaaatattcgtgggaatcgtcagcaaaaccgtcgggcgataacagtaaggctaatgatgctgagcagaaagagcgtgagcgtcaggctaaagcggtggctacgttactgcagaaaatagaccaggccagaacaccggttgtcacgggtgttgcacttgcaacctctctgggagctgagggaaatgacaagaacggcgggactttctcagggtggaccgattcggtctatccgcagaacaaaaagccggatgctgaaaaacaacagggggcgaagaataaggtcaaagataaaggagcccgacttgtatcggcttacacgcttgtgccggcagtaatggatacggcgatggacagtgacgatcagaacagtattgctattgcccatgttccaactggagcgcaggccggcgccaaattctattctggccaaaaccgtcttgccggcgatggtattcgaattcacttcaccggcatggagctgaacggagtgcagtgtaaggtcgatgcgtatggcgtggcttccgactcgttgcgcgcggccgtttcctcaaatgtaaataaccgctggttcagccgtattattctgccggctgtcgctaacggattaggccgaactggtcagctgtatgcggacagcaattcgcagatgattatcactgacggcgggaacgcatatcgttcaactggtacacctgatggcaaagcggttgccggtaccattattggcgggatgggtgagcaggcagggcgtgtcctggccgacgatgcagcccgcctgccggtgaagcaggttacggttgatcgtaaccaactcataggcatccagtttgtcgcgccggtgtatgaaagcgactgtggcgagaatatggaaaatgcttctgcagagcaggcgcagcagcaagcaactccgacactttctagtgtgcaacctcagcagatgcctcagcctccggctcctaattaccctcagcaaaactttccaagctaccccggctacgggtatggctccagtaacccgtattaccgttaa

SEQ ID NO: 119420 - DNA, 705 bp, Enterobacter cloacae
atgaatctgtttgaagatgacaataaaaacgaagcagctcctgcccaggaaccggtgtctgctaagcctgctgaaaagccaaaaccgacagtgacgccagcagcaaaagcgagcaaaaagccgcttaatatcagtgactatgcatggattggtggtatcgctgtcatcgctatcctgcttttagtctggttgtttgggggctccgatagtgatactgcgccagcgacggggaatggggcgatccagtcttcagcgcaacgtccgcgcgtacagtctgcccctgccgggcaggattctggtgacttccgcgagcagatttccgggattctgctgcagcaaaaggaacggctggacgcgatagaatcaacttctaaaaatggaatgatgatcctttccagtcagttacaaagcgctaatgaacaaattaaaaatctgaacaatcaggttcaggaactgaaaatgaaagccgctggttatgggccctcatttggtaatcagagtggaacaatttccggttcaacgtcacaggcattacctttgttgagaggtttttcaattaatgatttatctggcgatcttgcttgggtaaaatacaaaaaccagacgtatgctgtgaaggtcggaagtcaacttggcggagtcaccattacgggtatcgatactgaaaatagaatcgttacaacaagtaaaggcctaatccgctaa

SEQ ID NO: 119421 - DNA, 531 bp, Enterobacter cloacae; identical to SEQ ID NO: 96007

SEQ ID NO: 119422 - DNA, 390 bp, Enterobacter cloacae
atgaaaattgttaaatttatcaaagacaaggcgttatctgcatccatcgcagcgtatcagctgcgcggaacggtagcaaaatcgttagtggtattgcccctggcattactgagcaaagaggctgcagctgaaacgactgtctgggaaaagatcaataccttcacggaaggtatggccagtacccagcctggtctgattaccgctggtaaagtggttggtgttgtgtgcttcatcgtaggtcttgtagctctgtggctcaaaaacaaacgcgggaaagatatcagtggcggcttcatcttttggtcaatggttgttggagcctgtctggtcggcctgaccgcatggatctcttctgttggttcaaccgttggcgttgacgcaaccctgtaa

SEQ ID NO: 119423 - DNA, 495 bp, Enterobacter cloacae
atgaaagattttaagctcaccaggaatgaacaacctgccagatgccatgtgtgcgggataaagagcaaagatgttttctccctcgcagaagatggacagaaagagagaatgctttgctctgtatgcctgtcgctcgaacacccggagaaaatgaaactagagactcaaaccggacttttgctgaagagaaatacaaaccgaaaactctacagcctgttgtttcgttcaattgcaaaagcggaaaagtcaacggacgattcttaccgtgaaaaggcacagaaacttaaacagatattgctcagcacaactgacgtagttctaaacgaaaccggcagtgatgatggatacgatttactgcacctgataaaaaaacaccatcagttacttcccatgaattttgacgatgagtttgtcacttctgtcgcagagtcagacgaattgccggatgtaagtgactggaatgaaatttacaagggtaagagaggttttaaatga

SEQ ID NO: 119424 - DNA, 3051 bp, Enterobacter cloacae
atgatttctttctttgaggatgtgatcgaaggtatctcacgcaatcttacgtcaaatgactcgttaaaatactgtgatttgacaacggttgtagggcttacgtcgcaggatcgcgttgagcatcctgaaatcagggctccgtacattctgactacgaagaacaacgattttcttaccgttattgaggttcagggcgctaaatcatcgtttgacgagaagtcgtttaatgacttcatcatgcacctttcaaactcgttgtcgaattcctttattaacagtggccataagctgtctgtggtgtttgagcgcgactttaccaagaaccaggaagaactgaataatgtttataaaccgcaggtagcagcaatagagcgcctgcagatagacattaaagacctgatcgccgatgacgcaaaaaaaattgctgcccattacagccgtgaacgcgcttacatcgtgctgtatacctcgaaggggatgattgcgaaggatgaacttaaaaacgagcaggcaaaagctgccggcgttatgaaggatatcccgcagactcgcttcagtcagaacccaatcgaatttcagcttgaaggtttgaagatcacgcatgacgcgatgctgtggcggctgattggtatgcttcagggggatgatgagtcggggatggggcttctggttgatgtcctcgatgtcaaacacgccggcgccatgatgcgtcagatgctgttccggaactcaacatcagaaaactggtaccctcgcacgccgtttgaccaaaatctgcgagtttatggcgctccacggaaaggcaatatcgactcagtgctgccgccgcggctgaatatccagatcatggaaggggaactggaagaagatggtggcctgatttactgcgatggcaagtattacggctctgttgcccttgagttgccaccacttcaccctgtcaaatttaagcagttattcaacgcgattaaccggaaaatcccgtaccggataaaatatgactttatgggcgggggcaaaaaagcactgttctggccatcagtgatcatctctttccttcgtttcattccctcactcggtactatcgcgcgtgatatggattatgtcggggcccagagcgaaaccgatccaacggctatcatggccatcaactttgccacctggggtgacactaaggatgaagccaaacgcaacctggcggctttaactaaggcgattgaaggctggggtgtatcaggtgtgtccaagacgtatggtaatccaggtagcgcactgattgcatccgttccggggctgacgacggccacacctggctcattgcattatccgccgttgagtgaaggcttgcggatgttaccttttgaacgtccggccagcccctggcatggtaaaggcaatatcaacttcatcacgctcgatggcaagctgttcccttatcaaatcgccagtcccctgcaggagaaatttaccgatgtcatcaccggtgttcctggttccggtaaaagcgtgctggccaaccgtcttaacctgagcgcgattttccgggcagataaaaaattgccttatctgaccatcattgataagggatacagtgcgaaaggtattgccgacctgatttgggctgaattgccggcggatctacgacacctggttgccagtatcaccctgaacaatgacgaatcgcactgtattaacatctgcgatacgcagttaggttcaaggtatctgacgcagtttgaggaagtattcttaaagcagatgcttaacgcattctgtattgatccggcaattggccagccgccagatgcaatgagcgttggccaaatcgtcagtaaagttgtatcaagagtatacaaagcaaaagctcattctgacgcaaataagtttaagtttaacgatccggttgttaatgaagctctgaaagtatctggtctggatacagagctcggtgaagactggtttgaaaaagctacatggtgggaagtcgttgataagctgtttgccaaaaaatatttccatgcagcgacggttgcccagcgttatgctgtgccgaccatttacgatttcattagcgagctacaagaagaaggttttagtaagcaatatgcggatgtaaaagtcaatggaagtgagcctgtagtaaactttgttgcacgttgtttccaggctgccgctgctgactatgccattttctctgggatcacggtttatgatttcagcccagagactcgtattgcgatcctggatatgcaaaacgtgctcggtgacagaacgacacctgcaggcaagctcaaatccggcattatgtatctctttgcgcgccagatggcagtgcgtaactactatctgcctcagtcagcagaaaccttcattcctgctttaccggagcagtacagggcatatcaccaggcgcgcatcagggagctttcagaagaggttaaacataccttttatgatgagtgtcataactttgccggcatcgactttattcaaaatgcgctgaataccgctgaccttgaagatcgtaaattcaacgtccgtactgcgttctcgtctcagtatctgagccatatgccttcgagcgtgcttaaaaccatgaacagcctgtttatgatgcgcctgacggaaggggatgaagagtatctgaagcaattagagataaacatcccggccgatatcctgcgtcgtttcagacagcttccgcaaggggtttatccggacggaagtggtactgcatttctcggtatttttaaaacgaaacgtggtctgatttgccatattctgaaaaacacattaggtccaaaactgctttgggcactgaactcatctgcaaaagatagggcgctcagggatgtgctttatgaagagctgggaacgaaacaagcaagggaagtattagcaaatagattccctatgggaagtgcatcaagtatcatagatgaaatggtggtcaatcagggtggtgagcgtgattcagaagaagaatcacaaactatggcgatgaaactcgctaaagaaatcatttctgatgtgagaaggggattcagatga

SEQ ID NO: 119425 - DNA, 1209 bp, Enterobacter cloacae
atgataaaaatcggaaacgcaaaacggtcagtgatggccgtttcaattctggccttcagcgtacagtcagcatttgcctatacggtcaacgttaacagcagcattcccatctcaacgcaggttatgccggcgttgagcacagctaatggcctgttaggtaacatccaggccacgctgattaacattggtacggcaatcagccagcagggcgatcgccaggcagcattaatgcagcaggtggctgaaactaaccgacagttcgaagtcgagcaaaaacgtaatgaccggctgctgcaggcacaggataagtaccgtgttccggatgatatttgtgcgcagtctattggcggtggtgccgcgggggtatcctctgcggccgctggcggtcagcgaacgctgggaagcgccagttctgcgaaagatgtaaaggccatttttgaagtgccggcacgcgcaaccgacgtggacgcttcttcaacggccgaagttcacagccagtattgcgacagttcggattatgctgcatttggcgggacttcattctgcccaagtgtatctgacatgccgcgggcagatacgtcgctgagctcgttgctttatggcgccggcaaagaaggcaaggcacctgatctgacgtttacagatgagcagacagatgcggcgctgcgttatatgaaaaataccgcgttgcgcagtgctggtcgtcagctgagtcgtggggaagttaaaggcgccagcgggcgaatttacctgggcatgattcagcaataccaggcgctcaccgacgcggccgcacaacctcagatggaaatgatcgccaactccaaaccgaacccggccactgatgccgcgcttgcagatgcacgcaaagtgccggaagtcgaatcctatttccaggcgacggccagtaacagggcgaaacagcttaaccgtatgtctgccagagagtttgaggaattcgaagtaggtcgccgttacagcaaccctgcttaccaggcgacgttgaccaacaagaacaccgaagatttgatgcgtgagcaaatcaatatcgccaatctgaacaactggttagtgctgaaaaccaaacagcagctggagaaacaaaatgtgctgcttggccagatcctggcgaacgacgcatatcaaacatacaaaccgatgctggcagcacagctggagagtgtgaacgcgggagtatccagaaaatga

SEQ ID NO: 119426 - DNA, 651 bp, Enterobacter cloacae
atgaccgacgaaaataaaacaggggataaagacacagccaaatcagggaaattaaaaaaaggccttgatgttgtaacaggcgtcaatgacctcccggaagggaaggctaaacgaacgatatattatattacaggcatcagcgatatatattttattatcgcgtcagtaaagcaaacattcagcctgctctttcagcgggcttcattcgttaagaagcaaataaaaaaccttgatggcccacctgttgattctgatgcaaatcagccgttcgccgaagttatgaaacggagcaatagacctatttcagaattgttggataaggccagtttatacaagaaatactggctttgttgtttttttgcattagtcctcattctgctttttttaacgtctggttatgccagattgcttctaaatggctcaccgaacatgagcttgttaagagcaactctcacctgtggcgtcctgtttgctgcggggatctttgctttcattaaggctctcacatgtgagtttatggggtggcagttacgaaaccaggctcactctgatgcagagcaaggtacgttacgttatttccttaatgatgggggagtgcgtaatacatttaatttttcgcaggctggtcaagagcgggggccacatgagtaa

SEQ ID NO: 119427 - DNA, 2181 bp, Enterobacter cloacae
atgagtaaattaaaaaggttgcttctatctcttttcgttgtggcgtcgccttcatattcagcggatttggggattgatggcataactgaagcggctaaacgttcaggtgacctatcgcgtcaaatgttacataccgtatttggtgaggtagttaataatccgtttagcccttccggcgatggcttgcttaataacgttttcttcactgtcaacgaagttatagcgattcttgccctcgtctatatggggataatcagcattaagaaacttcaccaggcaggtcagttgggaagttttattgagggtgatggcaacaacgcattcaaaattgttaaaacgacttttgggtggttgttgcttgtacctaccgttgtcggttggtctgtggcacagctgctttttctatggtgcggttcaatcattggcgtaggatctgccaatgttattgcagacaaaactgcttcggaattagcgagtggtaaagctgtctatatagcccctgttatgccagaaatggcgtctgttgcaaaagggatgtttgaaacaaacctttgtgctttgggtgtaaatcaggggattgctcaaatggaggcttctggccaacattatgagaataacgccagaatgcaataccaaacaggtgatagcacatattcgatatctgtaaacaacggctcagctgtatgtgggaccgtttcgctgccacaacgtccagcaggatggacttctatcttcgctagcggttatgcggattccgtctacagcgttcagcaacaagcaacggacacgttgtggggaaaaatgaagactgctgcagaacagtttaatgcagcatatatggcaaaaatgcgttccggggacggtgagctgccagatgttgaaagcgcgatccagactgctgcgcgtgattatcagcttcaggttcaacatgctgctaattcagcagccggtgacgacgaaattgttcaaaaaatggagtcggatatcaaagagaaagggtggctatatcttggtgtgtactatcacacattagctactgcgaataccgagatgaaagatgttgctaacctgaagccggtagtttcaggaatgagtaacgatggcgatatcggctctatcgattactttaaaggcttgttccaggcttaccattctcagctgaaaaatagtaattatacgccgcctcttggcaccgaatctaacgcacttgcaaggaacattgatcaaaaaagccttgaaaatgccgccacaactggagacggaacgtcccttattacaaaaattttcgacttcaacgttacaaactggcttgcaacgagtaactacggcactggtgatggttacagtgacgtgaccaaccctttactcaaaatgaaagctatcggcgattacacgttaggtgtagctgaggttggactcgccagttggaccgctatcaatgttgcagtgaaggtttcagaagggaagagtctacccggttttgctgcgggaatgatgaacaaacttacagggattcgagatgctattgctggcgtattagaatcggtttcgttcttggtttacccgctgttttatagcctctttggtatcggtcttgcgctatctatctggctgccgtttataccgatgatttattggtttgtagctatggcagattggctggttacgcttatgacaggtgtattggcgtcttccctgtgggcagctacccatatcaacattggccagagtaatgatgagcggagtacatatggttatgtgttccttatcgatgtaatgattcggccgatgctcatggtaatggggtttatttttgcttcactggccatcgtagctttgggaacggcgttaaacatgatgtttaaattcgctatggaacaggtccagtctgactctttcactggcctgctgtcatcgatcggatttttgatgttatatgcaaggctttgcacaggtatggtggctcgcgtatttgcacttcctgcgaggatgccgaactatgttataaactggattggacagaagatgaacgattcagtgttgggtgatatgcagaaccatgttcatgacatctttgctgcgttcggtcgtggagccaaaaatatgaaccgtaacaaccctaagcaatttaatcctgacgcaggtgtagataagagcaaggacggcatcaaaggagcttaa

SEQ ID NO: 119428 - DNA, 654 bp, Enterobacter cloacae
atgaatgcgttatcaaacactgactttaagaaaattagtaacaatgcgcgtcctaaaaggcttggatactacgcatcatggctctggatgatgtttgtattcctctttctgttcgttagcgctttcgtgtttctgagcggcttatactggacgattagagacggttcaattcaggagcactggtttagtacagtcggtatctttgtgatcgattcagtgctgatctggatgttgaaaaaggacttcaggagccgcaagctctaccaggtaactgcttcaatgaaaaactctggtttctttgaacctcataaggactgcgagcactatgacttggcccggaggacttacataggctttgacttcagtactggaatcataggagtagcatccctgtatgccacatccagtattaaacgtgagcggctattttttgaagccgaaacagtcgagtcatgggagtcagtcggcagggagttaatcataaacctgcgaaatacggggcttacgacgataacgatcacagctccaaatatcaataaagcgtacagggatatggaaatcatctgcagaacgcataaaaatagggatgaaaactatcagcatctgaagagtaaactgacagacgctggatggttcataaacagcaattattga

SEQ ID NO: 119429 - DNA, 231 bp, Enterobacter cloacae; identical to SEQ ID NO: 25792

SEQ ID NO: 119430 - DNA, 1056 bp, Enterobacter cloacae
gtgaatcaaaagaatccatacctacagctttctgacattgagtcagtagaaggtctttcgccggagttcatctcctggctagaaagccaatcccctaaagaatcaccccagcagctgcctttaaatgaaggtgctgaaccagcgcgcaaaacccgccgtcgtcgcggtacgcactcaacggcgtgtctctgcccggaacccagctggtaccgaccggacaacttcaaaaagctccctggccagcttggccatgcctacaaccgccttgttcgccgcgatcgtaaaaccggcgcgttaagtctgcgtatgcggatcagccgccacccgtacttcgtgcagctgcgtgagcaggccggccggaagcgtgacttccgcccggagcgggagaatctgcttgatgccatcgtgccgcttatggtcagcaccgttgaccgggcaacccatatagacactatcaacctcagcaaaatggcgtggcagctcagcgaaaaagacagcgaagggaacgtgatccggaaggtgacggttccgcgggtttgccggctgctgcagcacatgatggagtacgggttactggtgctgcctgaaggtgtcacatgggacccgtttaaccgcaagtggttccccaagcatgtcgtgctgacggaacggctctggaagataatcggcgttgatctcgataaactgtatgcggagcaggccgaacaggtcgccgctgaagcggcaggatggataacccgcgatgagcatggccaggcggaagaaatctctgtcaaagcggcgcgccggcgctggtatgagaacatgatgcacgccacgctggttcgccggcgtgaagccgccctgaaggggaagcgcgagaagaagctgaaagcgctggcagaaaagccctttgacgaccgtgtatatgccatgtccgttcatctgatgcggacgctgccgaaagacgaactgcacgcgctgtcgcctgaacagttcacgcagcgcgtattcagccacctttatcagctcgatctggggctggagagggaagcaggcccccctgcttatcactga

SEQ ID NO: 119431 - DNA, 1095 bp, Enterobacter cloacae
atgaaaaataaaaaatacagctttgagcgcgatgacgaattattcatatctaaagacgttcaagctctaatcaacaacggtctggagtttctggatagggcacgcgaagagcttgaggcctccaagccaaaattttcgattgtcagtttctggacagctgtagagatcatgctgaaagtaccgctggtacacgaacactggagcctagtgtgctccgggaggaaaattgagcgagcaaaataccttgccggtgatttccagtcggtcacatacgatgaaacctgtcagcggctaggtgatgtacttcaaaatcccctaccgaaagaaaccatcgctgtattcaaaaaagttaaagaccaccgcaaccgtgtggttcatttttatcattccgacttcaccgacactcaagtgaagacaatccttgatgaacaggctgacgcttggtttgcactaaaccgttttatgcgtgatcagtggttctacctttttggagaacctctgaactcaaagctggcatcagatgaggaccgtatgctcaggagttcgttgttttatgcggatgcaaaatttcgttatctccagcccacactcgatgaactcagaaaacagggctgcacgatctcaacctgtcgtgcctgcagcaaaaaagctgccgttgacatgtctatcaatgaggagagcgggaacactcttcacgagacaaattgcttagtctgcggttgcagggctgatccttatgtcgaagttacatgccctggttgcggggtaaggcagaatctgaacgctaccggtgaaacggatttcaattgcagtaactgtaattactcctcatcccgatacgatttgctggatgagtgggttggcaaaccagaggattttagttattcgggtcttccagcaagttgttctgattgtgacagctatgagacggtatgtgagtacggaggtggatatctgtgcacgaactgccttgtttttcatgattcactcagtacttgcggctattgtggaggaagctctacatcagtcggtgaaatgagtgggctggttggctgcggattttgtgacggaaatactaagtaccttaatgactga

SEQ ID NO: 119432 - DNA, 1161 bp, Enterobacter cloacae
atgaaacgaagaactcggattaactacacgccagagcagaaggcaattatctgggacagatataagcaaggtgattctctacatgatatcgccagaatgttcgacagatatcattcttccattatgcccactatccaccagacaggcggctaccgtcctcccgtgcgaaaacggcaccgattagcgctttcgcttgatgaaagagaggagatatccagagggctggtagcaaaactcagcatcagggacatcgccgccaaattatcaagagcgccctcaacgattagccgcgaggtcaggaggcacagtggtgcaaaacaataccgagcagcaaaagccgatgctactgcgtgggaaaatgcgctgagaccaaaaccgtgcaagctaattgaaagccccgcattgtgtaaaatcattgcagagaagatgcatcaggactggtcgccggaacagatcgccggttggctgaaacgttgttatccggataatcaggaaatgcatgtgtcacacgaaacgatttataaaacgctttttatacaaacccggggagcattaaaaaaagagctgcagcaatgcctcagaagcggaagagcagtgcgtagatccagaacgtcatcgcttaaagggaaaggattagggtcaatcccgaacacgatacctatcagcgaaaggccaccagaggcggctgacagagccattccaggtcactgggaaggtgacttgattcagggctcgaaaaactcctatataatcaccctcgtagaacgtcattcccgttttgttatgctggcgaagatcagagacaacaagaccataacggttatatctgcactcatcagacaagcccgggaattacctgctgaactttataaaacattaacctgggaccggggcgctgaaatgaccagccacacccggtttactgtagccacagatattcaggtttacttctgcgatcctcaatccccctggcaacgtggctcaaatgaaaatacgaacagattgctcagacaatattttccaaaaggaactgacttatcggttcacagccagcaaagacttaacagtgttgccagacagctcaacgaaaggccgagaaaaacgctagactatgaatcacccgcagaacggttcaataagtgtgttgcgtccatcagttga

SEQ ID NO: 119433 - DNA, 279 bp, Enterobacter cloacae
gtgctcaagggattcgtggatctctgtggcgggagaactacggatgaattgcgggaaagtggcggggggaaatctcctattgatgctgttaaaggcttttttggtgtcaacgcaaagcagaagtgtcaccatcggtgcgaaacagagatgtcatgctttggttcagagaatgcgtttgaccgcctcgctatatacttccgagcgttctcttttcccaacagaaatcacgaaaacgacaactttctcgtctataacctggtatacaaggcgatagcctga

SEQ ID NO: 119434 - DNA, 1773 bp, Enterobacter cloacae
atgtcaaacattaacaacaaagcagcagaatgcatgttaccggaaggttttactgaagagaatggcatcgtgtatttttgccatgaagatgatgataagaagaaagttgtgtccagccatttgctgaaacccgtggcaaaggcctgcaatcgttcccgtaacggaaactggcacattgttctgaaatgcactaatcacagcggcgctgaagctgaaatgattatcagcctgaaaaaggtaaaaagaaatgctgactctgttattagtcagcttgcggggaagggcgtctttatccaggacagcaaattatttctgatgttcttggaaaagtcctgtgagctggatttacccgtttaccgcgttgcgattcgacccggtttccagcctgatgaactggtgttccagtttggtccgtatcccatttttgttgctgaacgtgaggggatccaggatgtgataccgaatgaagatatgacggtgaatcatgccatcgcagtctcgggttcgcttgaacagtggcaggaacagattgctcgaaaagtatgcggcatggcacccaaattgtccattctggtggggctgagttcgttccttcttcctttgcttggtgaaagtggtgccattttccacctgtgtggtgacagctcgacgggtaaaactgccgcgatccaggcaggtgccagcgtgaatggtctcgcagctgagcctggaagtggtagcccgacccagatccagcgctggaacagcacttctaacgggttggaattgctgatggtcatgaataacggaacgaccttatgcctggacgagcttggctccttcaccggtaaattttttgcagagacgctgtatgatatcgtttcaggtgttacgaagtccagaatggacggcgagacccttggaatggcgcggcaatccacatgggttcaaaacgtactgtctaccggtgagttgacgattgtagacagaatccgcctggaaaagtccccggtgatggatggtatgttacatcgtgccttgtctatccctgtcacagcggaggactcgcgaagcgagaatgaagacattgatgtagcccggcagcgaattagcgatataaagaccagtctgttgacctgccatggtagtgctggctatgagttcattcgctgcctcactggttttaccgatgaagacggaaagtattttgacttgaaagcgacctccgattttctgaaagcagacctggatgtcatgcttgatgagatgaaacggcgtttacatgcaggcctgattacccttaattctgttgagtgcagggcacttcagcgttttgcgatcctctaccttgcgggggcgctggcatcagagtggcagatcctgccgtggggaaaagatgagatcgctgatgtggtatatgaagccttcaaccgctggttgctgaactatcgttctgatgcgggccgtaagcagaacgtcctgattaccgttcagaacttcattgcagtgagccggtcaaaatttattgatgcgaaaataccctgttttgcgtcccgtaaaaccgatactgccggatatatcctgaatgacgggagctatttgatactgccggacacccttgagaaacttggcatgaactggggcttgtctgcgaaaaaactggcccgcttaattgacgaagaaggttatctgacccgaccggaaggcgatcgtctgacgacacgccggaccatacaaaaagtaaacgtgacggggtactgcttatccgccgaatttgccacagccagtttctga

SEQ ID NO: 119435 - DNA, 855 bp, Enterobacter cloacae
gtgaccctggctgaactctgccatatataccttcagtataccagggggtataaaaaatccagccatacggatagttctaaaatctcgaattatattgtgcctcagttaggtgacacagagattgaagatattacgaggctacagattcaaagctatattaatggtttgacgcaccttaaaagctcgacccttaatcgtcatattaatttactcaaggctatattctcgtttggctgtgaatatggttacatagataagtctcctgtggccggaatgcggacttataaagagccagcatcctttcgaaaaacgcttgagccagaggagttttcttctttaattcgagtgcttaaggaagaaatggttttagagccacgcgacactctgagtcttattatgcttctggctttcaccggtatgcgtctgggtgaagcacgggctggactgattgaggatataaactttaaacagagtacactctttttacgagacagtaaatccggtgactccaggttggtgccactttgtagcgaagctaaggaagttttacgtatgcagcagaataaatatggggcgacaggtttaatatttcgctcggttaatggaggaacggtcagtgagccacgcaggttaatggcaaaactctgtgagaaggcaggcattcgtaaatgcctcctccatgagctcagatatacagccggatcagctatgcttgctgcaaccaataatatatatgccgtcaaggtattcctggggcatcggaatataaaaacaacggaaaaatatgttgcattctttcgtggtcagcagcatgaagatattgaaaaggcgatggcgctgatgctgaaaggatag

SEQ ID NO: 119436 - DNA, 1221 bp, Enterobacter cloacae
atgagtaagaatataacggttaaaaacgttcttgaatggatgagttgtgatagagatatacagctttttgagggggtgacactgaaaaatctatggagagtattacatgctcaggaaaacgtatcctcattaaagaaagtcaagaaacgggattcagttcttagggtatttactgatgaaaaatgtttacgtactgttatgggattcatgaactcatttgattttgactcaaaaatgtcagaaaaacattatgggagaaattataacagaagccttctgggaagttactcaagactttatgattcaagcagtgctccggttgatgcatcatatgggcgatatattactgatatgatagaaatggtcgatgatgttatcagccagtttggcgagcatttagcacccgatatcactgattttggcagttatttatatatggattcattgtctttttttaatgacgcatgcatggataataaacagtactttgcattgcttcgttcagagtcttttaattcagtgagtctcctgaatggtgatttattgacgcagttatctaatcactttgaaagtggcattaaaaagttgatggatgaattctcttctgaagaaaagagtttgaagggcttttacttcctgaaatatctgcttcgcgagagtattgatgattcttcctatattgccatgaactacactgcgtctgagtatgatgaacctgtcaggtttagtgagcgaaaaattgcattcgatatggtctttgcatatgttttttttaaactaatgctcaaacagatttcgggtaacgaggcaatgaataacgttgatacccgtaagtatgagctttccagtccccttcagtatctgattgaagacgactttgatattccattttcgcgaatcattcgtttgcaaaaagagttaatggttaaagttatcatgtattgcattctgcttaatatgtcggcagggaaaaaaggttcttcaggcatgacggagatcattgagagaatgagtgcctacgccgaatggattgatacccacccgtcaagatttgaaagtaaaataattgatatggtcgaagcatacaaagtcaaaaaatgggggaaggttggcctgatggatatgctgtataagcattcagatctttatgaaaaaaatgtcatcaacatgaagaataagagagaggtaaaacgctttttcgacttcaggtatatgaagtaa

SEQ ID NO: 119437 - DNA, 435 bp, Enterobacter cloacae
atgaccccttgttcacccatgttgcatcagcccacacttgaccttcctctgagtgacgagtttatcgcgctgatagtcacccacctcgcggcactgcctgacacttgtcagaatgtcgtgctgaactttcttaacccggagtacagcgccgaaaacggtggctggcacccggtagaaattcgccttatccgcagcgagcagactgaaatatggcagctcgattacctaaccgactttagctggcagggccgcgcctggcctgagctggcgaaggaattcgatatcagctggtcgcagcgctatgcctggcactaccttatcggtgagttgccgctcaaccgtgagctaagtgaattctggacgctctggcaggacaattttgtggcgtactgcgcgatggatgtcttcaccgtcaccgtatccccggactgctga

SEQ ID NO: 119438 - DNA, 492 bp, Enterobacter cloacae
atgctgttcacgcttatttcccggctggtgatataccggcctctgttcagtctggcggaaagcttcaccgacaatgttattcgtgacactgtggatgaaccggcaagaggcggcatcgtctggtgtgaactggcaggcggctatgtcacccacagcggtatctacaccggcaataaccggattgtgcatctgtccggtgatggtgaagtgctgtgcagcgaccgcaaagggtttatggccagactgaatggcctgaaccctgccatgtcggtctataccgattgccagggacggttgcccgtgggaaatattgccgcagccggtcgggcattacgggcactgggctccagacggcggtatcacctgctgaaggaaaactgccaccgtttcactgcggagtgcctgaccggaagaccggataacgcagtggtcctgcatcgtcagcttaaacgactgcaacgcgggaatacctggcgcgtatgggaggactga

SEQ ID NO: 119439 - DNA, 219 bp, Enterobacter cloacae
atggcccgcgctgaaaaacttgctgaacgcctctgccactgcgtcattttactttgtcaggggaaaacactttccgtccgcgtgctcacacaactgtttggggtttcaccccgcacggcccgccgtgaccttgcgcgtatgggctgcattatggagcccgcttcacccggttgctggcgactctctgcaccacttcgacgtgccttcatccatcactga

SEQ ID NO: 119440 - DNA, 327 bp, Enterobacter cloacae
atgaacaagattttcactgcactgtttatctcacttatcccgcttgccagcgctcatgccggactggttcaggttgaaaaccgggtgagttgttatctggcactggacggcaacgaagggcttatgaagtccagtggaagtgacatcgcctttaccaaaagttggctgcataacgagctggcccgccacgacgttgaccaggagtccatcactgaaaacaccagtgcgctggagaatgaactgccccgtgcttatcagcaggccgctttcgcagataagtgtgtcacttattacagcaacgccgccaaccgcaaaggcgatgaatag

SEQ ID NO: 119441 - DNA, 447 bp, Enterobacter cloacae
atgaataatgaaacgactttaaacgacgataatgatgagaaaaacgcttttgagacgctcgcagtggacttactgagcgggttgctgggggcgcatgataatgcacaaaatgccgagctgaaagactggctggacagtcctttccccgttcagccaaaggttttactcaaacatgccgaatttatctgtgagcgatttcaggcgggggatgacagccacctgctgatgcacggcattgatgaacaacttgcggcgatgacactttcccgtaaggaacgcttcagcccaatgaataaagggatggttggatattctgctcctcgtgacctggcgaaagtgaatgcgctgctgaaggtcattatcacctggtacgagtgcgaaataatccagctaaaggtgaagtatggcgaaatcacgccaccgggaaaaaataaaccacaccagtga

SEQ ID NO: 119442 - DNA, 3078 bp, Enterobacter cloacae
atgtcaggaattctatttgtaaacataagcgatattcatgttaaagaatctaataaaaaaagagtattggaaaaattatcagcatttcaagactgcctaattggattaaaaatattaggaggttttgaaaaaataattttgcttgtatccggtgatttagccttcagtggtaaaaaagcagagtatgatatattaagcaatgtttttgaagatttagcaactagctatgatttaattatgtgtgcaggaaatcatgaccatgactttagctcatatactgataacaatgtaagaaatcatcttctcaaaatggattcatcacaacaaaacgaagaatcaattgcattcatcacgaagggtatggcagattattatgaatttgaaaaaaaatacgaaacaatatcatcaataaacacccctctgtctaaaacatatactctcacagcaaatacagaaacaattaacatctccacaattaatactgcatggtgctcacaaataaaagagcatggtggtgacatatttttcccacctcagtacttaccaacggttcaaaaagggaaattgaatataattttctttcatcatccactagcttggtttgaacctaataatcaaaaagaaatcagaaataatttacgaaccgaccattcaataatccttactggccatgaacatcttagcgataattttaaagtgattggagaaaccagtaattgcttaatgattgaagccatgccatttgatgacacaactattgaaacaaatggatttacgacctttgaaatttttgataacgacattttaatcaagaactaccattggaatggcagtagctttgaagaagctaaggaaatcagaaaaagtgatgttatgaaaggtaactcaatttcaacatcaatatactcagtgcaatatgatttctataaaagccttctagatataggtgtaaattttatacatcccgacaaagacattatagaccttaatgatgtttttgtttaccctaacctcaaaaaccttagcgctgaagacaagctagaaattaagaaaacatcatctgaaaccctatttaatagcgttcacgataaaatactacttataggtgatgagtattgcggaaaatcaactttaataaaaaaactctttgttgactctatttccaaaaatttcctgccacttttaatagaaggtggttctattcgtaatggaggaatagaatttgataaaataatcaatcgccatgtcatcaaacaatatgaaggaatcagtaaattagaatatgcctcctgctctctcacaaaagttctgctcttagatggatttgattttgtcaaaggagataaaaagtcaataagagcttttctcacaagcgccgagttgttatttgataaaataatagtcactgttagtgacacattcgactttggaggaagcgatatattaggggaaagttattttgatggcaaatatcaaaaatatgaaatcaacaaactaggttataagcagagatacgaactagttaataaatggaaccagctaaaagaagactgccaaaatgaaaaaagcgcattggtttataaaaataatgaagcggtcaaaaccataacaaaagttcttggcagaaattatatcccttccactcccttcttcttactaacattactccaatccatggagtctggtaatcctcttgaggtgagctctaatacatatggctattattaccaatatctcataacacaaagtttggggaattcatcagtaaaaaaagatgaacttgacgaactcttcaattatataaaagaacttgcccattattattgcaaaagtaatctcaaagatgaatcaaaaaccaacctgtgggatttcaataaatatttttgcgaagaatatggggttcagattgatttccacacaagatttgaacttttaaagaaagccaaaataatcgaagaaaaagatggtgggtattataaattcaaatatccttatgtatattatttctttattgcacaatatctttcggatactataaaatcagataacacaatacaaacaattgatgcactagttagctctttaaataagagaagaagcatgagcattttaatgttcttaactcaccactcccgtgacgagtctattttggaaaaggttgtaacacaatccaaaacattattcatcaaatcacacccaacaaaaatggaaatggatgctgatttcataaataagattgttgaaaaactaccagaactaccaataatctataaacaacagaatcggcttgactacagactggaacacgaagaagaaaaagatagaatagaagaggggcagtccagtagctttgaatcagtattaaactctgaagaagaggatgacgtcagttataatgcagcacaagcagaaaaggagaagagtgttattgaatcaagtgatttcataagagataccaaccttacatttaaatctctggaaatccttggacagctttctaggaattattatggttctttaaaagtaagtcaaaaaagaaagcttctagaagaggctatcaaaacaccattaagaactcttgattattacttttcaataatcgaggacaactctgacgctgcattagaattagttgaaaagaaaattcttgaaaaatatgatgggaaaattgattctacgacctcaaatgaggtaaaagaaactgccagaagattctttttcgaaatgatcgttagcttaagttattttttcattacaaagatatcatcttctattggcagcgcaaacttgcaaaatataattgatgaaatatgtgatgaaataggttcaaactcaggcaagttaataaaactggcaactctcttagaattgggtaactcagtatccgtagaagacttcagacgtttcttttcaacaatggaaaaaaatcatctatcggatagattattaaaggcaattgttgtcaattatctgtatatgtttgagcgctccgatagcgaaacacagcagatatgccatatcacaggtatcaactacaggtctatatccaaacagataggctttgatagaatcatttaa

SEQ ID NO: 119443 - DNA, 852 bp, Enterobacter cloacae
atgaaattattcgataccgataactacagacttattctctggcgtaaatttctgccgtggctgatccagaacggtgcgcaaaaaaacaacccgcatgactattttctggtgtacttaaaagatgccgacaatacgcgttatattctgaagaagcacgaaagcagcaacgttgtgctctgcccgatgcataaaagcgaagatgtcagtatgagcgtggaagatatcagcgaaatgcaggctgaaatcattcactataagcgcaatgggtttcaggcttacaaaggcattatcccgtttgcctttgaccattatacgaaaatcatcaccttaaaaacggcccttgctcgtctaaaagggcgctgtatttctggcctgaaatctgattcagaaaccatcagccgggaccgttacaacttgctcaggctgctggtgaccgactacgtcaaccagcgcccttcgcgcgtttcgtctggtttcacccagcgggaagtgatcgccatgctttacggcacactttggtataaacatatcaaaaatgagtcgtttagcagaaaaatcgcgctcttacttgagtcgctcgtgatcacgggcgatctcagcgaagagagtaaggtgtactacgtgcagggccaggctattaccaccatggtcgagtatgaaaaagaggaccagcgggtaacgcatcagcaaaaaatgcagaaaaaaattacgcgttttatgtttgcgataacgctatctacgctgctgattattctggttctgctgtcgatggccggggtcgtcgacctcgccgctgtatggcagaaaatactacagattaagcctctcagatttttaatgaattttatctaa

SEQ ID NO: 119444 - DNA, 1002 bp, Enterobacter cloacae
atgtcttacgctattcacaaccaaaatatggcttttaacgacagcgccatcgcgcaatatatgaataccgattttatcgttattgatatttcattatgcgtggctctggcacgcgagcagttctttgaaaaattaaaagatgatgatattccgtcacatatttttatcgaagacaacggtcgcctcgcgggtttgattgccgtacgtaaattattgcaggccacggataccgtacagcccgttaaaggtctgatgatatcggattttatccagcttaaaccggaagatgagcgggcggatgtcgccgggttgctggcgcacgcaggtgcggatgtcgtaccggtggtgacccacggcaagctggtgggctgccttaccgagcgtgaaatcgcccatctgctggaagatgacgttactgaagatgcccagcttcagggggcaacgctgccgctggagaagccctatctggaaaccagcgcctttagcctgtggaagaaacgctccgtctggctgctgctgctgtttgtcgcggaagcgtataccagctcggtgatccagcattttgaagaggcgctggaatccgccattgcgctggcgttctttattccgctgctgattggcactggcggaaacagcgggacgcagattacctcgacgctggtgcgcgccatggcgctgggtgaagtccaccttcgcgacgtgggtcgcgtgctgcgcaaagagatgagcacctcgttaatgattgccgccacgctgggcctggcgggctgcgttcgtgcctggatgatgggcattgggatggaaatcacgcttatcgtcagcctgacgctggtctgcattacgctgtggagcgccattgtctcatcggtgatcccgatggtattgaaacgttgcaaaatcgacccggcggtcgtttccgcgccgtttatcgccacgctgatcgacggtaccgggctcattatctacttcaaaatcgcacagtatacgctggggctggaataa

SEQ ID NO: 119445 - DNA, 501 bp, Enterobacter cloacae
atggcatggctggacacgctgctggatcattttgcgcattatccaacgcatctcttcgcgttgctcgttgttatggcactgagtaaatcaacggtactgatctcttccgtgctcccgcccgcatcggtcatgctgctggcggggattgccgtcagccagtcgagtatgcatccggcgctgacgtggctggcggtggtgatgggcgctacggcaggatcggtgctgaattaccatatcggccagctgatggggcatacccggcgagtgtcacgcttcacggcaaaacatgccgggaagtttttgcgggtacagcgccagctgcataaaaatggcctgctggtgttgttcacctcgcgtttcctggcggtactgcgctatatcgtgccgctggcggcgggcatgctcaggctgagcgcgataaaggtttacgccatcagcctgctttcagcctgcgcatgggcggcgctgtatgtcggcatcgtcaccggcatcagcctctga

SEQ ID NO: 119446 - DNA, 921 bp, Enterobacter cloacae
atgtccgtttcccgttttactttctccattaagcctcaggaagccatcctgattttgatcaccatgttctggggcggaacctttcttgccgttcagtacgcggtcacgatgagcgatccgtttttctttgtagggctgcgctttgcaaccgcggcggttgccgtggcgcttatttcgctgaaaaccctgcgcgggttgaccctgagagagcttaaagcgggtgtcgctattggcgtggcgattgccatgggctatagcctgcaaacgtgggggcttcagtctatctccagcagtaaatccgctttcatcaccgccatgtacgtaccgctggtgccgctgttgcagtggctgtgcctgggcagaataccgggcctgatgtcgtgcattggtatcgtgctggcgttcatcggcctcattttattagccgggccgggaaataatctgctggcgctggggccgggagagatcatcacgctggtgggggccgttgccattgcggcagaaattattttgattagcgcctgggcaggaaaagtggacgtcaagcgggtgacggtcgtgcagcttgccaccgcgtcgctggtggcgttcgcgacgatggtgccggcaggggagtccgtcccgccgatgtctaccgggcttatcgtcgtggcgctggggctgggcgtttttagcgccattattcaggtcaccatgaactgggcgcagcgcagcgtatctccgacacgggcgacggtcatctataccggtgaaccggtgtgggcgggtattttcgggcgactcgccggggagcgtctgccgctgctggcgctggtgggcgcggcatttattgtcgccggggtgctggtgagcgagttaaagttaaaaaaacgacgtaaggcgactgccgggttgggcactgaacaaggggcagatagctaa

SEQ ID NO: 119447 - DNA, 1092 bp, Enterobacter cloacae
atgaaaattggcgtatttgtaccgatcggcaacaacggctggcttatctcgaccacggccccgcaatacatgccgacctttgagctgaataaagccatcgtgcagaaagcggagcattaccacttcgactttgcgctctcgatgatcaagctgcgcggtttcggcggtaagaccgaattctgggaccacaacctggagtcctttaccctgatggcgggcctggcggcggtaacctcgcgcatccagatttacgccaccgccgccacccttacccttcccccggcaatcgtggcgcggatggcctccaccatcgactccatctccggcgggcgctttggcgtcaacctggtcaccggctggcaaaagccggagtacgagcagatggggatctggccgggtgacgattacttctcccgtcgctacgactacctgactgaatacgtgcaggtgctgcgcgatctgtggggcaccggcaaaagcgatttcaaaggcgacttcttcaccatgaacgactgccgcgtcagcccccagccgtcggtgccgatgaaggtgatttgcgccgggcagagcgacgcggggatggaattctccgccaaatacgccgacttcaacttctgcttcggcaaaggcgttaacacccctgccgccttcgcgcccaccgcggcacgcatgaaagcggccgccgacaaaatcgggcgcgacgtgggctcctacgtgctgtttatggtgattgccgacgaaaccgacgacgccgcgcgcgccaaatgggaacgatacaaggacggcgccgacgaggaagccctgagctggctgaccgagcagagccagaaggatacccgctccggcgcggacaccaacgttcgccagatggccgacccgacgtctgccgttaatatcaacatgggcaccctggttggctcgtatgccagcgtcgccagaatgctcgacgaagtggctgccgtgcccggcgccgaaggcgtgctgctgaccttcgatgattttctcaccggcgtggaaaccttcggcgagcgtattcagccgctgatgcagtgccgcgcccacatccctgccgtgacgaaggaggtggcgtaa

SEQ ID NO: 119448 - DNA, 531 bp, Enterobacter cloacae
gtgctcctgcattccgctggcgcaaccctcagtccttacacctcagatacctgggcgttgattgaagccagaggagccgaaggtgcccgggtttcctcttaccctggtatccgcattgataatgccggttatgccgcagtgccttatctgaatgcatatgaactgaatgaagtggccatcgatccaaaggatgcgacaaacaatgtcggttttgagagcacgtcacgtaaggtggccccctacgccggtgctattgtaaaggttaaatataatacgcaaacaggggtccccgtactgatttctgcccgatggaaaggagaaccagtccccttcggcgctgatgtcagcagtgagaagggtaattatattgcgatcgtcggccaggccgggcagatatttgttcgccttgagccaggcactcatattctcaaactgaaggccggtaatcagggggagtgcaaaatgaaagtcatcgtttccgaagaagattcagcaattaatatgaagaaagaggtcctggaatgttactga

SEQ ID NO: 119449 - DNA, 1110 bp, Enterobacter cloacae
atgttactgaatgcggtagggtttctgtcacgcagtagcattaaaatgctactcgctattttaatgttcatcatggtgcatttcccgtcggtggccttggcagcgcctgtttgtgatgacacgaatattggccacatagagatagtattgcctggtagtatttcacccggagtggatttgccgccgttgacccctgtgatatataattatgccaatttggttaataattatgacacttataattgtcatgtaaccagtggagaccaagaagtttattttctatatgtttttctagagccattgagttcatatggtagctcttattttttaaattccgggacttcagggttttacagtgtcgttgcattgaatgctccggcatttggggttggattcatgaatcctctcgcttcaccaccagggatggcggtgactacaattaataaagtaatcatttccgataccggtgtaaccgctggctatgctttgggtgcgtattctatagtattagttaacaactccttattacagccaggatttttatcggggaatgacctgcctaccttcggcatatatggcatgatttataagaataatggaaccccctataacggaaagaaaataacgatgggatctgtatcttttagcggctcagtgaatattattccgtttacatgccagacacctgatgtggccgtgccgatgggaaactataaaacgacagatttcaccggtgtgggaagtaccagccaatgggtggatttcaacattgaattagataactgcccggggaattatccaggatattttcaggcaaaaaaccaaatgagtttattgattaatcccgtttatggcaatccgacccctgattcattcagtctcaaagcaggtactggcagcgcaacggggatagatatgcagatccgaaagcaaaatgataacagcttgataacaatgggaacaggttttgaccctctgggccccgtaaccgggaatacgggagttacgcaattacgcatccctctgcaggccagatatatacagtcaggcgggcaggtgactcctggtttggcggagtcagcgctaacgttcacaataaattattattag

SEQ ID NO: 119450 - DNA, 204 bp, Enterobacter cloacae
atgaccaggcaggaatggcttttgcaactaagacgatgtacttcaaaagatacgttagaaaaagtgatagataaaaacacctattctctttccagtgatgagctggagacatttaactctgcggtcgatcatcgactggccgaactgacaatggggaaactttacgacaaggtacctccggacgtgtggaaatttgtgaaataa

SEQ ID NO: 119451 - DNA, 495 bp, Enterobacter cloacae
atgatcaataaaatactggtaagtgcatgcctgacgggactcaaagtacgttatgacggaagcgagaaagcacagatgtcagatcagttgcagcgctggcagaaagaaggacgccttgtgatcttctgtccagaactggccgccggtttatcagtgccccgtcctccggctgaaattatttctgctgaaattaaagatacattgctggcgcaggtcagaataattgaaattaatgggcaggatgtcactgaacaatatcagctcgccgccagattagcgcttcgtaccgctcaggagtcagattgtaccgcggcgctattaaccgacgacagcccaacatgcggtagtcaatttatctatgacggttcattcagcggccagcgtaagtcaggaatgggtgtcgctgcatcgctactctccaaacatggtatagccgtagtttctgagaagaggctcgccgatttgattgcctggattgatgaaaaagaaaagtga

SEQ ID NO: 119452 - DNA, 1938 bp, Enterobacter cloacae
atgaacaggatactggttggtatcattttttctctttttatcaccactggatatattgcttttcttgtttacgatcgacagcaggagctccaaaaactgactcattacacggagtcatggtctgtcgcccaactggtatccgaatattaccgctttgaatcatggcttggtctgtacgcaaccgattccgatgacgttacgatagaccaggtcaggatgcggctggaaattatgctaagccagaatgatctgtttaaggagggggatttagggcattacattaaaaacgttcaggcacatcatgacctcgcgttaagccttgataaaatccttacgtatctggatgctaacctcgaaaaaatgagccattcggatgtaaaaacataccttcataccatgcatttgctggatgctccactcagtcagctttcatcaagcgcgttaacgaaagacattagcacgattaacagtagcaaccataaaatacagatcctgtattatatttactcagccctctctttactgctgatcattctgagtattatcctgggttttttaacgatctatcaaaataaaaacatccttaaagcgcacaggcaggttgaaagtcttgcagaagaactccagttatccaaggagaccctacagattcagaattcaaaactagagtatgacgtttaccatgattccctcactggcatgaaaaaccgtctgtacttctgggatgagctcagcaaactcaatcttgaggccgaagaaaatcatgttcccgttacggtaatgttatttgatttagaccgattcaaagaggtcaacgatacctatggtcatgatgctggcgatttactgttacgtcaggtatccaggcgattgaccgccatgagcaatatttcagacagattttaccgtttaggcggagacgagtttgcttttttagccagcgggttaaacgaaagcgaagccgttttgcgcgctagagaaatcagcgagaatatcagtaaaccctatacgattaataaccagcttataaaaattgccacctgcgtgggtattgttttatcagataatgaacgacgtgctgattatctttataagttcgccgatctggcgctctatgaagccaaaaaggcaggctcacagcagattaaagttttccgtcagcgaatgcttcagaagttgcaggagagcagaacgcttgaaaatgatatggcaagggcgatagaaaacaatgaatttattgtttattaccagcctattgtgaattccgtcagcaaggaaatttacggctatgaagcgcttattcgctggatgcaccccgtcaagggaatgctttccccggatagctttattttcgccgctgaaaaaacaggcatgatcaacgagataggtaaaaccgtacttaaactggcctgtagggaagcggtctcctgggctgttccggccaggatctccgtaaacgtctcgcctgttcaattaggcagtaaatcatttattaatacggtgcagaccgttctggctgagaccgggctcccggctaaccgtcttgagttagaggtcacggagtcatccctctttagtgacagaaataaccccattgcgattctgaaaaaactccgcgcactgggcgtaagaatttccattgatgattttggcacgggttattcgtcgctctccagactaagcgaactgaattttgataaaatcaagatcgataaatcttttgtcaatccgatatctacacaagaagatgcgcttaatattgtgaagcttattaccggtatggctaagagccttaatatgggcgttatagccgagggcgttgagaccgaagagcagcttgagcggcttcaggctctgggttgtgagcttgtgcagggatatcttttcagcaaaccacagcctcaggtcgacagcaaaattaagagcggcctggaatga

SEQ ID NO: 119453 - DNA, 510 bp, Enterobacter cloacae
atgaaaaaagatagctatgcctttttaattccactcatcgttggcgggttaacgttgatatttggctttgttgtctggtcaatcgagatttatcgcgtgacatttcttacggccctgggggaacagtatcttgcggctgtctcattgttgctgccgctggtggcgatggtgatgttcgccgcgaagagggcgtttaaagacaaaacccttgttgacgttgtcaaactttacctcggcctcatcatcttcagcctgccggttgccatttttgtcatctttaccgcggcctggctactgaacggagaatactctgcctggagccaaccttaccggtatgaatccggcagcagaaatagctgttcgggggcggaagtctatgagccggaactcaagagagagatccgcatctgttatcctcagggatattatttaatcgatggcaccctgtacgtggaaaagcggagtaattcgctgggtatggtggtgctttgggcgatcgcgcgatcctga

SEQ ID NO: 119454 - DNA, 963 bp, Enterobacter cloacae
atggcaatttcatcgcgaatcacgttacttggtgcactggcgctgtgggtatttcaggcgcaggcggtggacgtcaccgtggcgtatcagacttctgcggaaccggcgaaagtcgcgcaggcggataacaccttcgccaaagcgagcggggcgaacgtcgactggcgcaagttcgacagcggcgcggcaattgtgcgggcgttagcctcgggcgacgtgcagattggcaacctgggttccagcccgctggccgttgccgccagccagcaggtgccgattgaagtcttcctgctggcatcgcagctcggaaattccgaagcgctggtggtgaagaaaagcatcacgaaacccgaagatttgattggcaaacgcatcgcggtgccgtttatctccaccacgcattacagcctgctggcagcgctgaaacactggggcattaagccgggccaggtgcagatcatcaacctgcaacctccagcgattattgccgcctggcagcgtggcgacattgacggagcatacgtctgggcgcccgccgtcaacgagctggaaaaagacggcaccgtgctgaccgactccgaaaaagtggggcaatggggggcgccaacacttgatgtctgggtcgttcgtaaggactttgccgaaaaacaccctgaagtggtgaaagccttcgccaaaagcgccatcgaggcccagcagccttacatcagcaacccggatgaatggctgaaacagcccgccaacctggagaaactctcacgtctgagcggcgtgccggaagctgacgtgccggggctggtgaaaggcaacacctatctgacacctgcgcagcaggtccagcagctgaacgggccggtgagcaaagcgattgtcgacactgcgacgttcctgaaagagcagggcaaagtgcctgcggtggcagcggattacagccggttcgtgaccgaccgctttgtgaaataa

SEQ ID NO: 119455 - DNA, 1725 bp, Enterobacter cloacae
atgtttagtctcgacagcgttcttgatgacctttggcctcaggcgaggcccgcaccctggcaaaaaagtctgttaaaaagactgctccacgaagacgaatttcagcagtttgccgccagccaccgtcacctgaaagggctggatatggtagagcaggttctggaacaccttgatattctctgcaccatttccgcccgagacctcgaacaaatccccgaacacggcccactcattgtgatagcgaaccacccgacgggcaccctggatgggctggcgctactgtatgccgtttcgcgcgtgcgccgggacgtcaaggttgtcaccaaccggatgctgtctcaccttgagcccctcagctcgttgtttatccccgtggacaatatgggcggcagaaccgcaaaatcatctctggtgcagatggagcagcacctgcaaaacgccggcgtgctgatcttcttcccggcgggcgaagtctcccgcccaacgcgtaaaggcatccgcgataaaaagtggcatccgggctttatcaagctggccagcaaactacgggtaccgctgctaccggtacatattcaggcccacaacagcctgctgttttatgccagcaccctggtatcgccgacggtatccctgctgctgctgatgcaacagatgtttcgccgccgccacagccagctgccgatcaaaatcggccagcagattgcctggaatgatcggtttagctctaccctttcatcgcgtgagatggccgagcagtgccgtcagcacgtgatacgacttggcaagggattgcctggcgtctttaaaacccagtgcgccattgcccgcccggaagacagggccacgctgaagcgggagctggcgcaggccgaatgtctgggcaaaaccagcgatggtaaaaccatctatttgtggcagcgcaacgggcaggaagaggcgcctctgctgcgcgagctggggcgactgcgcgagattgcctttcgcgccgtggaggaaggcagcggaaagcgccgggataccgacagctacgatgatgactatctgcaccttattctgtgggatgatgatgacctcgagattgtcggcgcgtaccgctttatgccaacggccatgcaggtggaaaagtgcggcgtcgagggattgtacagttacagcctgttccactacgacgaaaaaatgcaggacatactggagcacggcattgagctggggcgcagctttatacagccgcgctactggggacgtcgcggtctggactacctgtggtcaggcattggcgcctatctggcgcgctatccacattaccgttacctgtttggtccggtgtccatctccggcggcttaccgcctgccgcccgggatctgctggtcgcgttttatcgtctctggtttccggccagccacccgttagccgcctcgcgtcaaccctacccggcgtcactcccggacgtgctggcgcaatttagcggggtggattacgtggatgacctgacaaagctcaaatccctgctcggcaatctgggctgcggtattccgccgctttataaacaatattccgagctatgcgagccaggcggcgtgcagtttatcgatttcggcagcgatccggcgttcaataactgtatcgacgggctggtgctggtggatctgtgttatctgaagacgaaccgctatcagcggtatatagaggcgcacttaataccctcacccctgccctctccctaa

SEQ ID NO: 119456 - DNA, 534 bp, Enterobacter cloacae
atgtctgaaaagcgtgtggttttggtggttgatatacagaatggggtgtttaagacgccgcgccatcagagtgagaaatgtgtctcactgatcaatcagcttacccaggctgctgaggccgttattttcatacagcatactgaagctggcgggctagaggaggggagcgaagggtttgcattgctgcccgatctcaaccagccggcaggggcgttttacgtcacgaagaccgcttgcgatgccttctatgacacttcgctcgaggcactgttgcgcgaacaggagatcgatgaatttattatctgcggctgcgcgacggattattgtgtcgatgccacctttaaaaacggtgtcagccggggctaccacatcacggttgcggaggatgcccacaccacggccaatcgtccagcggccgatgcccaggttctgatcgcgcactataacgatgtctggcgtaacttcatcgcccctgccaacccgccttcggtgaaacgcaccgaaacaattcttgaaaactggaaagcgaactaa

SEQ ID NO: 119457 - DNA, 525 bp, Enterobacter cloacae
atgaacccacccatctttttagttggccctcgcggctgtgggaaaaccaccgttggtctggagctggcgcgtctgtgccagagtcagtttgtcgatactgaccactggctccaggagaatgccggtaagaccatcgccgatatcgtggagaatgaggggtgggagagctttcgtgcgcgcgaaacggccacgctggaagcggtgaccgcgccgtcgaccgtgattgcgaccggtggaggcattattctggcgccgtataaccgccagtttatgcgcgaaaagggtgtcgtaatctacctctgtgccccggtttctacgctggtggggcggctggaggcgtttccggaagaagggcagcgcccggcgctgaccgcgaaaccgctgagtgaagaggtcagcgaggtcctcgccgaacgcgatgcactgtaccgcgaggcggcacaccacgttgtggatgcgtcggcgtcacccgagaaagttgcgattcagattattaccgccctgcgtttggcttgcgccagctga

SEQ ID NO: 119458 - DNA, 906 bp, Enterobacter cloacae
gtgcgtattgggattgatttgggcggcaccaaaacagaagttattgcgttgagcgagcagggggagcaactgtttcgccaccgtctgcctacgccgcgcgatgattatcaccagaccatagagacgattgcccgtctggtcgatatggcagagcaggcaacgggcgagacgggcacggtcgggatggggatccccggctccatttcgccgtataccggcgtggtgaaaaatgccaactctacctggctcaacggtcagccgtttgataaagacttaagccagcgtctgaaccgggaagtgcgtctggcaaatgacgctaactgcctggcggtctctgaggccgtagatggcgcagcggctggcgcgcagaccgtatttgcggtcattatcggtaccggctgcggggcgggcgtggccttcggtgggcgctcgcatattggcggcaacggcaccgcaggtgagtgggggcacaacccgttaccgtggatggacgaagatgaactcaaataccgtgccgaggtgccgtgctactgtggcaagcagggctgtattgagacttttatttccggcacggggtttgccaccgattatcatcgtctgagcggccagccgctgaaaggcaacgagattatgcgtctggttgaggaacaggatccggtggctgaactggcgctcagccgctacgaaatgcggttggctaaatcactggcgcatgtgatcaatatcctcgatccggacgtgattgtgctgggcggcggcatgagcaacgttgaccggctgtacgcgacggtgccaacgctggtgaaacagtgggtatttgggggcgaatgcgaaacgccgatccgcaaagccgtccatggagattccagcggtgtgcgcggcgcggcgtggctctggccggaataa

SEQ ID NO: 119459 - DNA, 1296 bp, Enterobacter cloacae
gtgctggaacgtctgtcatggaaaaggctcgtctttgaactgatcttatgctgtattccggccctcattctgggggctatttttggctatctgccgtggtttttactggtggccgtgacggggttgctcgtctggcatttctggaatttactgcgtctttcctggtggctgtgggtcgacagaagtatgacacccccgccgggaagcgggagctgggaaccgctactctacggcctgcaccagatgcagatgcgtaataaaaagcgccgtcgtgagctgggaagcctgataaaacgctttcgcagcggcgcggagtcgctgccggacgcagtgatcctgacgacggaagaagggaccatcttctggtgcaatggcctcgcacagcagctgttgggcctgcgctggccggatgataacggtcagaacatcctcaaccttctgcgctatcccgagttcacgctgtatctgaaaacgcgtgattttagtcgtccgcacaatctgaagctcaataacggtcgccatcttgaaattcgcgtgatgccctacagcgatcggcagtggctgatggtggcgcgggatgtcacccagatgcatcagcttgagggcgcaagacgtaacttctttgccaacgtcagccacgagctgcgtacgccgttgacggtgcttcagggctatctggagatgatgcaggagcaaacgcttgagggggcgccgcgtgagaaagcgctgcataccatgcgggaacagacgttccgcatggaagggctggtcaaacagctactaacgctttcaaaaattgaggctgccccgtcgctggcgctaaacgacatcattgatgtgccgatgatgttgcgggtggtggagcgcgaagcccaaacgctgagccataatcaacacaccctgagttttgatgttgataacacgctgaaagtgctcggcagtgaagatgagctgcgaagcgctatctcaaacctggtctataacgccgtgaatcataccccgacagggacgcatatcgcggtgcggtggcagcatactccggcaggggctgagtttagcgtcgaggacaacgggccggggattgggcctgaacacctcccgcgcctcaccgaacggttctaccgggtggataaggcgcgctcgcggcagaccggcgggagcggactggggctggcaattgtgaagcatgccgtcagccaccacgaaagccggctcaatatcgaaagcaccctgggtaagggcacgcgctttagcttcgtgattccggaacgattaattgccaaaaaaagtgcctga

SEQ ID NO: 119460 - DNA, 255 bp, Enterobacter cloacae
atgcttaacacacccgcgccacgcgctggctctcgacagacttacgtcgaagtgagcacgccgaacgtctatctcgaccagatcgaatatttctgccactacttcagccgccgcagcgacgtctgtaacagcgtgcatccgcaaaacgatcgcgataccggcgtcgccagcgcggagctggccgtggttgtcgtcatcagtattgtaggcccggtcagcgaagggtatgaaccggaaacatgggtaacactttag

SEQ ID NO: 119461 - DNA, 1173 bp, Enterobacter cloacae
atgagcgcaaatgcggagaacacccccccgcagcaaccggtcaacaagaagggcaaacgtaagagcgcccttattctgctgaccttgctctttattattattgccgtggcatatgggatctattggtttttagtcttgcgtcatgttgaagagacagacgatgcatacgtggcagggaatcaggttcaaatcatggcgcaggtgtcaggcagcgtgacgaaagtctgggctgacaacaccgactttgtgaaaaaaggggatgtgctggtcacgctcgacccgaccgacgcccaacaggcgtttgaaaaagcacagacggcgctggcctccagcgttcgccagacccgccagctgatgatcaacagcaaacagcttcaggccaatatcgacgtgcagaaaacggccctggcccaggcgcagagcgacctcaagcgtcgtgttcctctcggcaccgccaacctgattggccgtgaagagttgcagcacgcccgcgatgcggtggcgagcgcacaggcgcagctggacgtggcgatccaacagtacaacgccaaccaggcgatggtgctgggcacctctctggaaaaccagccggcggtgaaacaggcggcgaccgaagtgcgtaacgcatggcttgccctgcaacgtaccaaaatcgtcagcccgatgaccggttacgtttcccgtcgttccgtgcagccgggtgcgcaaattagcaccaccacgccgctgatggcggtcgttccggcgaacaacctgtgggtggacgcgaacttcaaagagacccagctggcgcatatgcgtatcggccagaccgcaaccgtggtcagcgatatctacggtgatgacgtgaagtacaccggtaaagtagtcggtctggacatggggaccggcagcgcgttcagcctgctgcctgcacagaacgccaccggcaactggatcaaagtggtacagcgcttgcctgtacgtatcgagctggatcctaagcagctggcagaccatccgctgcgaattggcctttccacgctggtgacggtcgataccgccaaccgcgacggtcagatcctcgcaagccaggtgcgcagcacgccagcttatgaaagtaacgcccgtgaaattagcctcgatccggtcaataagctgatcgatgacatcgttaaggcaaacgccggttaa

SEQ ID NO: 119462 - DNA, 201 bp, Enterobacter cloacae
atggcaattaaattagaagtgaaaaatctttataaagtatttggcgagcacccgcagcgtgctttcaaatatattgagaaaggcctttcgaaagagcaaattctggaaaaaaccgggctatcgcttggcgttaaagacgccagtctggccattgaagaaggcgggattttttgtcatcatgggattatccggttcgggtaa

SEQ ID NO: 119463 - DNA, 519 bp, Enterobacter cloacae
atgtctcttcctcttatttcgccgcagcaggcaaacgcgcttattgctgaaggcgccaaacttatcgatattcgcgaccccgacgagtatgcccgcgagcatattccagcggcgcactccattccgctggattcgttacccggcgggcttaacgcagcgccgggagaaacggtgattttccactgtcagtctggcgcaagaaccgcaaacaatgatgctcgtcttgcccgggcagcgtcccctgcgaacgcctttgtggttgagggaggcattcagggctggaagcaggccggtctgctgaccgttgaagataaatcgcagccgcttccgctgatgcgtcaggtgcagatcgccgccgggctgctgattctctgcggcgtggtgctgggttacagcgtctccagcggctttttcctgctaagcggttttgtgggcgccgggctgctgttcgccggagtgacaggtttttgcggtatggcgcgactgctgaaagtgatgccgtggaaccgacgtacctga

SEQ ID NO: 119464 - DNA, 420 bp, Enterobacter cloacae
atgaccatcattacatccctgataaaccagcccgacaacaccgcgcagcgcgagcaaatggcctgtctgttaacccgcttattcaatggcaatgtagatccggcagaggtgtttacgcccgactaccagcaggttacggacggtcacatgcttgattatcagggatttatgaaacacctgaaccatgtgcgtgcgcagatccgcgagattacgtttaccgtggaagcgttatgttgccataacgaatgtgtggcagaccggcacagagtggccgtgacatatccggatggtcgccaggcagaattagaggtgtatatgtttgccacgctgcgcgaggggaaaatttgtcggatccatgaagtcacacaggcgccagacgacgatgcatttgaccgcaccctcgcccacgccatgcaataa

SEQ ID NO: 119465 - DNA, 726 bp, Enterobacter cloacae
atgctgacaactgagaggcttgttcatcccggcggctatcacaccccgtggcacagccatcatgccggccagctctggcgcattgctgcggggctgctggtgattgagacgccgctggggcgttcggtggtacccgcaaaacatatcggctggatcccgcctggtcagcagcacgctgccttttcggaaagtgcgattgaaggttgtgctgtctatcttgaccctgcccattgtgaagggcttccggaagaggccacgcttttcgagtcggacgattttaccgatgcactgttttcccgtttaagcgttgccgggagtgaatacgatccccgaaagctcatcctgctgctggaggagttggctctggcgtctcaggtccgcttttatctgcccgtaccgaccgatccccggctgaaaaatgtggtcaggaaactgctgcaatccgtcgatgataatcagacggtggaaagccatgccagccgtgccgggatgagcgtacgtacattcaaccggcggtttagcgcggagacggggatgaacttcgtcaactggcgccagctggcgcgcgtcatgcaggcgatggagtggctggcggcggggaagccggtggggtggattgcgctctcgtgcggatacagcagcgtcagcgcatttattgaagttttcagaacgtggaccggtaaaacgccggggcagtgggcgattaaagaaggcccttttgcgtaa

SEQ ID NO: 119466 - DNA, 426 bp, Enterobacter cloacae
atgcgccaacgaaccattgtctgccccatcatccagaatgacggagcctacctgctatgtaaaatggccgacgatcgcggtgtattccccggtcagtgggcactctgcggtggtggaatggaaccaggcgaaaccatggaacaggcgctgcgccgtgaagtccgtgaggagctgggcgacgcgctggacattatcgacgtcaagccctgggcttttcgcgatgacatcagggtcaaaacttacgccgagggtaccaccgaggaaatttatatgatttatctgatcttcgactgcatcagcgccaatcgggatgttacgtttaacgacgagtttcaggagatcgcctgggtttatccggaatcgttaagagagctggatctcaacgaggccacgcgcattacctttacgcaaaagggccttctttaa

SEQ ID NO: 119467 - DNA, 1200 bp, Enterobacter cloacae
atgaaaatcaatcagcgtgacgttgccgcagtagaagatctggataacgcgctcgactccgagagcggttataccggcgcccggcgcatcgttttcttctccctgctgatgtttgtggtgctcggcgtctgggcgtggttcggggtgctggatgaagtctcaaccggcaccggaaaagtgatccccagttcacgcgagcaggtattgcagtcgctggatggggggatcctcaccgagctgaacgtacacgaaggggatcaggtgcaggccggacaggtgctggcgcggctggatcctacccgctcggaatctaacgtcggcgaaagcgcggcgcgttaccgcgcgtcgctggcctccagcgtgcgcctgtacgccgaggtgaacgatctcccgctgaaattcccgccttccctggcgaaatggaccgacctgaccgccgcagaaacgcggctttacaactctcgccgcgcccagctggaggatacgcagcgtgaacttcgctccgcgttagcgctcgccaataaagaactggcgatcactcaacggctggtgaaaaccggtgccgccagccacgtggaagtgctacgcctgcaacggcagaaaagcgacctggagctgaagctcaccgacgtgcgttcccagtattacgtgcaggcccgtgaagcgctgtctaaggccaacgccgaggtggatatggtgtcagcgatcctgaaaggccgcgaggattccgttacccgcctgacggtgaagtcgccggtgcgcgggatcgtgaaaaacatcaaggtgaccaccatcggcggcgtcataccgcccaacggcgagttaatggagattgtgccggtggacgatcacctgctgattgaaacccgcctctcgccccgggatatcgcctttatccatcctaatcaggaggcgctggtgaaaatcaccgcctacgattacgcgatttacggcgggctgcacggagtggtggagaccatttcgccggacaccattcaggacgaagcgaagccggaggtgttctactaccgtgtattcattcgcaccagccaggattatctggtgaacaaggcgggcaggcacttttcgattgtgccggggatgattgcgacggtggatattaagaccggggagaaaacggtgctggattatctgattaagccgtttaaccgggcgaaggaggcgctgagggagcggtag

SEQ ID NO: 119468 - DNA, 2193 bp, Enterobacter cloacae
atgaagcaacgcgatattccgcagggtgaaaacatgacggatgaggcgctggagcagtgggcgcaggcgtttggctatgtggcgacgcgctatcgcgttgcctgctcgccaggctcgctgatcgcgggcgcaccgtggctgaaaggcaaaccgatggtgcccgcgctgacgcagctcgcccgtgaagccgggctgacgttccagctgctgacggccgatcagcacgctatcaacagctggcgtctgccggtggtggtagagctgaacgacggtaaaatcggcgtgatcgataatttcgacggcgaggatacgcttgaagtcagctttttcgacgacagcacgcacaccaaccgcctgtcgatgagcgcgatgctgcccgccatccgccacgtcatcgccctgcgtccgctggcggcgctgaaggacagccgcgtggacgcctatatctcaaaataccgcccggactggctctaccggctggtgatgcgcgaccttcgcccttacagctgggtgatgctggcggcgctgtttatcaacgtgctctccctctccggcattgtcttttccatgcaggtgtatgaccgggtgatccccgcccagtcctacccgacgctctacgtactgaccattggtgtactgatcgccacgctgtttggttttatgctgcgcgtggcgcgcgggcacattatggatctgctgggcaaacgctcggatatgcgcgtctcggatcgggtcttcggccacgcgctgcggctacgccacagcgccattccgcgctccaccggcagctttatctcccagttgcgcgagctggagcagatccgcgagatggtcacctcctccaccatttccaccatcgtcgatctgccgttctttatcctgtttgtgattgtgctggcgatcatcgccccgcagctggcgtggatcgccccggtggcggcggtgataatggtcctgcctggcctgctgctgcaaaagaaactggcagagctggcgaagcagtcggcgcatgaatctaccctgcgcaacgcggtgctggtggagagcgtgcaggggctggaggacatcaagctgatgcaggcggagaaccgctttttgcagcagtggaacagctatatccagatcaccgccgaatccggcctgcgcacccgcgaactgacgcagaacctgatcagctgggggatgaccattcagagcctggtctatgccggggtgatcgtggtgggcgcgccgatggtgatcgacggcaccttaaccaccggttcggtggtggccgcctcgatgctcgcctcacggatgatcgccccgatggcgacgctgtgcggcgtgctggcccgctggcagcaggtgaaggcggccaaagaggggctggacagcattatgcagctgccgaccgagaaccagcgcgaagagacgccgatccgccaggacgtgctgcgcggccactatcttttcgagcaggcgcagttccgctatcacccggaagatccccgcatggcgctgcgcattaaccgcctggagatcaaagcgggcgaaaaagtggcgatcctcgggcgcaacggcgcgggtaaatcaaccctgttgcaggcgatggcgggcgggatggatctggcgggcggtgaactgcggctcgacaacctcagcctgccgcatctggacgtggctgacgtgcggagaaacgtcggctttatgacccaaaatgcccggctgttttacggcaccctgcgcgagaacatcacgctcggcatgccccgcgccaccgatgaagagatcttcgaggtgctggagatgtgcggcgcggccagctttgtgcagaagctgccaaaggggctggattacccgattatggaaaatggcgtcgggctgtccggcgggcagcggcagtctattctgctggcgcggatgctgctgcgcgacccgaatatcgtgctgatggatgaaccgaccgcctcccttgatgaacataccgagcgggaatttattcaacgtctctgggcgtggctcggcaaccgcacgctggttgtcgcgacccaccgcgtgccggtactggagctggtggagcgcgtggtggtactcaaagatggcatgctggtgatggacgcgccaaaagcgcaggcgctgaacaacagccgtatgcagcaacagcagcaggcaaccggacgggagtggaataatgaaaatcaatcagcgtga

SEQ ID NO: 119469 - DNA, 1404 bp, Enterobacter cloacae
atgggaaagaagatgccttactggtggctctcgtgctgcctgatatctgtgcccgctatcgcggcaaaccctgcggcgatgattaataccggacaattaagcgaaacgcaggaactcccctctttaaatggccgcgtggcgcccgtagccagcaaagccgcccccggcacgctacagctggatgaagccgtaaaccgcgccgtgacctggcatccggccatcagtgaagccgtcggcaaactttatcagcagagcgaaaatgtggacgtcgccaaatcgaaatattatccgcaaattaacgccggcatggataacggctatagccacgacggcgacgataatggctttaccccctcgctggtgctttcgctttcgcaaatgctttacgacttcggcaaagtcgcaagccaggtgcgcgccgaaaacgcgggcgtcgcccagcagcaggccaacgtgctggtgagcatcgacactatcgcccacgataccgccatcgctatggtgcaggtgcagacctggcagcagatggtcgagaccgctaaagaacagctggacgccctgacctccatcggcacactgacgaagctgcgtaatgacgaaggcgccacgtcgctctctgacgtggtgcagaccgatgcccgtatcgaaggcgcgcgagcgcagctgatgcagtatcaggccagcctcgacagctcacgcgccacgctgatgagcatgctgggctgggacggcctgaacgcggtcagcaatgaatttccgcaaagtctggcccgcagctgcgatattgccgagccggacgatcgcctggtgccctcggttttagcggcctgggcgcaggccaacgtcgcgcaggccaatctcgactatgccaacgcgcagatgacccctaccgtctcgctggagccggaagtccgccactatcttaacgaccgctactcaggcaacgaaacgcgggaccgcacccagtactccgcgtgggtaaaagtgcagatgccgctctatcagggcggcggcctcaccgcccggcgtaacgccgccggacacgcggtggaatcggcccagtccaccattcagcgcacccgtcttgaggtgcggcaaaaactgctggaagcgcgcagccaggtgatgagcctgatgagcacgcttcagatccagggccgccaggaagcgctcagcgcccgtacccgcgagctgtatcagcagcagtatctcgatcttggttcccgcccgctgctcgacgtgctcaacgccgagcaggaggtgtatcaggcgcgctttacccagcagcaaaccgccggacagctccgccagcttcagctgaactgtctctaccaaaccgggcgcatacgtcaggtgttcgatcttgaaaaccgcaccatccagaccgtggagatccagccatga

SEQ ID NO: 119470 - DNA, 11424 bp, Enterobacter cloacae
atgagccaaatatctgttatatctaaattaactggcgtggaaacgaccacggaagggacacagataacactcgatcactcctcaatcgttaagcttaacgtggatcgagccaacatcgcagattactcccgcagcggaaacgatctggtgattaccctcaattcgggcgaagtgattaccctcaagaatttctacgttactgatgcgcagggcgtaagccagctggtgcttgaagagagtgacggagcgctgtggtggattgaagatccaaccggtgccgcgacctatgaatccatcgcctccactgatgcattactggcggcgtcagggagtgatgctggtggcgccgctgcgtggccctgggtgctgggtggcctggccgccgcaggtgggattgctattgcggcgggaaccggcggtggaggtggcggagatgacgataacaacaacccgaatcccggtaatccgggaaatccttccgaacctgatactacgcctccgaatgctcccactaatcttcaggtctcacctgacggcaaaaccgtaacaggtacggctgaaccgggcagcacgattacccttaaagatgccgatggcaacaccattggaacgggcaaggtcggcagcgacggcaaatttactatcgatctcggtacgccgctcaccaacggggagcagatcaccgccacggccaccgacccgtccggcaataccagccagggtggtcaggtcacagcaccggatctcaccgcgccggatgcacctgccaatctggaggtttcgcctgacggcaaaaccgtgtccggtacggctgagccgggcagcaccgtgacactgaaagatgccgatggcaacaccatcggaacgggcaaggctggcagcgacgggaaatttactatcgatctcggcacgccgctcaccaacggggagcagatcaccgccaccgccaccgatccgtccggcaataccagcccgggcgttcaggtcacggcaccggattcaaccgcgccggctgcccccgagattgtcaccgtcaatgataacgtgggcaccgaggcgggcccgctgagcaacggacaacgcacggacgatgcacgcccgacgttcagtggcatcagtgaagctggcaccgttattaccttctatgacaacggcaagccgatcggcaccgccacggccgatgctaccgggaaatggagctttaccccgtcgaccaacctgtctgaaggaaaccacgccattaccaccaccgcgaccgatgcggcaggcaataccagcccggcgtccacggcggtgaccctcgtggtggatacggtcgcaccaggcgccccggccatcaccggcatgaccgacgacgttgcgcccaataccggcgtgctcggaagcggaagcaccactaacgatccgcgcccgcagctcaccggcacggcggaagcgggctctacggtcaccatctatgataacggcattgccattggcacagcggttgtaggcagcaacggaagctggagctttacgccgtcggttaacctgagcgaaggcagccaccagcttaccgtacgcgccaccgacatcgccggtaacaccggtccggcctcgccggcctttaccgtaacggtggatgtcaccaccccgccggtgccgacaggatttatcgttaacgatgacaccggagggctgaaaggcacgattaccgccgggcagtttaccgacgagtcgcagccccgcctgacgggccgaggagaaccaggcagcacgattacggtttacgataacggcgttgcgattggcagcacaacggttctgccgaacggtacctggagcatcacgccgacaacgccgctggcagagggtgcacattcgattaccctgcgcgaaaccgatgcggcaggcaaccagagcggcctgtctcagccgatcaactttaccgtcgatcttacgccgccagacatgccggaggcgacgctcaattcgacaggcacgcaaatcaccggtactgccgagccgggcagcaaaattgtcatcaccaacaacgccggggtgcaaatcgggaccgccactgccgacagcaacggcaactacgtcgccgacctgaaccctgcacaagtgaacggcgagatcatctccgtggtcgcctccgatgccgcaggcaaccagagttccccggcgctggttaacgcagcggacatcaccgcgcctgccgcaccgggtaacctggtggtggcggaagacggggcaagcgtcagcggaaccgccgagccaaacagcacgattattattaaagcgccggacggtacgattatcggccaggccaccgccggtccggacggcacctttaccatcccgatttcgccagcccagaccaacggcgaagcccttgaagtgacggccaccgacggcagcggcaacaccagtccgtccggctttgccgacgcgccagacagcacgccaccgctggcaccggaaaacgtggtgatctctgccgacggcaccacggtaaccggtacagccgagccgggcagcaccgtcaccattcgtgaaaatggcgttaaggtcggggaagcggtcgccgacgatcagggtaatttcagcgttgatctgatcccgccgaaagccaacggcgaagccctgaccgcagatgccaccgataccgccggaaacaccggcccgaccgcgccgtttgacgcgccggacatcaccgcggcacaaaccccggtcatcacaggcgtggaggatgatgcgctcgacgtcaccggtcctgtcagccagaacggtctcaccaacgacaaaaccccgaccatcaacggaacgggcgagcccggcacaacgatcaccctctacagcggcaccactgaaatcggcactgcggtggttgggcctgacggccagtggtccattacgctggaaacggatcttcccgacggcgggcacgtgctgacggcgacggcggttgacgccaacaataacctcagcgggacatcgaacacctggagcatcacggtggataccgccgcgccgggcgctccagccattacgcaggtcattgatgacgtaccgggccgcacggggccgctcgacaacaaccaaatcaccaacgacacgctcccgacgctgaacggtaccggcgagccgggctccaccgtgacgatccgcctggacggacaggatattggtactgccattgtgaacaacggtggcgcatggaccttcacgcccactaccgcattagggaacgggcagcatacgttcaccgtcgtcgcgagcgatgcggccggcaacaccagcgcatcatcacccggctttacctttaccgtcgataccactccgccaccggcggccacccttgacaccgtctccgataacatcggcactgtgcaggttccgcttaacagcggggatactaccgatgacacgctgccgcagctgcagggaaccgcaccggaaggcaccaccatcactatctatgacgggaccaccctgctcggcacggccgtgcttgacggcagcggcggctggagctttacgccaatcacgccgctgacggacggcccgcattcgctgacggtccacgcgacggatgaggcgggtaataccaccatctcgccaccgtttgagctggcgatcgacacgaccgcgcctgcaacgccggatattcctgagatcaccgtgaacccggacggcgccacaccggggacggctctgaatcctggggagaccacccgcgataccacaccaaccctgagcggctcgggcacgccgggagataccgtaagcatttacgatggcgcaaccaaaataggtgaagccgagatcgatggcgacggtaactggagctggacaccggaagatccgctccctgacggcacctacgatctctccctgacggtgactaatcaggacagcgccgggaacgaaagcgcaccgtccacgccagtgaccattaccattgataccgacgcgccgggccagccggggatcccgacggtgacagacagcgtaagccagatcaccgggccagtggacaacggcggaaccaccaacgatccgcgcccggtactgagcggcaccggtacgccgaatgacgtcattaccatctatgaccaggtgggtacaggcgagccgcaggccgtgggcagcgtcacggtggacggtagcggtaactggagctggcgtcctgagagcaacattggcgaagggacgcaccaatacacggcgaccgccaccgatgaagccggcaatgaatctctgccatcaaccggtatcacgataacggtcgacaccctcgccccggataccccgctcatcggttccattggcggcgctcagaatggaggctcaaccaacgataacacacctgtcattggcggaggcggcacgaccggcgaaacggtgattatctacaacaacggcgtggaagtggatcgcgttgaaatcgccaatggcgagtggtcatacaccctgccgacacaaaccgatggcccgctgaatatcaccgtcgccgcggtggacgacgcgggtaacctgagcccggtcagcccggtctttagcgtgacggtcgatacgcaggcaccgaccgtgccgcaaattgacgccgtctctgacagccaactgaccaacagcgtgctttacacccgcgacggtaccccaaccctcaccgggattggcgagccgggttcgagcgtaaccgtttctgtagatggcacgccgtctccggtggtcgtggtggttcagccgaacgggacatggtcctggacagccgaccccgcgcttgcggaagggccgcataccttctcggttgccgcaagtgacgcggcggggaatacctccgccagctccggcgatctcagcgtgacggtggatacgctgcttcctgcaacgccaaccaatatcaccattgccgcagagggcacgccactgaccggtacggcagatgacggaaccacggtgacggtgcgtgacgccggcggcaatatcatcgggaccggggtcgcgacgggaggcatcttctccatcgccctctccccggcccaactggatcccgcgacgctgacgctgttcgccacggacgccgcaggtaatgcaagcccgacaaccacctttgacgtaccggactccccgcttattctgccagcggtgccggtgattacggcaatcaacgatgatgccgatcccgtcactggcgatgtgaaagacaaaaccaccaatgacaccacgcctacccttaccggcaccgccgatccgggtagcgtcatcaccatttatctggatggggcgctggttccgctgaccgaaattgttgcggatacagacggcaactggagctatacgcctctactgccgctcgcggaaggcccacacaccttcgccgtcaccgccacgaataccggcaccggcgcgaccagcgggcagtcgccgatcgcgaccgtcaccgtcgacctcaccgatccgaccgcaccagccatcggtgcggtgaccgatgacgtaggcccggtcaccggcccaatcgctgacgggcagagcaccaacgacaaccgtcctaccctgaccggaacaggcacggccggggacaccattacggtgtacgatgacggcgacccgctgggcaccgttgttgtcggtccgaccggcagctggagctacacgccgcctgcgctggacgacggcagccacaccctgaccgtgaccgccaccgacccggcaggcaatgagagcgccccgtcggccgggatcaccatcgttgtcgacaccgtctctaccacgccggtaattaccagcgtgacggataacgcagggaatgcggcaacgcctgtcccaagcggcgatccaaccaacgacactacgccaaccctgaccggtagcgccgagccgaacagcgtcgtcgccatttttgatggcgctacgcaaattggtacggtggcagcagacggcaccggtgcctggacatttactcctgaaaccgccctcggcgaagggacgcatgactttactgtcagagcgacggatccgcagggcaacgtcagccagccgtccaacgcctggagcgtcgaaatcgatctgactgcgccacaggtgccgacgatcgttacggtcagcgacaatgccccgggaggcacaaccggcccgcttaccgccgggcaggtgaccaatgacaccacgccaaccctcagcggctccggccaggcgggtaccatcattcacgtgctgaataacggcgtggagattggcaccaccacggtcgacggcagcggcaactggacctttacgccggatccggtactgactgacgggacgtataacctgcgcgttaacgccagcgatgatgtcggaaacgtctccgccaactcgccagtgttcgcctttacggtggataccgccgggcctgcggccccggtggttaccacggtaatagacgatgtcagcccgggaacgggaaccctcgccagcgacggctccacgaacgacacccgtccaaccttcaacggtacgggggaagtgggcgcaacggtacacgttattgtcgatgatgtggaaatcggcacggcggtcgtcaacgcccagggtaactggaccttcacgccgaccaccgaactgggcgaagggccgcacgttattaccttcaacgccaccgatgccgcaggcaataccggggtcacctcaccaccgttcaacctgacggtggatacctcggtgcctgaggcaccggtctttaccccggccactgacgatgctggtaccgtgctgggcccggtcgcctcgggacaaagcacagacgacaccacgccaacactgaacggcaccgcggcggccaacgcgaccatcaccatttatgaaagtggccgtgaagtgggtaccgccgtggcggacgcaaacggcgtatggagctttaccaccggtacgctggcaaacggcagccacacctggaccgccacggtaaccgatgccgcgggcaacgtcagccctgcctcaccaggctttacgctggtggtagatacggctgcgcctgtcgcgccggttatcacccaggcgattgacgacgttggcaccatcaccggggcaataggttccggccagaccaccaacgatcctctcccgcgtctggtggggaccagcgagccgctggccaccgtgaatatttatgagggcaccacgctggtgggcaccggtactgccgatgccgatggcaactggaccgtcgatatcaccgtgccgctggacagtgggtcacacacctttaccgcagaagcaacggatcaggcgggtaacaccagcacgtcgtccgccgacttcagcctgaccattgacaccacaccgccagcgctgccggtgctgaccagcatcaccgacgatgtcggtaacgccgctgcgcctgtcgccaacggcgggttaaccaacgacgcgcggccaacgctcaccggtacggcagaagccggcgcgacggtcaccatctttgataatggggtacagattggcaccgcagtcgccaccggcggcgcgtggagctttacgccttccaccccgctggctgacgggtcgcataatctgaccttctccgccaccgacgcggtgggcaacgccagcgcgcagaccggcggttacaccattaatgtggatgccaccgcccctgtcgtaccggcaatcacctcgattgaggatgatgtggggaccgtcaccggacctgttactggcaccaacccaaccaacgacacccgtccgaccttaaacggtacggcagaagccaatgccaccgtacgtatttacgacggcacgacgctggtggggactgtcactgccgatgccaacggcaactggacgctgccgcaaaccagcaccacgctgacggaaggcgcgcataacttcaccgcaaccgccaccgatgccgcgggcaataccagcgtggcttcaccgattatcacgattaacgttgacctgacgccgccaccagccccaaccgggctggcggtgatcaccaacgggacgcaggtcaccggtacagcagaagcgggaagcaccgtcaccatcaccagcagcaccggaaccgtgcttggaacggccgtcgcggacggtagcggaagcttcagcgccaccatcacccctgcacagaccgccggtgaatccctgatcgtctttgctaccgataaggccggtaacgcgggtatcaccacctccgtgattgccccgatcaccacaatcccgaacgcgcctgttatcgccaatattgacgataatgttggcacggtgacgggcaacctgaccaacgggaataccaccgatgacaccacgccaaccctgagcggcacggcgcagccgaacacgaccatcaccctctataacaacggggtgctgatgggcacggtcaccgcgaatgccagcggcaactggagcttcaccacgccggtgctgagcgaaggcccgcatgccttcaccgccacggcgagcaacggctcgggcaccagcccgatttccacgtcgaccaccgtcattgtcgatctcactgcgccaacggctccaaccgggaccttcaacgcagacggcagcgtactgaccggtagcgctgaagcgggcagcaccgtcaccatccgcctggcggataattcaacggtcaccgccacggcggacagcaacggttcctggagctacaccttcctcaataaacagacggaaggtcagacgctgcaaatcaccgccaccgatgcggcaggcaacgtttcgctgcccggctcagcccttgcgccggtggtgccgctctctgccagcaccaacgctgaagaactggcgctcacgaccaccgccacggtgaccaactcgcagtacagcgactatggtttcctgctggtaggcgccttaggtaacgtgctgacgctgctcggcaacgataccgcgcaggtaggtttcaccgtcggcaacggcggcagtgcggatattgccgtgaacgccaacgccacgggtgccgttctttccctgctcaatacccttgagctggtggtacagcgcttcgacgccgccaataatacctggactaccgtggtcgataccgggcagccgcagttcgctgacctgttgaccctcggcgcgacgggggtgtcgctgaacctgaccgggctggcgaatggtcagtatcgcgtcctgagctacaacactaacctgctggcaaccggctcttacaccagcctcgatgtggcggtgaaagagaccagcgcaggcaccgtgtccggcgagaccagcgttgtcgggaacgtcatcactgacgtggatccaaccgcaggcagcgacaacgccccggcgggcaccaccgtcactacggtcaccaacgcccagggcaccaccaccagcgttacggctgacggcacggtgattcaggggcaatacggcacgctgaccatcaacctggacggcagctatacctataacctgaccaacaccagcgccgccgtcattggccgcacggagaactttacctacaccatcacccataacggcaccagcgcctcggcaaatctggttctgtcgctgggcgaaggcactaccagcagcgggatcgtggccgtggacgataccgcctcgctgaccttcgacaccaccgtggaggcgatcaacaacggcacctcgtcgcagggcggctttaccctggtggggatcaaccttggcaataccctggggctgaacctgctggacgatctggccaacccgatcatctataacgtggaagaaggcaccacccgcaccatgaccgttcaggcctccgtgggcggcgtcgcgctggcctcggtgttcgacctctacatctataagttcaacaatgcgacgcagaccttcgagcagatgcgcgttgaacccggctggctgcgcgcgccgctgctgggcggcacttccccgcagctgacgttgaacctgcccgctggcgagtacctgttcctgctcaatacggcggcggggatcaccgcgctgacggcctacacgctgaacgtcttgcaggatcatgtctacagcgtggcaagcgtgagcgagagcacgaccggggatgtgctggcggatgatattgcgccagcaggttccgtggtctccgacgttaacggcgtggcggtgaacagcagcggcctgacggagatcaccggcgagtacggtacgctgcggatcaacgcagccggggagtacacttacaccctggacagcggagtcggcgctgacagcatcagcaccccagataccttcgtctacaccatcaccgcgccgaacggctcgaaagacacggcatcgctgaacatcaccccgaccgcgcagccaatggacgcggtgaacgatgtcagcacggcgatggacgtgaactcggtgcaccgcaccgccgcatactcggataccaccgtcgggtcggcgagctggaacgccgcgctgcttgcctcaacccagggcagcggaagcgggaccttcgtggtggatcctaatactgcactgcataacgtggttctgtcgtttaacgtcgcctcgctgctgacccttaccgggttaacggtcgactggacactgaccaacggcaccaccaccctcagatccggctcatttaacggcgggctgctgctgggcggcagggcgacgatcaacctgacgggcctcgatctggaagcgggaacctatacgctgaactataccggcagaatgggaccgctgggggtgggaaatatcaccgttaccccaagcgtcaccgggaccagctactccctgtcgcagtttgacgccacgggcacccacaccgttgacggcaatatcttcgacggcaccggctccgcgggcgcgatggaccagctgcactcggtcgatacccgtctcagcattaccggctacgacggcgtaaccaccacgctggatccttacaccggcagcacgcaggtaaacatcacgggccactacggcacgctggcgattgccgcagacggcagttacacctacacactcaacccggggatatcgttctctaccatcaccagcaaggaggtctttaactacaccctgaccgacgccaacggcacccgggataccgcctcgctgaccatcaatatggcaccgaaatttgtcagttcggaacataacgatgtgattagtggcacggcctacggcgacacgctgatttatcaggtgttgaacactacggcgggtaacgccaccgcaggtaacagcacgggtgaccactggacgaacttctccctatcgcagggagacaagatcgacattggcgatctgctggtgggctggaacggtagcgcgtcgacgctggggaactatgtctctgtttcacaaagcggtaacaatactgtgatctccatcgaccgtgacggcacgggagccgcctacactaaatctacgctcgttacgctggacaacgttcagaccacctacgacgagcttgtaaaccagcaacacatcattacttga

SEQ ID NO: 119471 - DNA, 918 bp, Enterobacter cloacae
atgaaaatcgatcttaatttgttaccgctttttctggcggtcgccgaagaacgcagcttcagcgctgccgccgggcgcctgggcataacccgttccgctgtcagccagggaataagacgtctcgaagatgggtttcagaccctgctggtgatgcgcaccacgcgctcggtaaggctcaccgaagcgggtgaacggttgcataaatcgttgctggggcccatcgccaacattgaggcggcctttgacgatgttatctcggacagcataccgcgcggacagctcaggatcgctgtcacctcaattgcggaagcgtttctttcgggcccactgctcgcctcgtttacggccgcgcatcctgcggtatcgcttgatgttttcgtgtcagatgaggaattcgatatcgtggcagcgggctatgacgccggggtgaggctgggcgaagttatcgaaaaagacatgatcgctattccccttacgggccagcagcgtgaacgggtggtggcttcaccttcctatctggcgacacactgcgcaccgacgcacccccgtgaactggtcgctcatcggtgtatcggctggcgcccttccccggacgttgccccctatcgctgggagtttgaggaagcaggcgtccctttcgatgtggcaattgaaccacaaatcaccactaacgatctgcgtcttatgctcagcctcgcgctggccggcggtggtataacctttgccacggaggacaccttcacaccgtacattgaatcaggacagctggtttccttactggatgcgtttcttccatcttttcctggtttttatctctattttccccagcgccacaatatggcccccaagctcagagccctgatcgagcacatccgccagtggcgacagctccccgccacgcagccgacactgcgttaa

SEQ ID NO: 119472 - DNA, 1848 bp, Enterobacter cloacae
atgattaaaaaagtatcgctgttgacggcgttttccgtcacggcattttcgggctgggcgcaggaaagcgccgactcgttggtggtgacagcaaaccgtttcgaacaacctgaaaaatctgttctggctgcgacttctgtcgtgacgcgggccgatatcgaccgctggcaatccaccacggttctggatgtcatgcgtcgcctgcctggcgtagatacggcacaaaatggcgggatggggcagctctcttctctctttatacgcggtacgaactccagccatgtcctgattctcgtcgatgggatccgccttaaccaggcgggcgtcacggggtcgtccgatctcagccagtttccgatctccctggtgcagcgcatcgaatatcttcgtggaccgcgttcggcggtgtacggctcggatgcgatcggtggtgtagtcaacattatcactacgcgtgcgaaggatggcacaacgctgaatgctggcgttgggacacacggcttccagaattatggtggcagcacccagcaaacattgggtgaaagtacgcgcgttacgctggcgggggattacacctacacaaaaggctttgacgtcgttgctgacggtaataacggcggccttgcccagaccgatcgcgacggctttatgaataaaacgctctacggcgcactggagcatgctttctctgagcaatggagtggtttcgttcgcggctatggttacagcaaccgtaccgcctatgacggctattacagttcatttacccctgatgtgctggttgatacccgccaactctatagccagacctgggatgccggattgcggtttaaccgggatgttttccattcacagttgctctccagctacagtcacagcaaagactacaattacgatccgcaccttggacgctatgactccacagcaaccctggatgaaatcaaacagtacaatgttcagtggaccaactcagttgacgtggggcatggcaacatcggcgcgggcgttgactggcagaaacagagcaccgagccgggtaccaactacgtaaccaacgcctatgacctgcgtaacactggcgtctacctgactgggttgcagcagtttggagatttcactctggaggcggcggcccgcagcgatgacaactctcagtttggtcgccatggtacctggcaaagtagcgcagcctgggagttcgttgacggttaccgcttcatagcctcttatggcacggcctataaagcgccgaatctgggtcagctctatggcttctacggcaatacccatcttgatcctgaagagagcaaacagtgggaaggggcgtttgaaggcctgacggcaggcgtaagctggcgcgtatccggctatcgtaatgacgttgatgatctcatcgacttcaacaataacctgcagcaatattacaacgtcggcaaagcacgcattaaaggtgtagaagcgacagcgtcgtttgatacgggtccgttgacgcatactgtgggctacgactatgtggatgcccgcaatgcggcaaccaatcaacttctggaccgtcgtgctaaacagcaggtgaaatatcagcttgatacgcagatctatgatgttgactggagcctgacgtatcactatctcggcacgcgctacgacaccgactttggaacctatccgtcagagaaagttaaaatgggcggcgtcagcctgtgggacgtcgcggtttcatatcctgtcacctcacatctcacagttcgtggtaaaatagccaacctgttcgataaagattacgagacagtttatggctaccaaactgcaggacgggaatacaccttgtctggcagctacaccttctga

SEQ ID NO: 119473 - DNA, 765 bp, Enterobacter cloacae
atgcaccacgatatcccccacatcctgaatgacctgatcaacggcaccttgccgctgcgtcaggtgcatttccccccttcggctaaaccgctcccccgaacgtcaccttgcctcgtgcttagctttgatacggcctgcgaagcgttatttttttcatccggtaatattccgcttcaacccgccttttcgctcaacatcagcttcggcaagcaacaactgactcttcagctcgagcgcgacaacacgcttttgcaacagcaacaggttgccagacgcgggccgcgagtgggcgcattccttttgcagacgctcgctgaattgcaaatgcagccagacgatcgggaaacggccagactggtggtattaagtttgctcagccactgtcgcgatctgctgggcagcgatatccataccgccagccgcagccgtgcattatttgaagcgattcgtcactacatcgaagaacatcacgcctctgcactgacccgtgaatcggtggcgcaggcgttttatatttcaccgaactacctttctcatctttttcaaaaaacaggcagcgtggggttcaacgaatatcttacgcaaacacgcctcgagcacgcgcgtcagcttcttaaaggctacgagtttaaaatcaaagatatcgctgcaagctgcggatttacggacagcaactacttttgccgtctctttcgcaagcacactgaacgttccccttccgaatatcgacgccagtatcacagccagctgatcgccaaaaagtag

SEQ ID NO: 119474 - DNA, 663 bp, Enterobacter cloacae
atggaactgtacctggataccgccaacgtggcagaagttgaacgcctggcgcgcatttttcccattgcgggcgtgaccaccaacccaagcatcgtagccgccagcggcgaatctgtctgggaggtgttgccgcgcctgcagcaggctatcggcccggagggcaggctgtttgcccaaaccatgagccgcgacgccgaaggaatggtggcggaagcaaaacggctgaacaatgccctgccggacatcgtggtaaaaattcccgtcactgcacaggggctcatcgcgattaaaacgctgaagaaagagggaattaccacgctgggaaccgccgtttacagcgccgctcaggggttactggccgcgctggcaggagcgaaatatgtcgcaccgtatgtaaaccgcgtcgatgcgcagggcggtgacggcattcgcacggtacaggaactgcaatccctgctggaacagcatgcgccagagagcatggtgctggctgccagctttaaaacgccgcgccaggcgctggattgcctgttggcaggatgtgaggcaattacgcttcccttagacgtagcgcaacaaatgctcggcacgccagcggtagagtcagccatagagaagttcgagcaggactggaaaaacgcgtttggtaacctcaacctctaa

SEQ ID NO: 119475 - DNA, 1305 bp, Enterobacter cloacae
atgtcgctctggttaacgcatcctctgctgcttccctcgctgatcgtcggcgtcaccatcgtgctgtgggcgacgtcgctgttgccggaatttatcaccgcgctgctgttctttacggcggcgatgaccgccagaatcgccccgccggaagtgatctttggcggcttcgcctcgtctgccttctggctggtgttcagcggctttgtgctgggcgtggcgattcggaaaaccggcctggcggacagggccgcccgggcgctgtcggcaaagcttaccgactcctgggtgctgatggtggcaagcgttgtgctgctgagctatgccctggcattcgtgatgccgtcgaacatgggacgtattgcgctgctgatgccgattgtcgccgcgatggcgaagcgggccggcattcctgatggctcgcgggcctggtttggcctggcgctggcggtcgggtttggcaccttccagctctcggccactattttgcccgctaacgtgccaaaccttgtgatgagcggcgcggcggaaggctcatacggtatccacctcaactatgtcccgtatctgctgctgcacacgccggtgctgggtattctcaaaggcctgattctgattggcctgatctgctggctgttccccggtagcccgaaaccagcgaaggatctgacgccgtctgaaccgatggggcgtgacgaaaaacgactcgcctggctgctggcggtggtgttgacgatgtgggtaacggagagctggcatggcgtgggcccagcgtggacagggctggcggcctcggtcatcgttatgctgccgcgcatcggatttatcaccggcgaggagttctcggcgggggtgaatatgcgcacctgtatttacgtcgcgggtatactcgggctggccattacggtgacgcagaccggtatcggtacggccgtaggcgaggcgttgctccatatcatgccgctggatgcagaccgcccgtttaccagcttcctggcgctgacggggatcaccacggcgctcaacttcattatgaccgccaacggcgttccggcgctgtacaccacgctggcgcagagcttctccgacgcgaccggcttcccgctgctgtcggtgatcatgattcaggtgctggggtattccacgccgctgctgccgtatcaggcgtcgccgattgtggtggcgatgggcttagggaaagtgcctgcgaaggcggggatgctgctctgcctggcgctggcgattgcgacgtatctggtactgctgccgctggattatttgtggtttagcgtattaggacgtttgtag

SEQ ID NO: 119476 - DNA, 693 bp, Enterobacter cloacae
atgaaagcatttgatctccagcggatggcgtttgataaagtcccacctgagtttttaggcgaagtggcgttgcgtagcctgtacacctttgtactcgtcttcctgtttctgaaaatcaccggacgtcgcggcgtgcggcagatgtcactgtttgaagtgctgattatcctgacgctgggttcggcggcaggggacgttgccttttatgacgatgtgccgatggtgccggtttttatcgtcttcgtgacgcttgcgctgctgtaccggctggtcatgtggctgatgtcgaaaagtgaaaaactggaagatctgttcgaaggaaaaccggtggtgattgtcgaagatggtcaactggcctgggagaatgtgcaaagcgccaatatgacggagtttgagttctttatggagctacgtataagcagcgttgaacaactggggcaggtgcgtctggcgattatggaaacgaacggtcaaatcagcgtttattactatcctgacgatgaggtcaagcccggcctgtgcatactgccggatatgcttatcgagcgatacaaaaccgtccctgatgcgggccagtatgcctgcataaaatgcagccatgtggtggtcatgcaggcgggcgatcatcaattatgccctcgctgtacaaatccagaatggacgaaggttagccgggctaaacgcattacctga

SEQ ID NO: 119477 - DNA, 1053 bp, Enterobacter cloacae
atgttaccggcagacgtgctcaaacaggctcaacaggagctgtgtgactggaacggtctgggtacgtcggtgatggaagttagccaccggggtaaagcgtttattcaggtggcggaagaggcagaaaaggattttcgcgatctgctgaacattccctcgaactacaaagtattgttctgtcacggcggtggacgcggtcagtttgcgggtattccgctcaatctgctgggcgacaaatccaccgctgattacgttgatgccggctactgggcggccagtgcggtaaaagaagcgcacaaatattgcacgccgaacgttatcgatgccaaagtgaccgttgacggtatgcgcgccgtgaagccgatgagtgagtggcagctttctgacaacgccgcgtatcttcattactgcccgaacgaaaccatcgacggtatcgctattcacgaagagccagactttggcgaaaatgtcattgtgacggcggacttctcctccaccattctgtccacgccgctggacgtcagccgctacggcgtcatctacgcgggtgcccagaaaaacatcggtcctgcgggtctgactatcgttatcgtgcgtgaagacctgctggggaaagcccataagtcttgcccgtcaattctggattacaccgtcctgaacgacaacgattccatgttcaacactccaccaacgttcgcctggtatctctccggcctggtcttcaaatggctgaagcaaaaaggcggcgtggcgcagatggacaagatcaatcagcaaaaagctgaactgctgtacggcgtgatcgacaagagcgatttctaccgtaacgatgtcgccaaaactaaccgttcgcgcatgaacgtgccgttccagctggcggacaacaacctggataacgtgttcctggaagagtccttcgcggcgggtctgcatgcgctgaaaggtcaccgtgtggtaggcggtatgcgtgcctctatctataacgcgatgccgctggaaggcgttaaagccctgactgatttcatgatcgacttcgaacgtcgtcacggttaa

SEQ ID NO: 119478 - DNA, 1284 bp, Enterobacter cloacae
atggaatccctgacgttacaacctatcgcgcgggtagatggcaccattaatctgcctggttcaaaaagtgtctcgaaccgcgctctgctgctggcagctctggcaaacggcaccaccgtcctttccaacctgctggacagcgatgacgtgcgccatatgctcaatgcactgaaagcgttgggcgttcagcacgcgctgtcagacgatcgtacccgttgtgaagtcaccggtaacggcggcgcattacattccgctgaagcgctggagcttttcctgggtaacgctggtacggcgatgcgtcctctggccgctgcgctgtgtcttgggagcaacgatattgtgctgaccggcgagccgcgcatgaaagagcgtccgatcggccacctggtcgatgccctgcgtcagggcggcgcgcagattgattatcttgagcaagaaaattacccgccactgcgtctgcgcggtggtttcactggcggtaatgttgaggttgatggtagcgtctccagccagttcctgacggcactgctgatgaccgcaccgctggctccaaatgataccgtgattagcattaaaggcgatctggtctctaagccgtacattgatatcacgctgcacctgatgaaaacctttggtgttgaggtggaaaaccagtcataccaacgcttcgtggttcgcggtggccaacagtatcagtctccgggtcactacctggttgaaggcgatgcttcatccgcctcctatttccttgccgcaggcgcgattaaaggcggtacggtaaaagtgacgggtattggtcgcaacagcgtgcagggcgatattcgttttgccgacgtgctggaaaaaatgggcgcggttgtgacctggggcgatgacttcatctcctgtacgcacggtgagctgaacgccatcgacatggacatgaaccatattcctgacgcggcaatgaccatcgccaccgctgcgctgtttgcgaaaggcaccaccacgctgcgtaacatctataactggcgcgtaaaagagactgaccgcctgttcgcaatggcaaccgagctgcgtaaagtgggggcggtggtagaagagggcgaagactacattcgcgtcacgccgccggcaaaactgcaatttgcagaaattggcacctacaacgatcaccgcatggcgatgtgtttctcgctggtggcgctgtcagatacgccagtcaccatccttgacccgaagtgcacggcgaaaaccttcccggactacttcgaacagctggcgcgcattagcaccctggcctga

SEQ ID NO: 119479 - DNA, 537 bp, Enterobacter cloacae
atgaacagagtaaataatttaaaaaatgtacgtgaacataaaaactacccaaatttaaaagcaggtcgtaaggcattcaataacatgttcgataggacattgtacaatcctgattatgctgatgttacaattagtgatgagtttagtaatctaacatcattcttagattggcatgaacagaattatcatgaggttgaggaaagtaagaaatggcaacttgataaagacattctaactcctggttctcgtgaatactcaccacaaaactgtatgtacgtccctcctgaagtaaaccaactatttaaaagtaccaaacctggtaagtacatgaaaggtgttgaagcatcaggaaagaaattcaaagcatattgtagtgttgatgggaaaaagatttgtttaggtacttatcccacagaacttgatgcacataaagtacatatgaagtggcgtaaggcacgtttgatagaactcgctgagaagtacaaagaatatgaaaaactaagtgcggcactattagaacacgctaacaaaatctaa

SEQ ID NO: 119480 - DNA, 168 bp, Enterobacter cloacae
atgaattttctaatagaagtactcgcagccattctttacattttagttacattccccatgtacatagtctgttcaatcttctttatgatgctatgtatcattacactacctttgaagataccagtgattaatagatgggttaggaactacctgaaacgagaaaaataa

SEQ ID NO: 119481 - DNA, 1836 bp, Enterobacter cloacae
atgcgaactgtcaaagcgtttgtgtatagcagggtgagcacgctccaacaggtagatgcttttggcctatctcgtcagattagtactgtcatggactttcttgaaaacgctaaactaccagcggaattaggatatcaacttgatccaagtaatcacgaaatacttgaaagtgacaaaggattgtcggggtataaggggcatagctttacgaaggggtcactggggcgatttaaggaacgtgtgagggcaggagagatcacagaaggttgtttactaatcgagtccgttgacaggttcagtagaaaacaaggctatgatgcaatcgatgagtttactttcctgatcaagcgtaacatcgatattgttgaagttgagacagggcaaattttcagccacaagctggagcacaaactatcagctttatcgacaagtattgaacgtgctcaccaggaatcgaagcgaaaagcccgtattagtatgaagtcatggaagcatcgaaaagaagcatctttagcaaatggggtagctcttaataacaatacccctgattggttgtcactcagtactgataaactgtcatatgagattgactatcacagagtagaaactattaaacgaatttttcagatgtatcgtaatgggtacggggtaactcatatcgtcaaggtactcaatgatgaaggtaacaggtacaacggcaaaggttggaatactgtcactgtatataacaaattacgtgatcgtcgtcttaatggctttcttgtgggtaagtataaaactatacctaaaagaattaatgaaagtactaatgaagccgaaaagcgaattttagagaatttaaagatcaagaaagaggcacacgataatgctaagcgtatctatccggtagttgttgatgatgatctttttctaaaagtccaatcattgatggataggaatgtttcaaataaaaagcaaaaaagtactacaacaaaacaacggaatttatttaatggcctaactaaatgctatgagtgcggtagtcctatgatcgttcagagtatgtctaacggggggcagtacttacgttgctatagacaacgtactaaagatgaaaagtgtaattcaaagatgctaaggtacagcgttacggaaaaagttttattagaacatataaaagggttggatctggatgatatttacggggataaaacacaaaactattccgtggataccctaaaaaatcttcttcaacaaaccaataacaaattattagagcttaatgtaaagattaaaagtgcaaatgatgaagaagaattgtttgcgataatggaatttaaaaggaaaagaaatatagaaaaggaagatttgatcgcaaaaattaactcaatcgaaaatgcaagtgaagtagttcggctttcatataattatgatattggtgagattgtaaatcaagataacactgttcttagaagaaaaacaaatgagaatatatcaaaagtagtatcctcaattaaatgtttaagaactgactcaagttacataggtgcttattactcatatgatatcgcctatcataaagacataattaagcatctactaataaccgataataatggggtactgttaagtgaaatcagtatctatcaaaagaacaatgaaagaacttatatcgtcaaagaagacaataaaatggtattcaaagtcgagtcaaacggtgatgtatgggtattgtatgcaagtagaaagaaaagcataaatgatcttttgcattatatcaatgtaatgatggttggcagagagccggaggtttttgcctatgttcttaacgaagatatgattgaatggatcgactaa

SEQ ID NO: 119482 - DNA, 1602 bp, Enterobacter cloacae
atggatcggatcgatataagcacacaaagggggaagtgcttacttattatgaaacataaaccacaaatgatgaaaatgcgttggttgggtgtagcagtgctgttgtcactgtatacctcatctgcactggcctttaacatcgatgatgtcgcaaaacaggctaaatcgatggcgggcaagagctacgaagcgccaaaaagtaacctgccctccgttttccgcgacatgaaatacgcggactatcagcagatccagttcaatcacgataaagcgtactggaacaatattaaaaccccgttcaagcttgaattttaccaccagggtatgtacttcgacacgccggttgccatcaatgaagtgacggcgaccgcggtacgtaaaatcaagtacagcccggattatttcaattttggcgatgtgcaacacgataaagacacggtgaaagacctcggcttcgcaggcttcaaggtgctttacccgattaacagcaaagataaaaacgacgaaatcgtcagcatgcttggtgccagctacttccgcgtgattggcgcggggcaggtgtacgggctttctgcgcgcggtctggcaattgataccgcgctgccatcaggtgaagaatttccacgttttcgcgagttctggatcgaacgtccaaaaccaaccgacaaacgtctgacaatttatgcgctgctggactcccctcgtgcgacaggcgcttatcgcttcgtgatcatgccagggcgtgacacggtggttgacgtgcagtctaaagtttacctgcgcgataaagtgggcaaactgggcgtcgcgccgctgaccagcatgttcctgttcgggccgaatcagccgtctccggcgactaacttccgccctcaactgcatgattctaatggcctttccattcatgctggtaacggcgagtggatctggcgtccgctgaacaacccgaaacacctcgccgtcagcagctttgcgatggaaaacccgcagggctttggtctgctgcaacgtggccgtcagttctcccgctttgaagatctggacgaccgctacgatctgcgcccaagcgcctgggttacaccgaaaggcgactggggtaaaggcaaggttgagttggttgaaattccaaccaatgatgaaaccaacgataacatcgtggcgtactggacaccggatcagctgcctgaagccggtaaagagatgaacttcaagtatgcgatcaccttcagccgtgacgaagacaaactgcacgcaccggataacgcgtatgtgatgcagacgcgtcgttctacgggggacgtgaagcagtccaacctgattcgtcagccggatggcacgctggcatttatcgtggacttcaccgggcaggatatgaaaaaactggcgccggatactgccgtgacggcacaggccagcattggcgataacggtgaaatcgttgagaacgccgtgcgttacaatccggtcaccaaagggtggcgtttgaccctgcgcgtgaaggtgaaagatccgaaacagaccactgaaatgcgcgccgcgctggtcagtaacgataagccgctgagtgaaacctggagctatcagctacctgccaatgaataa

SEQ ID NO: 119483 - DNA, 1185 bp, Enterobacter cloacae
atgtttaaaattgtccatttcctgctggcgctggtgattattcttgcgcttgcctggctggtgagtttcgaccgccgaaaaattcgcattcgtttcgttttacagctgatcgtgattgaaatcgcgctggcattcttttttctgcatgcagaaagcggcctgttcattattaaacatgtctccggtttctttgaatcactgcttaaattcgctgccgaagggacgaattttgtctttggcgggatgggtgaaaaagggctggcgttcattttccttggcgtgctctgccccattatttttatctcggcgctgattggtattctgcagcactggcgtattctgccgatctttattcgggttatcgggacgctgctgtcaaaactgaacggcatgggcaagctggaatcctttaacgcggtgagctcactgatactcggtcagtctgaaaacttcattgcctacaagggcgtgttgggcgatctctcctcacgccgcctgtttacgatggctgcaacggcgatgtcgacggtttcgctgtcgattgtcggtgcctatatgaccatgctcgacgccagatttgtcgtcgcggcactgatcctgaacatgttcagcacctttattatcctttcggtcattaacccggcccgcccggaagccgaacccgatatcaaactggaaaagctgcatgaatcccagagcttctttgaaatgctgggcgaatatattctggccggttttaaggtggcgatgattattctggcgatgctgattggctttatcgcccttattagcgccgttaatgccctcttctccagcgtatttggcctgagcttccagcagattctgggttacgtgttttatccgctggcgtggcttattggtattccgctgagcgatgccttaaacgcggggagtattatggcaacaaaactggtggcgaatgaatttgtggcgatgattgagctgcaaaaaatagcccatcaaatgtccccgcgcggtctgggtattttgtccgtgttcctggtgtcgttcgctaacttcgcctcgattggcattgtagcgggggcaataaaaggcctgaacgagcaacagggtaacgtggtgtcgcggtttggtttacgcctggtgtacggggcaacgctggtgagcctgctgtcggcgagctttgcggggttggtgctctga

SEQ ID NO: 119484 - DNA, 606 bp, Enterobacter cloacae
atgcctgtttatcaaattgatggtctgacgccggtcgtgcctgaagagagctatgttcacccgaccgcggtgctgattggcgacgtgatcctcggcaaaggtgtttacgtaggccccaacgccagcctgcgcggtgattttggccggatcgtggtgaaagacggcgcgaacattcaggataactgtgtgatgcacggttttccggagcaggacacggtggtggaagaggacgggcatatcggccacagcgcgatcctgcatggctgcattatccgtcgtaatgcgctggtggggatgaatgcggtggtgatggacggagcgacgatcggcgaaaacagcatcgtcggggcggcggcgtttgtgaaggccaaagcggaaatgcctgcgaatcacttaattcttggcagtccggcgaaagcgattcgtgagctaagcgcgcaggaaatagagtggaaaaagcagggcacgcgggagtatcaggtgctggtggatcgctgtaagcagacgctgcatcaggtagagccgctgcgggaagaagagcccggccgcaaacggctggtattcgatgagaacttacggcccaagtcggctggccgggataattaa

SEQ ID NO: 119485 - DNA, 1998 bp, Enterobacter cloacae
atgagtgaaaacgacactatcccaaagcagtccaaaagccagattaacaaagcggtattttacacatctgctttgttaattttccttcttgtcgcctttgccgcgattttccctgacgttgccgataaaaactttaagctactgcaacagcaaatattcaccaacgccagctggttttacattcttgccgtcgcgctgattttaatgagcgtgacgttcctcggcttgtcccgctacggcgatattaaactcgggcccgaccactcccagcctgacttcagctaccactcgtggttcgccatgctgttctcggcggggatggggatcggcctgatgttcttcggcgtggcggagccggtcatgcactacctttccccgccggtggggacacctgaaacggtcgctgcggccaaagaggccatgcggctgacattcttccactgggggctgcacgcctgggctatctacgccatcgttgcgttgattctggcgttcttcagctaccgccacggcctgcctttgacgcttcgttcggcgctttatccgattatcggggaccgtatttacggcccgctaggtcatgcggtggatatcttcgcggtaatcggcaccgtatttggcgtggcgacctcgttaggttacggcgttttacaggtcaatgccgggctgaaccacctttttggcgtgcccatcaacgataccgtgcaggtgatcctgatcgtcctgattaccgggctggcgaccatttctgtggtgtccggtctggacaaaggcattcgcattttatcagagctcaatctggggctggcggtactgctgctggtgctggtgttgtgcctggggccaaccgtactcctgctgaaatcctttgtggaaaataccggcggatacctgtccgagctggtgagcaagacgtttaacctgtacgcttatgaaccgaaatccagcaactggctgggaggctggacgctgctgtactggggctggtggctgtcctggtcgccgtttgtcgggatgttcattgcccgtgtgtcccgcggcagaaccatccgcgagttcgtgaccggcgtgctgtttgtcccggcgggctttaccctgatgtggatgacggtgttcggcaatagcgccatttacctcatcatgaacaagggagcgtccgatctggcgaataccgtccagcaggacgtggcgctggcgctgtttaatttccttgagcatttcccgttctcttccgtgctgtcatttatcgccatggcgatggttattgtcttctttgtaacctccgctgactccggggcgatggtggtggataccctcgcgtccggcggcgaggccaatacacccgtctggcagcgcatcttctgggccgcgctgatgggcgtagtcgctatcgcgctgctgctcgcgggcggactgagtgcgctgcaaaccgtgactatcgccagcgcgctaccgttctcgatgatcctgctggtctcaatctatgggttgctgaaggcgctccgacgcgatttgaccaaacgcgagagcctgagtatggccacgatcgcgccgacagcggcccgtaaccccattccgtggcagcgcagactgcgtaacatcgcctacttacctaaacgctccctggtgaaacgctttatggaagaggtgatcaaaccggccatggtgctggtgcaggatgaactgaataagcagggaacgcagagccatatcagcgacgcgtcggacgatcgtattcgccttgaggtggatttaggcaatgagctgaatttcatttatgaagtcaggctgcgtggctataactcgccgaccttcgcgctagcggccatggagaatgatgagaatcaggcagaacagcaccggtactatcgggcagaaatctacctcaaggaaggtgggcaaaattacgatgtgatgggctggaaccaggagcagttaattaacgatattctggaccagtatgaaaaacatctgcacttcctgcacctggtgcgttaa

SEQ ID NO: 119486 - DNA, 753 bp, Enterobacter cloacae
atgggaacggcaatattcatggtattgatggtatgcggctactggtacaccagccgcgatctctcaacacggttcaaaattaagcgttcattcggctgggatgtctatttccttgtggcgctgtatggctgcattttcgttttacagggcgtgatcgccaccggcctgctctggctgctgttgttcgccctctcggccgccgacaacacgttccatttcacgtccgcaaaatacgccgactggcaaattgattttatgaactggagctttttagggattcaggctccggtcgtggtgatgctggcctttgcgatcctgttttgtctctatcgttctaactgggccggcagcgcgcggctggacggcgaaggccggaaaaagctctacaagcggctggcgcaatcgagcgggattgaacaactgctctatcagtgcatggaggaaggtgaacttgcgcacgtcacgctgaagtcgcggcggatttatattggcatgatccatagcgccacgctggagtatgaaaaaaccgccaatatcgtgcttatcccgatgctgagcggctaccgcgacggggagaacatgcagctgtgtattgagcacaactacagcaaatggtacgccgagcatgaggttacgctcgactcagagccaaaaagcgctatggatttccgtaaggtgatcatgcttgatcagatcgagagtatttcgctgttcgatccggcaagtgccagcgcgctggcgatgcgtgaataa

SEQ ID NO: 119487 - DNA, 486 bp, Enterobacter cloacae
atgaagcgctacgggcaggtctttctgctggccatcgggtttgatctctactggacgctggtggtgctgtttcgcgagcaggggctggtcatctggatcgcgctggcgctgattgcctggctgttgttaccgccatcacaccgggtatacgcccttgtgctggcggcgtcgggcgcgatgctggacgccctctgggcgctgacggggctgatttcattcactggcacgtctctgatgccgctatggatggtggcgctgtggctgatgtttgccaccgtctggacgcaactgacccgcacgaccaccttgccgggctggctgctgacggcgctggcgaccctgggggggccgctggcctacctgtttggcgagcgtctgggggccatcacgttcctggagccgacttttatcgtcgtcagctggatgatcccgggctggctggtgctgatgctgtttttccacctgctgatggggagacaacaatga

SEQ ID NO: 119488 - DNA, 525 bp, Enterobacter cloacae
atgagacatctgttactcgcgctcgcgcttaccgttatggcctataacgcgcaggcgactgactggctgagctggcgcaaggtaggcgatgccaccctcacctgggggccgtttaccgtttatacctctcaactgctgacgcccgacggcagctatacgggaacagacagcgataacgcgctgattatcacttatgcccgggatatcgatggcgacgacctggtcgaggcgacccgtgaccagtggcaggcgcagggcattttgcagcaggagccgcagagtgaagcctggctgcggatgctaaaagcgctctggcccgacgtcacgcccggcacgcagctcgcgtttgtggttaataacggtcaggggcaattctggtatcgccccacggctttgcagaaaaaatttacgcccctcgggccgcgccagtcggcagcgtttagctcgcgctttctggcgatctggctcgatccccgcaccgagtatcctgaactgcgtcagcagttaatcggaggaccacaatga

SEQ ID NO: 119489 - DNA, 660 bp, Enterobacter cloacae
atgcaacagcagtggtgttcagtagataattacatgatttcgtcgcttattcctgaagatgaagttctccagaacgttcttgaaaacaacaaacgcgccggtttacccgagcacgacgttgccgcaaatcaggggcaactgctggcgctgtttgtccgcatgacgcaggcgcgtcgaatactggaaatcggtacgctgggcgcgtatagctcaatctggatggcgcgcgccctgccgccggatggaaagctgattacgcttgaagcggacccgaaacatgccgctgttgcacgccagaacattcaccttgcgggactcagcgatcgtatcgaactgattacaggcccggcgctaaagtcgctcgagaatttcggtgacgtcccgccctttgacctgatctttattgatgccgataagccaaacaatcccggctacctggagtgggcgctgcactactcccgtcccggcacggtcataatcggcgataacgtggtgcgcgacggcgaggtggttaacgggcaaagcgacgatgcacgcgtgcagggggtacggaagtttatcgagatgactggagataacccacgcttaaccgccaccgcgctgcaaacggtgggcgttaaggggtgggatgggtttacgctagcgatggtggaacgataa

SEQ ID NO: 119490 - DNA, 1320 bp, Enterobacter cloacae
atgacacaacatgagagcacgacaacggtattgcggaaaaacaaaaaggtattaattgccagtcttacgggaagttctattgaatggtttgattattttctctatggcaccgctgccgcgctggtgtttaacaagattttctttccgatggtcgacccggtaatcgggctgatcctctcctatctctccttctcgttgaccttttttattcgccccattggcggcgttctctttgcacatatcggggatcgtatcggtcgcaaaaaaacgcttgtcctcaccctttcattgatgggaggtgcaaccgtgatgattggcctgctgcccacctacgacatgatcgggatgtgggcgcccgcgttgctgatcctgatgcgtattattcaggggatgggtatcggcggtgaatggggtggcgcgctgctgctggcttacgagtatgctccagaaaaacgcaaaggcttcttcggcagtattccgcaggcgggcgttaccatcggcatgttgatggcgacatttatcgtctcgctaatgacgctgttcagcgaagaggattttctctcctggggctggcgcattccgttcctgctcagttccgtgctggtaatattggggctttggatccggaaagatattgacgaaacgcctgatttccagaaagtgaaaaaatccggtcaggttgcgaaagctccgctgcgcgacaccataaaacaccactggcgtgaagtgctaattgccgccgggcttaaggttgttgagacagcaccgttctatattttctccacgtttgtggtgagctacgccactaccaccctgacctatcagaaatcccaggcgctggaggcagtaactcttggcgcactggtcgccactattatgatcccgctgatggggctgctctcagacagggttggccgccagcgtatgtacgccgtcagtgtcttcgtgctcggcctgtttatcgtgccctggtttatgctgctgaataccggcaccacctggggaattgtgctcgcgaccgttatcgcttttggcgtactgtgggcaccggtgacggcggttctcggcacgctctgctctgaaattttcagtgccaacgttcgctacaccggtatcacgctgggttatcaacttggggccgcgctggcgggcggaacggcaccgctaatagctaccggactgctggcgaaatacgacggcgactgggtacccgtggcctggtatctgggcgtgacggtcgctatctccctcattgcaattttttgtgccagccgcatcaaccgtgaacgccaccttcaggcgcagccggaacagcgataa

SEQ ID NO: 119491 - DNA, 414 bp, Enterobacter cloacae
atgaataaaactcctcaccctgtgtttgccaaaagaatccatcaagtgatggaggaaaacggctggagcatggctgatttagccaggcgcgtgatgctttcacatacttcagtgcgtaaatgggcgaatggtgcagcagcagcaagcggcgagcgccttaaaaggctgtcagccgtaaccggcagacctgagtactggttctttatggaaccgggtacagaaggggagaatggagaagaacttccgacattacctcgcgttcttgatgaacaggaacaaacgttgttatctctgtttaatcagttgcctgaagctgaaaagctccgtttgatcattcacaccaggggtgtggtgaaagaaatggacctactgaagaatgatgtctacgacataatgaacgatctcaagaaatag

SEQ ID NO: 119492 - DNA, 231 bp, Enterobacter cloacae
atggataaccaacttaaagacaaaatcagtagccacatgacgcaagtaggcataggagagtgcttcggaatttcatcgcaggctgtcggtaagtggcttcggaaaggaaaaattcctcacggccgaattctgcccctttgtcggattcttgagtggcaggttaccccacatgaaatcgacccagtggcatatccaaatcccacagacgggctgccaaaacaggagtcctga

SEQ ID NO: 119493 - DNA, 984 bp, Enterobacter cloacae
atgtcaaacaccgctgaaatttacaaattccccacgcaagaggggaagcaggagagtcgcatggctgaactggagaacggctatttgcgtttagccaaccagatccaggatgccctgtgtatcgtcgagctatcaggccgcgaattccgcgttctgaacgctatcgtccgtctgacctatggctggtccaaaaagtcggacaggatcgccaacagcctcattgcggacaaaacaacgctgaaggtgaagcacgtttcagaagcggtactgagcctcgcttatcggaacatcatcatcctgcggcgcattgggcaaaccagatacattgggattaataccaacctggataagtgggcctacacaaaaccaaattgcacaagatgcccagcggctttcccggctgctgaagttatcacatgggttatttcaatccctgaagtcagtcattaccacccccaaaaacagggatggttatccccgaaaacagggatggttatccctgaaaatggggatggtgaaaataaccgtcaaaccatccctgaaaacggggatggttatccccaaaaacagggaaagggatccccgaaaacagggaacaccaaagacattcttccaaagacaaatataaatacagatcttaccccctctaatcccccaaaggggaagagtaagtttgacccgctcagtgtgccgatccctgaatggctgaatgcgacgtcttgggaggaatgggtcacataccgtcgccaggccggtaagcccattaaaaccgagatgacagtgaccaaggctttcaacctgctgaaagagtgtctggatgaaggccacgatccggtagccgttataaacgcgagcattgccaatggttatcagggcctgtttaaaccgaaattcgcctttggcggcagtaaggctggtcgtgatgtgaaccagatatccaagcctgacagcaaaattccaccgggtttcagggggcatcaatga

SEQ ID NO: 119494 - DNA, 753 bp, Enterobacter cloacae
atgaaaaacgtaatcggtactggcagcgcactcgagcgcctgaagaagattatcccggccagcgttcagccaaaattcaccagcgttgaagagtggcaggcatggcaggaaaccgaaggtcgtaagcggtccggcgaaatcgacaagatgaaccagcgcgcccgctcagaaaaaatctttggtcgtgccggcatccaggcactgcatcgcagttgctcgttcgcgaattacgaggtgaatgggccggagcagcgccaggcatacagcatggcaaaaagctacgcgcagaacttcggcggcggcagcttcgcaagctttgtgttcagcggcgcgccgggaaccggtaagaaccatcttgcagcggcaattggtaattatctgctgggcgctggccactccgtcctggtggtgaccatccctgacctgatgctccgtgttcgcgagtgctacgacgacgggcagtccgaatcgtccctgctaaacgacctgtgtaacgttgatctcctggtgctggatgaggtcggtattcagcgcggctccagtggtgagaaggtcatcatcaatcaagtcattgaccgtcgactttcctcgatgcgtccggtaggcatcctgaccaacctgaaccacggcgaactggtgaacaccctgggcgctcgcgttatggatcgtcttcagatggatggcgggatctgggtgaatttcgactgggaaagttatcgaaaaaacgtgtcgcatctgcgtcctgttaaataa

SEQ ID NO: 119495 - DNA, 333 bp, Enterobacter cloacae
atgagcacaattaccaaagaattcaccaaagagcagttgattgcgcgcacagaaatgcgactcgctatggttgccggattccctgagagcaagctggcgcagatggataaatgcctggctaaaatcgctcaggcagtgttgaaggccgagccgttcctttatgccatagctgattctgaaggtgaggcgcatttagatgagttctgcgttgcttatggcgaggacgccttagtctcagaaattagcgccctcaacgaaatggcagaatcaccgggagaggaatacaaagcggtacctgtgtaccggctaccaatgctggagggattgaagtga

SEQ ID NO: 119496 - DNA, 687 bp, Enterobacter cloacae
atgaaacgctccgacatcaatgaaatcctcggccacacgcggcagttcttctccatgcacggcgtgcatctcccgccgtttgccagctttccgccgacaaaatggcagcagcttgaccaggcagcatggcaggaggtgtttgacctcaggctcggctgggacgtgacggcatttggtggcaacaacttcgctgcacaggggttaacgctgttcaccctgcgcaacggctcccccaacggcgtgccctatgaaaagtgctatgccgaaaaaatcatgcacgtccgcgacggccaggtgacgccgatgcattttcactggcgcaagcgggaggacattattaaccgcggcggcgggaatctgattattgagttatggaatgcgggcgcgcatgaagagaccgaaaacaccgacgtgaccgtcacgatagatggctgtcggcagacgcacatgcccggcagccagctgcgcctcacgccaggggagagcatctgcctgacgcccggcctgtaccacagtttctggggtgaacgcggctttggtgacgtgctggtgggcgaagtgtcgtcggtcaatgacgatgaacacgacaaccactttttacagcccattgaccgctacaacaccattgaagaagacgaaccggcggtgctggtgctgtgcaacgagtacaccctctttcggatataa

SEQ ID NO: 119497 - DNA, 942 bp, Enterobacter cloacae
atgagattgaagcccttagtgaccgcgctctgtgctggcgcgctgctggccgcaaccccgtttgcgcaggcaaaagatctgaaatccatcggcgtgacggtgggtgacctggctaacccgttcttcgtgcagatcaccaaaggtgccgagctggaagcgcgcaagctggcgggggacaacgtcaaggtgacgctggtctccagcgggtacgatctgggccagcaggtgtcgcagatcgataacttcattgcggcgaaagtagacatgatcatcctcaatgccgcggattccaaagggatcggccccgcggtaaaacgcgctaaaaaggcggggatcgtggtcgtggcggtggacgtggcggcggaaggggccgatgcgaccatcacctccgataacactcaggcgggagaaatggcctgtaagtacattaccgaccgcctgaaaggtaaaggcaacgtggtgatcatcaacggaccgccggtttctgcggtacaaaaccgcgtggagggctgccagaccgagttcaggcgccacccggatatcaaagtgctctcggataatcagaacgccaaaggcagccgcgaaggcggcctggaggtcatgacctccctgctggctgccaatccgaagatcgacggcgtattcgcgattaacgatccgaccgcgatcggcgccgatctggcggctaaacaggcgcaacgcaatgaattctttatcgttggcgtagatggcagcccggatggtgaagaagccctgaagcgcgaaaactcgctgtttgttgctaccccggcgcaggatccgcaggtgatggcggcgaaggcggtggagatcggctatgacattcttcagggcaaacctgcgccgaaagagcccgtgctgatcccggtgacgatgatcgataaaaagaacgtcggcacatataaggggtggacggttaagtaa

SEQ ID NO: 119498 - DNA, 996 bp, Enterobacter cloacae
atgacaactccaacccatccgcagcaggtggcgaaatccgcctccgccaaaaaaatgctgatgagcgatctgatgcaaacgatcggcattttgccgattttaatcctgattgtggcggtatttggctttatcgccccgaactttttcaccgagagcaacctgctcaacattacccggcaggcgtcgatcaacattgtgctggcggccgggatgaccttcatcatcctgaccggcgggattgacctctccgtgggctcgattctgggcaccacggcagtggcggcgatggtagtgtcgcttatccctgaatttgcgatgctctccattccggcggcgctgatgctcggtatggtgctggggctgttcaacggtgcgctggtggccttcgccggacttccgccgtttatcgtcacgctcggcacctatacggcgctgcgcggcgcggcctatctgctggcggacggcacgacggttattaactccaacattaacttcgagtggatcggcaataactacctcggcccgattccgtggctggtggtgatcgccctggcggtgattgtggtgtgctggttcatcctgcgccgcaccaccctcggcgttcacatctatgcggttggtggcaacatgcaggcggcacgcttaaccggcattaaggtctggctggtgctgctgtttgtctacggcatgagtggcctgctctcgggcttaggcggcgtgatgagcgcttcacgtctctacagcgccaacggcaacctcggcacggggtacgagctggatgcgattgcggcggtgatcctcggcggcaccagcttcgtcggcgggatcggcacgatcaccggcaccctggtgggcgcgctgatcatcgccaccctcaacaacggcatgacgctgatgggcgtctcctatttctggcagctggtgatcaaaggggcggtgatcatcatagcggtgctgatcgacaaataccgtacccgacaccatcaaagtgcataa

SEQ ID NO: 119499 - DNA, 2280 bp, Enterobacter cloacae
atgtcttcacgccccccgttcttcaccagcgcccgcggacgcctgctgatttttaatctgctggtggtcgccgtcacgctgatggtgagcggtgtggcggtgctcggctttcgtcacgccagccagatccaggagcaggtccaacagcaaacgctggatgacatgaccggcagcatgaacctcgcccgtgataccgcaaatgtggcaacggcggcggtgcggctgtcgcaggtggtcggtgcgctggagtacaaaggcgaagccgagcggctgaaacagacgcagatggcgctgcgccactcgctggatcaacttgccgatgcgccgctggcgcagcaggagccggcgctggtggcgcgaattattcgcaggagtaatgaattacagcagagcgtgacgggaatgctggagcgcgggcaaaagcggcatctggagcgtaacgcgctgctcagctcgctctatcaaagccaaagctacctgcgtcatttgcaggatatcaaccgccgttacgcgagcaatgtgccagacgcccgacagcttgcagagatggacaggctgatcgttgccgccattgataccccttcaccgcgcgccacggtgcagcagctggatgcagtaaccgcggggttacccgcgagcgccctgcaaccggtggccaacctggtgctcccggattttaatgatgagctgcgcaagctcgcaccactgtcgacgcagctggaggagagcgatctgtccatcagctggtacatgttccacatcaaggcgctggtggcgatattaaacagcgacattaatcagtacgttgaacaggtggcgcaggcttcccgtcttcgcacggcccagagccatcacgagctgcaatccatcagcgtgtttatcagcatcttcgcggtgctggcgctgatcatcaccggctgtgcctgctggtatatttaccgcaatctgggctccaacctgacggctatctcaagggcgatgtcgcgtctcgctcatggggagcaggatgtgtcggtgcccgcgctacagcggcgtgatgagctgggggaactggcgcgcgcgtttaacgttttcgcccgcaataccgcttcgctggagcacaccacgcggctgctgaaggagaagacctcacagatggaggttgaccgcatcgaacgtcaggggctggaggaggcgctgctgcacagccagaaaatgaaggcggtcgggcaactgacgggtggcctggcgcatgattttaataacctgctggcggtgattatcggcagtctggagctgaccgattcggcatcaccggacgcgccgcgcatcacccgtgcgcttaaagccgcggaacgcggagccatgctcacccagcgtctgctggccttctcgcgcaagcaatccctgcaaccccatgcggtagagatgaagccgctgctggagaacctgagcgagctgatgcggcactcgcttcccgccacgctgacgctggatattgaagcgcaaaccccagcgtggcccgcatggattgacgtcagccagctggaaaacgccattatcaacctggtgatgaacgcccgtgatgcaatggaggggcaatacggtgtgatcaaaatccgcacctggaaccagcgtgtgacccgcagcgacgggcgcaggcaggatatggtcgcgctggaggtgattgaccacggctgcgggatgtcgcaggaggtgaaatcgcaggtctttgaaccgttcttcaccaccaaacagaccggcagcggcagcgggttagggctgtcgatggtgtacggctttgtgcgtcagtccggggggcgcgttgagatcgaaagcgcgccggggcagggaaccaccgtgcggctccagctgccgcgctcgacgctgcccgcgttctccgatgatgccgcgctggcgaccacgaccccggcagaaagtgagctgcttgtgctggtcctggaagatgaggcgggcgtgcgtcagaccctgtgcgagcaactgcaccagcttggctacctgacacttgaagccgaaaacggcgagcaggcgctgaacatgctggacgcgtcgccggatatcggtatgtttatcagcgacctgatgttgccgggcggcctgagcggtgcggaggtgatcggccatgtacgcagccactatccgcagttgccggttctgctgatcagcgggcaggatttgcgcccggcgcataacccgcagctgccggacgttccgttactgcgaaaaccgttcacccgcgcacagctggcgcaggcgctgcgcaaggtgagggtaatttga

SEQ ID NO: 119500 - DNA, 1137 bp, Enterobacter cloacae
atgattatcaataacgtcaggctggtactggaaaatgaagtcgtgaacggctcggttgaggtccgggacggtgtcatccgcgcgtttgctgaaacccagagccgctcaccggacgcgatggatggcgaaggcggctggctgctgccggggctgattgagctgcataccgataatcttgataaatttttcacgccccgcccgaaggtcgactggcctgctcattcagcgatgagcagccacgacgcgctgatggtcgccagcggcatcaccacggtgctggacgcggtggcgatcggcgacgtgcgcgacggcggcgatcggctggagaacctggagaagatgatcaacgccgtggaggagacgcaaaagcgcggcctcaaccgcgccgagcaccgcctgcacctgcgctgcgagctgccgcaccacactaccctgccgctgtttgaaaagctggtgggccgcgagccggtctcgctggtttccctgatggatcactcgccggggcagcgccagttcgccaacattgaaaagtatcgcgaatactatcagggcaaatacgcgctcaatgatgccgagatggcgcgctatgaagaagagcagctccagcttgcggcgcggtggtcgcagccgaatcgtctctccattgccgcgatgtgccgtgaccgtaatattgccctggccagccatgatgacgccacgcacgaccatgtccgagaatcccaccagcttgggagcgtgatcgccgaatttcccaccacgttcgaggcggcagaggcatcgcgtaagcatggcatgaacgtgctaatgggtgcgccgaacatcgtgcgcggcgggtcgcactccggaaacgtggcggcaagcaagctcgcctccctcggcctgctggatatcctctcatctgactattaccccgccagcctgctggacgcggccttccgcgtcgcggacgacgaaggcaatagcttcacgctgccgcaggcgattcgcctggtgacgaaaaacccggcctcggcgcttaatcttcacgatcgcggggaaatcgccgaggggaaacgggccgatctggtgctggcgcaccgtaagggcgagcacattcatatcgaccacgtctggcgtcagggaaaaagggtgttctga

SEQ ID NO: 119501 - DNA, 330 bp, Enterobacter cloacae
atgcgacaagtgacagagtttatgcctgatattgatttgaatgacgtgattaaggcgctgggaaaccctgttagaagaaaaattctgcatatgctcaaggaaccgaaaatacacttccatcagccttatgctgatgcggacgagttcggtgtgtgtgtcagtatcattcaggaaaaggtcgggctctcacagtctaccgtttctctttacctctcagctcttcaacgggcacaacttgttacttctcagcgcatcggtccctggacgtactacaaacgtgacaatgataaaataagggttgttcttgagttgctgaaaaatacaatctga

SEQ ID NO: 119502 - DNA, 1125 bp, Enterobacter cloacae
atgaagacgaaaaacctgttctctcccaccagactaggtccctacaccctgaagaatcgtgttgtacttccgcctttaacccgctcacggagctcacaaccgggtgatattccgaacgaactgatggctgaatattacgcacagcgcagcagtgccgggtttatggtgaccgaaggaacacaaatcgaacctcgtgggcagggttatgcgtggaccccggggatctacagctcacggcaagtggaaggctggaagaaagtgacgcgggcagtgcatgaaaaagaaggcatcatttttgcccagctctggcatgtcggaagagtatcccataactccctgcagccatgtaacgcctcgcctgtcgctccgtcggcgataccggcaggggaaaacgttaaggtattcatcgaaaccgggccgggagagggtgcgctggctaccgcttcctgcccccgcgcactggaaaaagaggaaattagtgagattgtcaggatgtacgccggggcagctcagaacgcccttgatgccggttttgacggtgtggaaattcactgtgcaaatggatacctggttaaccagttcatgtcatcccatagcaacaaaagagaggatgaatatggtggctcattacataaccggctgcggtttctgcgcgaagtgacgcaggctgtcgctgatgtggtcggtaaagaccgtgtgggagtccgttttgctccgctctttcagaccacggatgaagtaagggtctatcttggcctggtggaagatgatccccatgaaacctataccgaagccgttaaaattcttgaagaaatcggaatagcctatatttctcttgctgaagccgactgggatgatgctcccgaattgcctgaagcattcagagctgaagtccgtaagttattcagcggtgtaattatgtatgccgggcgatatacgcaagaaaaagccgaacggattatcggtgctggctggggagacattatcggatttggccgcccgttcatagctaatccggatttaccgcagcgcctttatcatgaatggccactgaatccggtcgatccaacaaccatgtatggtggaacggcaaaaggctacacagattatcccgcctttggctaa

SEQ ID NO: 119503 - DNA, 795 bp, Enterobacter cloacae
atgccgttacttatgcgtacaaccaggcgggtggctgtcaccgaagccggtaaacaattattactgacgcttgaacccggtcttgcgcgcattgaagcgggcgtgacagctcttcagagactgcgccatacaccggctgggctggtcagacttacggtatcagatcacatgattcatgaatgtctctggccacgattgtcaccgttactaaaaaaatattcggatatcaaggtggaaatgtcgcagcagaacggttttgtcgacattgttgagggcaattttgatgccggagtccgaattggtgatgacatattaaaggatatggtggccgtccgaatcgcaccggacatacggtttgtcgtcattggatcgtccacctatcttgcagaaagaggtctgccgctacatccctctcagctggaaaaacatgactgcatcaatatacgtctgtcacccacaggcccgctgtatggctgggaatttgtcaggcagggggagattgtgaaaaaagtggacgggcagcttactttttcaagcatttatccaatgcttcaggcagtaaaagatggctacggcctggcctacctgccggagtcttctgccctggcggggattgaggcgggacactattgtcgggtgcttgaggactggtcagaggcttttcccgccgacatgataattccaataatgtccattacaggctccggtaaagataataccgacaccttacatgagaaaggcaaaagcaatataacctgctgtgctccggattttaagaatgagcggtttacgtag

SEQ ID NO: 119504 - DNA, 876 bp, Enterobacter cloacae
atgacttcacaactgaactggcaggccccggctatcaatcgcaaaaaagtaggtgacatgactgtgaccatgctgagtgatggctatctggacgtatcttttgagctgctgtctggtattgacggctcacgtgccgaggatttactgcagaagcgcggtgtgccagcagtaccccgtattaatatcaacgtctacgttatccagacgcctgagcgaaccatcctgattgacagtggtgccggaggtatcaatggctggggcggtcggcttcaggtagccctggccgcggcaggcattgacccgcttcagattgatacccttctcctgactcacgcgcatcctgaccatatcggcgggcttgcaggccccctgcagactcccgttttccgcaatgttcagcagttgtttgtgcatgagaaagaactcgctttctggcgtgatgaaaccatttccgctggcgcgcctgacgcattcaagccgttctttgaagtagcaaggaacgccttcagcgcttatgacgacaaactggtgccattccgcgaggaagcgattttaccaggtattcagactgtaccgctgttcggccatacaccaggacataccggttatctgctgggtgatgaaaaagagtcgctgctcatctggggtgatattgttcacttcccgcacattcaggttgctcagcctgacgttactatcgcgttcgacagcgatcctgcggcggcggcggccatccgtagcaaagtgcttgaccgcgcagcgagcgataacctggctgtcagtggtatgcacttcaacctgcctactaccggtaaggttatccgtgaaggtaacagcttcgcactgaattacgacctgtggtcacccgcagtctga

SEQ ID NO: 119505 - DNA, 852 bp, Enterobacter cloacae
atggctcattactcttgcgccctggctttttgtattcctctggagtcagggtttgtcgcagccaaatttaccgtgcagtacagcgcgccgtttcatcttttattcctgcgtggcgcattttcctgtctggtccttctgctgcttacactggggttcagggcccgttttccgtccggcagaggaatggttcgcaacctgattgtcggacttttcctgcagagcttctttctgggcggatgcttttatgccatccatcgtggcatgccgtcaggcattgtggcgctcatcaccggcctgcagccggtactgactgcaatactggtttcactcatgcaccgtcagtccctgcatccccggaaatggctgggtattgcgattggctttgcgggcgttttcctggtgctctcgccaggccagcatagttttgcactggatcctgtggcttttgggtcggtcatgctggggttatttggcgtaacgatcggagcgctttatcagcgccgtgctcagggagatggacatatctttgcgaacacgtttttacagtacgtcactttgacaatatcgatgggtgcaattagcctgatgttcgaatctgctccgacgcagtggagcttatcatttgcgctgggtctgggctggctggttattggcgtatcggttctggcgattatgttgctgatttttatgatacgaagcggtgaagcaaccaaagtcgctacttacttttacctggttcccattctcacggcagctgaagcgtggttgctgtttggagaggccattacattgcccatgcttgtgggtatggcaataactataatcggcctgatttttgtcatccgggaatag

SEQ ID NO: 119506 - DNA, 837 bp, Enterobacter cloacae
atgcaaacagtcagcttttccgattctcccgttgatgatctcctcgctgagcttcttaccctggcacgctcccgttttccacttccctgcgattgccttcgcgcagaacagacgcatcaggtaaagaagttcgaggtggaaggtgcgaccctttccttcccgctggaaggagaattccggtatcgtgaaaatgagaaatggcaccgggtgatcccgggcgagattatggtcgtcccgaatgcccgtagcatcgatatagaatatgccccttcagaacaaagtggtgagtttgttgccctgagcgtggtgctcgcggaggaacagcttgaagcagccaggctgttacttgccgcaccaccaccacaggacaccggcagcatcgcagccatttccgtatcagctcttctttcaccccttaaccgctggacagccgcaatgcgggaagggaagcgtccgctttccctgcacgccatggttgaagtggtgctctggctttatggcatgggataccatgctttgctgcgagcccggcagccaagtctggccatgaaaatccgtcagatggtagcggacaaaccggctcatccctggagtgctgctgaaattgaagatctgacgggactcagtggccccacgcttcggcgccacctggccagtgagtcaaccagcttacgctcagttatcgccgatgcacgtatcgcggaggctctccgcctgctgatgacatcgacgctgccggtaaaaacggtcgcggggcgggtgggttacaattcactatcgagcttcagcaagcagttttctgaacgctatggaatcgaaccttcagggttccgctga

SEQ ID NO: 119507 - DNA, 660 bp, Enterobacter cloacae
gtggttcatgttttcattatcggtggtgcaggcaaaatcggccagcgtctgtgcaggatcctttcaggtagggggcatgctgttcgtgccctctaccgtaagccagagcagcaggcattgctaggcgagctgggtgctgagcccgtcagtgggagcctgacagagctggatgcagctgcgctggcgatgcactttgcaggtagtgatacagtggtgtttactgccggtgccggcggtaaggggggacaggagatgaccaatgcggtcgacggcgaagggctgaaaaagtcggtagctgccgccctcagtgccggtgtgtctcgctttctgctcgtttctgcattcccggagtccgcacggggagaaaccacttctgaatcattcgaaaattatatgcgtgttaaaaaaatggccgatgtggaactagcacaaagcgagcttgactgggtgatcctgcgccccggcgcgctgcaggataagactggtacgggttatgtacgtgccggcctggccatcccgtatggtaacgtgccccgtgatgacgtggcggctacgctggctgaactcattgagcaacctgccgtcagccgcgtcatcattgagctgacgtctggcgatgctcctgtccgtgaagccatacagaagctggcgggccgataa

SEQ ID NO: 119508 - DNA, 582 bp, Enterobacter cloacae
atgtttaatatggcagaactttcctgtcgctatcattttgacgcccgctattcgctcatagatatgcctgtcgcgtttgcggctttacttgttatacccaacctgcctgatttttatcgccagcatcccggaattgaaattatcctgagcagctcagaccgccgacggaatatgctgcatgatggcctggactgcatactgagggtgggggagctggacgatggcgactatatcgcaaaggaggtgggaaccgttaaaatgacgacctgcgccagtcctgcgtatcttgatcaacacggcaccccggaaacaatggacgagttgcagcagcatcaggccgtcaactggattaacagcagcaacagacaagttatgccctggacattcgggacgtcagagggctccaccgaaattgaacttccaggcaggcttgtcgtggataactcagaagcctacattgcagcaggcctggcggggctgggaatactacagggcatgaatatttttttgcagccttatctcgatcgcgggctgttggtagaggttctgccagataatacgtccccgaatcgcaaactgtaa

SEQ ID NO: 119509 - DNA, 327 bp, Enterobacter cloacae
atgttagacgaatacaaaaaatgcatcgaagcctgttatctatgtgcaacggcatgtgataactgtgcggcttcgtgtctcgacgaagagaatctggagatgatgcgcgagtgcataaaactggatatgcagtgtgcaaatatctgccgtcttgcagctcaattcatgacactaaatagcgggtctgcccaggatctttgccgtctttgcgctgatgtttgtcagaagtgcggtgacgagtgtggaaagcatgaacatgaccattgtcaggattgctcaagcgcttgtcatcactgcgccgaacaatgcagaaagatggccgcctga

SEQ ID NO: 119510 - DNA, 1134 bp, Enterobacter cloacae
atgaaagcagtaatttacaacggtccttatgatgtaaaagtaaaagacgtaccggatgcgaaaattgtccgccccacggatgtactcgtccgcatcaccaccaccaacatttgtgggtcggacttgcacatgtatgagggccggaccagctttgaacagggacggattctgggtcacgaaaacctgggtgaagtggtcgaaattggctcaggcgttgaacgtattaaggtgggcgactatgtttgtctgccgtttaacgtgggatgtggtttttgcgaaaactgtgaaaaaggtctgaccggcttttgtctcactaccaatccgggtacggcaggcgcagcttatggttttgctgaaatgggtccctgggagggaggtcaggcggaacttcttcgggtgccatttgccgactttaactgccttgttcttccccctgatgcggcagaaaaagaagatgattatgtgatgctctctgacatttttcctaccggctggcatgcaacagaacttgccggattgaagcctggtgaaagcgtggccatttatggcgcggggccggtcggtttgatggcagctcattcggcgatcattaaaggtgcttcacaggtgtttgtggttgatacgcacacagaccggttggctctggctgaaaaaatgggggcgacgggcatcaatgctactggcgatgaagctgtacaaaaaattctcgacctgacggatggacgcggtacggattgtggctgcgaatgtgttggctatcagtgctgtaacaaacatggccatgaagataactctgttaccatgaacagtcttgttgcgtcgacgaaagcaaccgggggaattggtgtggttggcgtctttattcctcaggatccgggggctgaatcggagcttgccagagagggtaagatgccatttgattttgggagtttctggtttaaaggacaggcaatccgtaccggccaggcgaacgttaaggcctataaccgtcagctgtctcgcctcatccatcacgataaagccagtccgggcaaaataatttctcatcgtctttcgcttgaagaggctcctgccggatataagcacttcgatgagcgggatgaaggatggacgaaggttatccttaagccttaa

SEQ ID NO: 119511 - DNA, 303 bp, Enterobacter cloacae; identical to SEQ ID NO: 16869

SEQ ID NO: 119512 - DNA, 2652 bp, Enterobacter cloacae; identical to SEQ ID NO: 16870

SEQ ID NO: 119513 - DNA, 729 bp, Enterobacter cloacae
atgacgatgtgtcgggtactgaatgtcgcccgggccgggttctatgcgtggctgcataaccctgtctcggcgcgtgataaagataaccagcgcctgctgatgcttatccgcgactcatattccctgagcggaggcgtatacggttaccggcgggttcatggcgatctgaacgaaatcggggaaacctgtggtagaaaccgggtgggtcggatcatgcaactggaccggattaaagctgtgcgcggctataaagcgccacgtcgtatcgctggcaggccttcagtcgttgctcctaatctcgtgcagcggcagttcaccgttgtccgggccacccaggtctgggtcaccgatattacttatatccgcacctggcagggctggctgtatctggcggtggttatcgatctcttcgcccgtaatgtggtcggctggtcgatgaaacccactctctcacgcgaactggcgctcgacgcgctgatgatggcggtctggcgccgaaaaccagacagcgaggttatcgtacatagcgatcagggcagccagtacggcagtgacgactggcagcgcttctaccgggccaataacctggcgccgagcatgagccggcgtggcaactgctgggataatgcggtggccgaatcgttcttcagttcgctgaaaaaagaacggatcagaaaacgcatatataaaaccagggatctggcccgggcggatcttcgattacattga

SEQ ID NO: 119514 - DNA, 984 bp, Enterobacter cloacae
gtgtttaaatctttattaatcaacaaaacagatggacgctatagtgcgcaacttgctgaaatcgctgaaagtgaactaccgcagggggatgtggaggtcaatgttgactattcatccatcaactacaaagacgcactggccattacgggccggggcccaatcgtccgacgctttcccatggtgcccggcattgattttaccggtacagtgtccgccagttcacatcccgaatatcaggccggagataaggttctcctgaccggctggggtgttggggaaaaacactggggcggactatccgaaaaagcacgggtaaatggagactggctgacgccgctcccggctggcgctaacggcaaacacgtaatggcaatcggaacagctgggtttaccgcgatgctgtgcgtagacgcacttctgaatcatggtattaagcctgaagatggtccggtacttgttaccggtgccagcggcggcgtcgggagcattgcggccatgatccttgcatcaatggggtaccgcgttacggcgtctactgtacgcccggaagaggctgcctggctctataaaacggtcggtgtggacgagattattaaccgttccgagctctcctgtcccggaaaaccgttacagaaagaacgctgggctgccgccattgatacagtcggtagccatacgctctgcaatgtatgcgccggggtgcgttatggcagtattgttgcagcctgcggcatggcacaggggatggaactaatggggaatgtggctccgtttatcctgcgtggcgtcacgctgaaagggattgacagtgtcatgttcgcgaaggaaaaaagagcggcgatctggcagcaggcggtacagtatttaccggagtccagactggatagcctgaccaccgtttatccgctgagtgatgccatcaatgtggccgaaaaacttctgagtggcggaattcgtggccgggcagtaattcagtgtagctaa

SEQ ID NO: 119515 - DNA, 657 bp, Enterobacter cloacae
atgactggcgaaattcgtgggcgaggcaggccacgaaaaacagagagtacctatacagatacccgtaatgacctgatccgaagcgggcttgaactgctcacgcagaatggttttctttcaacgggagtcgatgccattgtcaaaaatgccagtgttcctaaaggctcattttattactatttcaagagcaaagaagagtatgcccagactgttctgagcgcctatgacagtttctttgtgcataaactccaaaaacatctgtatgaatcatccttcacaccaatgatgcgtctggaaaatttcatcgacgatgcctgcgacggcattaaaaagtacaatttcacccggggctgtctggttggcaatatgatgcaggagagtccgggtcttccactgtcctttatcaaacagctccacgaaatacttgagcgctggcaggcgcttgtggcgtgctgtctgtccgacgcgttatcttcgggcgaaatccgttccgatatgaataatacgcaactggcggccattttctggagcagttgggagggtgccgtaatgcgtgccaaactttattgctcaacccagcctgtgtacgacttctggagctatttcaaaaagtcagtacgctatcagccctctaaggacacggctgttgaaaagtaa

SEQ ID NO: 119516 - DNA, 489 bp, Enterobacter cloacae
atgactctacgattgcagacggaatcacccgctgaccaggatatgtttagaggcagcagtcatgaaaaagttgcagagaatgtggctcagatcatcaggacacctgatgtcaatattattggtctggaaggtgagctgggttcaggtaagtcaacaatattgaagttcctgcagaaaaagcttaaagatgattttacgttcattaactttgatgcagaacgttaccatcatggctcaactaaaaaagcgcttatcgatgtcatccaccacggggtcagcctacaatgtccgggctcccgggatgtgttggataagtataaaaatctggctctgggtaacatcgttgaatacgacaagagggtcagcagcaggctaagctggttgaccgtcgtttttattttactgtcattgctttccgtgcagatgcttcgttatgtgctaacagaccttaatcaatattttactaacaatgatcttacccacgaatag

SEQ ID NO: 119517 - DNA, 300 bp, Enterobacter cloacae
atgacaaaaccagcatcaaccagtaagaagccccgcaaacagtacacgcctgaattccgcaacgaagccctgaagcttgcggaacgtatcggtgttgctgccgctgcccgggaactcagcctgtacgaatcccagctctacgcatggcgcagtaagattaacaatgcccgcagctcttccgaacgtgagcaggaaatgtccgttgaaattgcccgtcttaagcgccaactggcggaacaggcagaggagctggccattctccaaaaggccgcgacatacttcgcgaagcgcctgaaatga

SEQ ID NO: 119518 - DNA, 855 bp, Enterobacter cloacae
atgaagtatgtctttattgaaaaacatcgggctgagttcagcgtcaaagccatatgccgggtactgcgggtcgcccgtagcggctggtatgcgtggcgtctgcgtcgtcagcagataacaccacgtcagcagttccggctcgtctgtgatactgctgtccgtcaggcattcactgaggcaaaacagcgttatggtgcgcctcgtctcgctgacgaactgcctgagtacaacgtcaaaaccattgccgccagcctgcggcgtcaggggcttcgcgcaaaagcggcccggaagttcagcccggtccgataccgcgaacatggcctgccggtgtctgaaaatctgctgaaacaggatttttacgcgagtggcccgaatcagaagtgggcgggtgacatcacgtacttgcgcacggacgaaggctggttgtacctggcggtggtcattgacctgtggtcccgtgctgtcatcggctggtcgatgtcgtcgcggatgacagcgcagctggcctgcgatgcgctacagatggcactctggcgacgtaagcgcccggaaaatgtcatcgtgcatacggacagaggcgggcagtactgttcggcagactatctggcgttactgaagcggcataatctgcacggtagcatgagtgccaaaggatgttgttacgacaatgcctgcgcggaaagcttcttccactcgctgaaggtggaatgtatccacggggaacgccttatcagccgggaaatcatgcggatgacggtgtttaattatatcgagtgtgattacaatcggtggcgccgacacagtgcctgtggcggactcagtcccgaacaatttgaaaaccagaacctcgcttag

SEQ ID NO: 119519 - DNA, 1425 bp, Enterobacter cloacae
atggtcgcaggactggcatgcctgcagaacatggaatggtacagaaagaaagggtattcgagtattggtgatttgttcaaacgcaacagtactgacaggattgaagagacttggctagttaataaggaggtcggagctattgagctggctgaagctctgcagggatttacctccaaagaggtcatttcccatggagatcgcttcatccttatcattgataatctggaccgaatcagtgcagacaaagtgaaagagctctggagtgatatggagcttattgccggagccactcatgaacacttcaggatagtggtgccctattcggcaagacaggtttcagcctcactttctgtggcgggtttcagcgggcgtgagtttattgcaaagcggattcctgtaagttttcaggttcctcctcttatttcggcaggatggcaggaagcgttaaggcagtactggaaagaaacagtaaatgaggatgcagggatagcgtgccgggaagcaacggtgttgcttgagcgctggaaaccctctgagtatcctcgtatcacaccgcgattaatgaagaagtttgttaatgatattcatattctgaaccttaccgttcctgcaacagaagatcatcgccatattcttattgctctctacttactggtggtcagatacggggagcgagatattaaagtattacttcgcgatcccaaagctagtcagaccgaacccggtattgctccggatgattttgacgagatgctctcgctaacttatcaacaaatatcccgaatttttaataacgatacagaaagatggagcgaatttctgatgagcatccactatcagtccacggtggagcttgccaggagcgagttgcttgatacgcctcttaaagacgcgattggtgctataaatatcccacggcttgaagaactgacggccttgtggggtttcgctgaagcatggcagcgagtggcaccacatattcagatgcgagactggctggtttcttatagccggatggatgagaagtgtcaggctctcgccgaaccgcaactcaaagtcgcagtgcaaatgctgaatcagagttatgctgtttcactcagagaaaagaatgatgaaggtttcgtattgagtctgcagaaactgatggctgacgggcggataagcctagagcctttcgtcgaaaggcaaatatcgtttattgtgagtaaacttgatgaaattcaggattcagaaaaattggaggctgaatccacgcagacgttgctgcaggaagctgattcatactctgttctggccggtgaatcactactgaataaaatggagaattttgtagatggcgtattttatgtggaataccttgtcaataatgaagagaccttgtcaaacctgaaaattggcacactagtgacctgcccccacgattag

SEQ ID NO: 119520 - DNA, 531 bp, Enterobacter cloacae
atgtgtaaactgaccggttttataatggggctgacgatcctgctgggtgtgactgcacgggatgcaggggcggcaacgctcagtgaaatgcggatggttaatgccagtcagaaacccgggatggtgattatctgcagccggacctcggagattccgcagaaaggtgaatcccccgttcgtatagaaagtctcctcaggggcgtggtactgcagaacgacggtgatcgcatgatgtttgacgtgacctatacacagcgaaacgctgaagagagtattccttttcgtacggaaaaataccggctgaccactgagctggaagccacccgccagaaaatggccatcgatcctgagacgatagaactatcgcttccgcgtgcccgcggtcttgaagaaacttttctcgcggggatgaaagcaagcccggtttcgtttgaagattacaccaattaccgtgtcaaatctgctaccgagtatctgatcctgccgggtccggcatccccggatgcaccggtgatgcactgcacactctaa

SEQ ID NO: 119521 - DNA, 777 bp, Enterobacter cloacae
atgatgccagcactgccaggccatagcggggctttttcctctgctcagctgccggtggccatcgattacccggccgcgctggcactgcgccagatggcgctcgttcaggacgaactgccgaaatacctgctggcgccggaagtgagcgccctgctccactacgtgcccgatcttcaccgtaagatgctgctgaccaccctgtggaacaccggcgcccgtattaacgaagcactggccctgacccggagtgatttttccctggccccgccctacccgttcgtgcaactggcaaccctcaaacagcgggtggagaaagcggcccgaacggccggccgtgctccggccggcagccagcctcatcgtaacgttccgctttccgatccgcagtatgcccgccagctggaaatgatggtggccaccctgaaaataccgctggaacgccggaataagcgcaccggcagaacggaaaaggtgcgcatctgggagatcaccgaccgtaccgttcgcacctggctgggcgaagctgttgaagcggcagccgccgacggggtgacgttctccgtgccggtgacgccacacacgttccgccactcctacgccatgcacatgctgtatgccggaattccgctgaaggtgctgcagagcctgatggggcacaagtcgatcagctcgacggaagtctatacaaaggtatttgcgctcgatgttgctgcaaggcatcgtgtgcaattttcaatggcagaggctgatgctgttgccatgctgaaaaaaagataa

SEQ ID NO: 119522 - DNA, 1011 bp, Enterobacter cloacae
atggctatggaaaataatgagttacccctgaatcttcaggaggtcaataagacaacgggtgaagttgttaagctggatgtcaacagcgccagtactgttcagcctgttgcgctcatgaggcttggtctgttcgttcctaccctcaaatcgacctctaggagtaagacgaaccgcaaaaacgtcacggatgcgactgaggagctcgtacagctgtccattgcccggagtgaagggtataccgatgtcaggatcaccggatcgcgcctcgatatggatacggacttcaaagtctggcttggaatcatccgttcaatgtatgattttggcgttaaggatgacacgctcaagctgtcttttgttgagtttgttaaaatgtgtggctttgactcccggcgctctaacaagaaaatgcgtgacaggataagcaactccctgttcaagctggcatccgtaaccctcaagtttcagagtgaaacgaaagggtggactacgcacctggttcagtctgcctattacgacatcactgccgatgtcgtggagatcagggcagagcccaagctctttgagctttatcagatggacaggcgggtcctgttgcgtctgaaagccattgatgccctgcagcgcaaggagtccgcacaggcactctatacctacattgaaagtctgccacagaatccggcccccatctccatgaagcgtatgcgagacagactcaacctgacgtctaacctctacacgcagaaccacacggtgcgcaaagccatggcgcagctgaaggatatcggctatctggattacaccgaattcaaacgcggccgggccacctacttcagcgtgcattaccgtaatccgaaactcatcagtagcaaggtcgttgttccccgtgagccggaagaggaagtacctgagcagaactatgacgaagttattaaagccctgaaggctgcaggtattgatcctcagaaactagcaaaagcgctcgccagcgtgaaaccgggaaatgactga

SEQ ID NO: 119523 - DNA, 1167 bp, Enterobacter cloacae
atgggactgatggaaacgcttgaccagtgcattacggccggtcatgaaatgacgaaagctatcgcgattgcacagtttaacgatgatagcccggaagccaggaaaattacccgtcgctggcgtgtgggtgaggccgccgatctgattggcgtttcttctcaggcaatccgtgatgcagaaaaagcaggacgccttccccatcctgatatggaaatgcgtggacgtgtagagcagcgggtgggctacaccattgaacaaatcaaccatatgcgggatgtatttggcacccgtctgcgccgtcctgatgacagcgttccgcccgtcatcgcggtggcagcacataaagggggtgtctataagacatctgtatctgtacatttggcacaggacctggcgctgaaagggctgcgagtactgcttgtcgaagggaacgatcctcaaggcacagcctccatgtaccacggctgggtccctgatttgcatatccatgccgaagacacactgctgcctttttatcttggtgagcgcgatgatgcagcctatgccgtcaaagccacctgctggccgggtctcgacatcataccttcatgcctggctctgcaccgcattgagacagaactaatgggaaggtttgacaacgggaaactgccgacagaacctcatatgatgcttcgcctggccatcgaaacagtggcccatgattatgatgtcattgttatcgacagtgcaccgaacctcggtattggtaccatcaatgtcgtctgtgctgcagatgtactcatcgtgccaacgccagcagagttatttgattacacctctgcccttcagttttttgacatgctgcgcgacctgttaaaaaacgtggacctgcagggttttgaacctgacgttagaattcttctgaccaagtacagcaataacaatggctcacagtcaccctggatggaagaacagatccgcgatgcctggggaagcatggtactgaaaaacgttgttcgcgagaccgacgaagtcggtaaaggtcagatccgtatgagaacggtgtttgagcaggctatcgatcagcgctcatctacaggagcctggcgaaatgcgctgtctatctgggagcctgtctgtaatgaaatttttgatcgcctgattaaacctcgctgggagatcagataa

SEQ ID NO: 119524 - DNA, 966 bp, Enterobacter cloacae
atgaaacgtgcaccagtcattccaaaacataccgtaaaagatatccgccccgaaactgaaccttcagcggcacccgctgcaccgatggttgattcattaattgcacgggttggagccatggcccgcgggaataccattctgcttccggtttgtggccgggaagtgaaatttattctggaagcgatcccgggcgagagtgttgagacggcatcaagagtctggtcaggtaatgaacgtgaccaggaactactgaccgaagacgcgcttgatgatctgattccctcttttatgctgagtggtcaacagacgcctgcgttcggacgaagggtagaaggtgtcattgaaattgctgatggtagtcgccgtcgtaaagccgccatactgacatcatcagattatcgtgttctcgtcggggatctcgatgacgaacagatgatggctttatcacggctgggtaatgattatcgtcctgtcagcgcttatgaacggggcaaccgttatgcacagcggttggaaaatgattttaacggcaatatctctgctctggctgaagctgagaatatttcccgtaaaatcatcacgcgttgcatcaacacggcccatttgccaaaatcagtggttgccctgtttactcatcctggtgaactttccgcccgctctggggagacgctgtacaaagcattttcgggaaaagaagctttattgttgcaacggacacaacagcttcatgagcaaaagaaagcgggagttatctttgaatccgaggaagttattggtttactgacggatgttctgaaagagccatcaggtaaaaaagtaaaccttaatacccgtcatcaatttgtacctggtgcgacagccctatacaaaggcgataaggtgatttttaatctcgataaatctcgtttgcctgccgagtgtatcgagaagatagaaagcatactgcgcgacttacaaaaagtttag

SEQ ID NO: 119525 - DNA, 1272 bp, Enterobacter cloacae
atgtttgccctggccgatgtgaacagcttttatgccagctgcgaacgtgttttccgcccggatttgaaaggaaagccggttgtggtgctcagtaataacgatggctgcgttatcgcaagaagtgccgaggcaaagccctggatcaaaatgggcacgccgtggtttcagatgaaaaacgaaacgtatccggaaaaaatatacgcgttctcaagcaactatgaactttatgcctcgatgtcagcgcgcgtgatgagctgcctggaggagctggccccaagggtggaacagtattcgattgacgagatgttcctcgacctgaccggcgttgagcactgcatggacctggaggacttcggccggcagctgcgccagcacgtgtatgactgtacccgtctgaccatcggcgtgggtgccgggccgacgaaaaccctggcaaaatcagcccagtgggcctcaaaggagtggaaacagtttcgtggtgtgctcgccctgaccagggggaatcctcagcgaacgcggaaactgctttcactgcagccggtcgaagagatctggggcgtgggaaaccgtattgcacgcaaacttaatgtactgggtatcaggaccgcgctcgatctggccctgacgaacccggcctttatacgcaaaaatttctccgtcgttctcgagcgaacagtacgcgaactgaacggggaaagctgcatgtcgcttgaggaagcaccaccgacgaaacagcagatcgtctgcagccgcagctttggagagaaaatcacggagtacgattcgctccgccaggctgtctgtcagtacgcagagcgggcctctgaaaagctgcggaaagagcgccagtactgccggcatatttccgttttcatcaaaacgtctccgttcgccgttaaagagccttactacggcaacgtggccacggagaaactgcttacacccactcaggacacccgggacattattgcggccgccacaacggctctggagcgtatctggaaggatgggcacctgtatgccaaagccggtgtgatgctgaatgacttcaccggctccggcgtttcgcagctgcagctgttcgacgaacgtccgccacgtcctcacagctctgagctgatgaaggttctcgatggcattaatcattccggtctgggacagatctggtttgccgggcgagggatagcgccatcatggcaaatgaaacgcgatatgctctcccctgcgtacaccacccgctggaaagatattcccgttgcgaggatcagataa

SEQ ID NO: 119526 - DNA, 432 bp, Enterobacter cloacae
atgaaactgcagcttttcagcaccgggaaagcactcccgccacaggcccatccgttgtttgcagacctggccagctgcggttttccgagccctgccgctgactatgtcgagtccgacctggatctccatgattactgcatacggcacccgagcgcgacttactatctccgtgccagcggtgacagcatgtccgacggcagcctttacaatggcgatctgctggttgtggacagtgcagagaagccccggcacggcgatattgttgtggccagtgtgcagggggagtttacggttaaacggcttctgctgacgccacgactgacgctgcagccaatgaacgccgcctggccgccgatttatcccgacccggacgatctggatatctttggcgtcgtcacgcacatcatccaccgcccgagggagatgtactga

SEQ ID NO: 119527 - DNA, 972 bp, Enterobacter cloacae
atgaatatttactgcgatgatggttcaactaatgttaagctggcatggtttgaaggaaacgagctgcagacccgggtttcagctaactccttccggcatggctggaaagtggcggaattcagtgccgcaacgttcaactatcaggtgggcacgctgaaatacacctgggacagcgtcagccgggatgccatcccgacaacaaacgtggaataccagtacggtgatctcaacctgctggccgtgcatcatgccctgctgaacagcggacttgagccgcagccggtgagcctgaccgtgacgctgcccctgagcgagtattatgacggggactgccagcggaacgaggagaacatccgacgcaaacgagaaaacctgatgcgtgagctggttctgaataagggcagggcatttaccgtaacggacgtgaaggtgatgcctgaatcactgccggcggcgttctcccgtctcgcggagctgaagcccggacccgctgagaccaccctgattatcgatctcggcggaaccacgctcgatgccggcgtgattgtcggacagtttgatgatatcagtgcggtacacggcaatccgtctgtcggcgtgtcacaggtcacccgcgcagctgcaggcgcgctgcgggctgcagacagcgaaaccagcgcgcttattgctgacacggtcatccgcaaccgcaatgatcgtcagtatctgcagcgagtgatcaacgatgccggaaaaattgacgatgttctgaacaaaattacagaggcaatcacttccctgggcgcgcgtgtcaccagtgagctgacggtcttcaggagcgttaaccgggtattcctggtcgggggaggggcatccctcattgaagaggctatccgtcaggcctggcctctggctcctgaccgtatcgaggttatcggcgatccgcagctggcgctggccagagagattgccctttacaataaagaggactaa

SEQ ID NO: 119528 - DNA, 663 bp, Enterobacter cloacae
gtgccggacggccagtattctttctatctgcacagcgacgatcgcaccgacatcacggcgatggcgaccatcagcaccatctcacagcccctgcgcggtgacttcatccggaccgccgccaccgccggggcggtgatgtaccagacggatgcccgtttaccggcgctgatcccggtgttctttgacggacatctgagtgccatccggctttgtgccgtgatggccctggtatccggcacctggtcttcactctcaggacttcctgatgagcctgatggtggcgtggctgctctggccatgtcaccggagacggaataccagcgccggcgttacaccctgacgcttcaggatgaccggagcagtgaacgggttgagcgtgtgctgacgggcgtgtcatcccgcctgcgcggagagctgctgagaaacctgattatcaccggtctggccctgcatacgaccgcaccggagctgccgcgtctgctggccagtatgccggtaccgcccggcacggtcagcgagctgcaggttctggttcagcagatggctggtacggctgacgtgagtatggctgcagtgccggagaaaccagcggagcctgccgcaccggtatccgctgaagcgaccagcataaagaaaaatatgcgccgggcattcggagactag

SEQ ID NO: 119529 - DNA, 264 bp, Enterobacter cloacae
atgtcagtgattaaacaaaaagcagtgcagtgcattcataactttctgcgcgcccggaacgtgcctgaatctcagtggccggaacgggtcaaaaagaccggcaggggaatgatactggcaggcgtggccgtcgtggttcctggcgttctggttgataacatctcactgccggtgacaatcgcgatgcaggtctgctatgcctcactgatcggcctcggggttctcttggcgtttgacaagaaaaaaccagaggggcggggatga

SEQ ID NO: 119530 - DNA, 204 bp, Enterobacter cloacae
atgctgcttgaagaactgacaggagacgaacgtacgctggtcgttgtggcactgcaggcgttgttccgcgagagattatccgcatcaaatgccgtctttacggtatgtagcctgtccggaaaagagcagccgccggaagatatttttgggctgcgtgaagtagaggatgcgctgagacgtattggtgcagctcctgcgcgttaa

SEQ ID NO: 119531 - DNA, 468 bp, Enterobacter cloacae
atgttcagactgacctgtattgaactcgataacggcgagtttgccgtctatatcaatcaccattacctggggagtgaagatgccagcggagagcgactttctctgggggaggttctggagcagctctccctgctgccgggcgtggaattacagaccctgctggaacccgtaccggagtgcgatgactggtgctggaacgacatcgctgatcgcgtcctgccgtcgcgtcctgcatgtcgtgatgatgtgacggtggcagggctcatcgccaggctgaagcagtacccaccggatgcactgtgtatggggacgttctggctggaagatgattttctgtccctcgatggcagtctgtcggaggaggaaattgcagaagccatgcgtatctgcgaccacagccacgatgcaggcatcggttttaactgggacacgctgcagttcgctatcgaccacgtgaaggggcgctaa

SEQ ID NO: 119532 - DNA, 687 bp, Enterobacter cloacae
atgttttcggcacagataattgcacaggtgacgtcccgttttccggcgcgtgccgtcgattttattcttaccgacccaccgtacctggttggctataaggaccgtaccggccgcaccctggccggggacaactcttccgaatggctccagcccgcctgtcatgaaatgtaccgcgtgctgaaaaatgacagcctcatggtgagtttctatgcctggaaccgcgcggatctgtttctgaatgcgtggaaaacggccggtttcaaggtggttggccatatcgtctttgccaagagctacgcctcaaaatcgacgttcgtgggttacacccatgagagtgcctacctgctggcaaagggaaggccgcaaaccccggaccgtcccatcccggacgtgatcccctggaaatacacgggcaaccgacatcacccgacggagaagccggtgcagagcctgcggccgctgattgaatcgctcacgcgtccgggggctattgtccttgacccgttcgccggcagcggctccacctgcgtggccgccgccgaagccagccgccgctatatcgggatcgagatgcttgagcagtaccacgccgccggcgttcgacgtctggcacaggttgaacgggcaagaaggatgccggcggccaatgacggcgcgttttaccccgactatccggaggcggcatga

SEQ ID NO: 119533 - DNA, 222 bp, Enterobacter cloacae
atgaactacccgggccttgaaaacctgcgcgcggacgtggccgcgctcagcaatgccatgtgtgacgtgcggatgctgctgaaccgcctcgaatcgcagcaccggcacgacgcggcaacgcttaccgaacgtatggctgcgcagactctgcgccggatcaacaccctgcttcttgaagcctaccgcgaagccctggtgctggacgaaacctttcaggactga

SEQ ID NO: 119534 - DNA, 423 bp, Enterobacter cloacae
atgtacggaacccgcgaagaactttgtgtacagcttgaaaacatgttcacgtttgacgaacccctggtcctgctggtctggacggaagaggggattagcgtggcctgccgtgaagcccagccagaaccggacggggctgaaatccggaatctgatgaaggcgatcggcgaaatgaaaatgacgcaataccgccaggagggggtaaataatctgactgtcagcgatctcctggcccgtcagcgggaagcggcaaaccgtcaggtgagtgttccggcggtactcctgccccgcgtcctgcgtaactatgaatgtgagctggaaaaccggatcggtatggcctgggaagccgggcggcaggagcctgaatccgtcaggaatgagctgaaggacgttcacgccttacaggagacgctggccgcgtaa

SEQ ID NO: 119535 - DNA, 429 bp, Enterobacter cloacae
atgaaccagaccgtgacctgtgatgctgttcgtcttgagggtgcgcagcgcctgactttcctgcctgatttgtttggcggcgattttatgacttccgatgcatccgtgtacgcctatgcccagcgttactgccctgagtatcaggggggattctggcagttttaccggctgccggaaggtggcggatatatggcgcctgacgtggagagcctgaccctgtgcaatccggacaactggtttgagcagactgtcagcggggaagtggcggggatcattctcacggcgctggtactgaatcaccggagctggcaccacagcaaccatgaccatgaagagctgtgccgccacttctgccgtcgctatgagcagcttatggcatttgctgacacccatccggaaagcgccaccatctggcgtgcccttgactga

SEQ ID NO: 119536 - DNA, 411 bp, Enterobacter cloacae
atgattggtacagcaagagaaattgcccttgaaatgttcagacattccgacctcgatggcgagaaatacgttttcgcctgctggaatcgaaatgacattcgttgcgtctgccttgactgggatttaaccgatgaggaactggatgaagtcctgcgtcggctaagttcatgccttgaaagtggcgcagatatcggccagatacgggcgattgtcgaaaccatgctcgatgagcgacgcgagaagcgaaccgtgactattcccgcgaaatcgctggccttagtcatgcagcttgcaggacgggagatgcaacgtatcgcagtatgcgcggaggatggcggcggatcggcagaagaaaccctgaaagaagaaaacgacgtcatgatgcgcctgcgcgctgcgctcgaggcctga

SEQ ID NO: 119537 - DNA, 198 bp, Enterobacter cloacae
atgcaactgtcaccggaaacccgcagcatcctgcgccagtataaaacgctcatcaacgagcgacgtcgcgaatcaggactcagccccgtaaccacagcgaaagtgctggatgagatctgcgaatcggctacccgccagtgcgccgtctatctttgcggccacttcattctccagggcggtcagggggatggaaagtaa

SEQ ID NO: 119538 - DNA, 294 bp, Enterobacter cloacae
atgcacacacgaaacgtcaacgtcaaaaccgccgctcaagaatctaccggaagatgtgattcaaacctcaccatgtcccagttcacggatctgttttgctgggtcctggcagcatcggaaggggagccacaaccggcaatttttacgccgccagagaatgccactgagctgacgttaataaatgacgaatgcccggattatatctctgtctggtttgtagatggtcgcccggtggcagctgcaatgccgctggataattttcaccgcgttatttcttcatctctaactaaataa

SEQ ID NO: 119539 - DNA, 822 bp, Enterobacter cloacae
atggtcagtttcgcaagccgttatcgtatgcctacctcgatccgtaaagaccgtccgctgactaatgatgaattacagcgcatcgttcccagcgcgttctcatcggataaacacgattcacgctctgaacgttatacgtatatcccgaccattaacattcttgatcgcttacgtgatgaaggttttcagccatattatgccactcagtcacgtacacgcgaccaggataaacgcgactttacaaagcatatgcttcgcctgcgccgtcatgaccagattaacggaaaagaagtaccggaaattattctgctgaatagccatgatggttcaagcagctataaaatgatccccggtatgttccgtcaggtttgcagtaatggtctggttgcatggaaggattttggtgaaatccgcgtaccccacaaaggggatattgtcgggcaggttattgaaggcgcttacacggtgctgaaaacattcgacgcggttgatgaaaatatagacctcatgaaaagcattcagctcactttgcctgagcagcgcctttttggtgcgaccgccctggaacttaaatacgatggaaaaccagcgccgattacaccggagcaaattattaaccctcgccgtgtgctcgacagaggccaggatttatggaccacgtttaacgtggtgcaggaaaatgtgatccgtgggggaattcgtggcagaacggaaaaagggaagatgaccagaacgcgggaagtcaccggaatagatggtgacatcaaattaaatcaggtgctctggaaaatggcggatgagtttgcaaaactgaaggcctga

SEQ ID NO: 119540 - DNA, 474 bp, Enterobacter cloacae
atgtgctttgatcaggccgggaaagattaccaaattgatccgctgctgcttatgtcaatttcgattaaagagagccatctggtagcggatgcgataaatggatcaaacaggaatggaacggaagatgtctgcggtatgcaggtgaacagttcccattacggtaaacttaaaaacttcaatattacccgtgagcgcctgttaaatgatccatgtatctgtgtttatactggagcatgggtactggcgcacaactttcggtcatacggaaaaaactgggacagcgtcgggatgtataatacgggaccgagcaaaaagctcattgtacagcgcaaggcctatgcacaggacatcaaaaatatatatcgtgtattactggccagaaaaaagttactttctgaacgtctcgcgccagctgcgggaaaggagcatgatattaaaattgcagaaacagcatcgtcacatagcgggcagtaa

SEQ ID NO: 119541 - DNA, 387 bp, Enterobacter cloacae
atgccaagaaagaacatttactttaaagacaaaattgaccgcgaaatacatgatattcttgaaatagagctacagaaaggggccacctcttctgagatgaactactcttcgatagtcaacgaattagtacgcctttggctaatggtatacaaatcgaaagaagaaggaagctcatttgacctggatggttttaggcgcgaccttataaagaaagtctccgggtcacgagaaggtattatgattctgactgcccttgtctctgacatcttcgttactctcaaaggtcccgactctggcgtgaaactggaagagctcataaacaccaacatcagtgcaattaacgatgcggaagataaagccgaaaaagaccacttcctggcagggtaa

SEQ ID NO: 119542 - DNA, 642 bp, Enterobacter cloacae
atgaaagttaaagagaaaatgtgggatggtcgcggccgtccacgtaagttccagccgggtgaagctgtggagtggcgattgcgcgctccggataatctgcttatggagctgagaatatgtgccagagctggcaacaggagtgtgaatgaggaaattattgccaggcttttgttgtcgctgaattatcagccgggtaagcctgtgattaaaacagcggagggagagaggctcattgcgctggcggtgagatttgaggaatggcttggaaaattacttgatggtgaatccgttgatgctgtgaaggaagttaatgtcccgctcaagcaagagcaattgtggatgtggcgtgagggtgaaagaattttgcttccgggcaaaacaaccggatatagcatgcgtattcctgagaaccttgcggatgaaatcagggcaatggcgaaggtgcataaccgtagtcttaatgacgaaatgctcacccgcctgatgaatacgctgggttatttcacggaaaggttacttgaccagaacgaggatgcgcaggcacttaaagttctttgcatggagttcgaggtgttcctgaaggaaaaaataagggaggtggagaaaagtgaccttccctgggatgaaaagccgtctcagtga

SEQ ID NO: 119543 - DNA, 354 bp, Enterobacter cloacae
atgttaaccaaaggcagcgcccttaacgtcggtaagggatgggcggtagcgtctttattccgcaaagcacgcgaaaatcgccagactaaattttacttaaagtcagcaggcgcttttttaattgcacttatggtcactcacccggcattcgctggcggcaccgaccttctttcctcacagaacaccacggttaattccaccttcggttctggctcttcattgattaaatggttttacattgccgaaatcatcatgggcctgtttatttacatcaaggcccgctcaccgctggtattcgtcggtatcgtaatggcaatcatctttacccgtgtagccttcggcatcgcgagttaa

SEQ ID NO: 119544 - DNA, 303 bp, Enterobacter cloacae
atgagcggggaggaggataaatacaacttcccggaaacaatgaaccagcaggaccgctatttaggtttgccaattgatgagttaattgttaccgcaccccttattgttctgggggtgcttaacaacctgtcagttgaacttggcgttatagcgggaatcctctggttcatcgtcagatatctgaaaaaagggcaggggtcgtactggttacttaatttctgttactggcacctgccatcacttttattcaaagtaacctttcgccagatacctgattctagtttccggcactggagggcatag

SEQ ID NO: 119545 - DNA, 774 bp, Enterobacter cloacae
atgaaactgaatattaaaggagagcgcgataaacaactccgctatgcgtttattggtctttcagctttaactttacttatgggggccggtaacgtactgacaggttcgcttgcatggtattttgccaccacccagaaaaccattaccacaccattaacatttaatcgccccttcacatcagattcaaaaggtgtcgatgccccaggcctgacacaattcgccgcctcctttatttactggcgactgaacgtcaccccggaaaacatcgacaacaaccagaaaatgattcttggattcgtcccttccgacgaacgggacgaactcaagaaagctctggacattgaagctgaacgcatcaggaaagcgggcatttccacccagttcgacacgaaagaaattcgcgtcatggatgatggctccgtgcagtacagcggagttctgaagtcctccaccactaacggcgtaatcatcacgccaatgaaagaccaggaaaaaacctaccgcctgaaactgagctatgagaacggtgtgattaacctccacagcttcgaagaactccaccctggtgttggggaccacggatcagtttatcgggattcagggctatgccggcgtggggaaaaccactcagctgaaggcggtgatatctgcactggagaccataccggcggacgttcgtccggttatgacggggcttgctcctacgcaccaggcggtgaaagaaatgagcgacgtcggtgtccgggcgcagaccatcaaatcctttatcgttga

SEQ ID NO: 119546 - DNA, 2154 bp, Enterobacter cloacae
atgagcgacgtcggtgtccgggcgcagaccatcaaatcctttatcgttgaacatgaccaggcgacggccgcaggcagtaagcccgactataaaggacaggtgtttcttatcgatgagtcctcaatggcaggcaaccaggatacggcagccctgttccaggccattgccagcggcggcggtcgcgcggtctcgatgggggatatcgaccagtttgaatcggtcgacgtgggcgcgccgtttaagctgatgcaggagcgcagtccgatggatgtggccatcatgaagcaaatcgtccgccagaaagacctgcagctgcgcggtgccgttcacgacatcattgataaccggatcgatgcggccctgcagcgcattgaaacccagccggctgaccgtgtggcgcgtagcgcttcagccacgctcccggggagtgccattcaggaaacggagacgcccgttaacgacatcgtggctgactggacggaccggacgccggaggcacggtcccgtaccctcattatcacccagctgaacgctgaccgtcatgcggtaaatgccggtattcatgctgtgctggctgcccggggagaactgggggagaaggccattacggtgccggtgctcgataaaatcacccacacccgtcatgagtttaacaaaaccgatgcctgggaagccgggatggtggttaaacgcggcgatcgctaccaggatgtgctggccgttgaccgcaacggcagtacggtcacggtacgcgatgaggaggggaagattggactgtattccccgaagcaactcatcaccggcgacgtgcagctgtttcgccgcagcgagagggaagtccgcgccggcgatctgctaaagttcacggcgacagacaaggagcagggacagatggccagccagcgctatacggtcgagtcggtcagcgaaacgggcaatattcgtctgaagggggaaaacggccgcatcaccatcaatcctcgggccgtcagggcgcagcagcatattgattacggctgggctgtcaccgggtacggtgctcagggggccagtagcgattatgtcattgcgcttgagggcacggaaggcgggcgtaagtcacttgcctcccgccgtgccttctacatctcggcctcgcgcgtaaaagagcacgtccagatttataccgacgggaaagcggactgggtgaaggcggtaaaaacgccggagcgggatatcaaaacggcgcacgatgcgctggcaccagaaacgcagcgtaaacaggcgaaagccatctgggcaatgggtcagccggtgaataaaacggccattggccgcgcctgggtacgccatcagggcatgcaggatgcgtcactgacggcaaaaatcatcccggccacccggcgctttcccgaaccggcgctggcgctgccggtttatgacaacaacggccgtagtgcgggcctggccctggtttccctggttgccagcccggaaggtcggatgacacagggggagacccggatggtcatgacagaacgtgcccgtggtgcggtactgcagcgaagccagtccggcaacacgattgtggtcagtgacctggcggccgcgctcgatgcagtacgacatcacccgaaggacggcgtggtctggcagaccggcgatgaaccgccttcagcatggttgcttaaggtgagcggcgggacaaaacaggatgtctctccgggtattgtctccacgctgactgacgagcataacgtacagcaactgcgcgaacagctgctggcagaccaggttcgcaatgaagaagccggacggaacaggcagccggagtcgttgctgccggaaattccgcaggaagaggtgatcagactgaaaccggaagaaattaatccgcgtaaaccggaaccactcaccccggatgcggatgtgatcgccagggtgagaggtgaggcaaacaccggtggacaggaaatgaaagctgctgcaggtgtcaggagtgagctggaaggtgctgacaaggcatccggtgaacagtcgcgggcatcgcgtgtgattgcagatctggcaaacgctgagcgcgacatgctcagggtggcagaaaatactgaacgcggccgcatgccggagcgagaagaacagaccctcacccgtaccattcagaaagaacgttaa

SEQ ID NO: 119547 - DNA, 2007 bp, Enterobacter cloacae
ttgcgtgtcagccgttccttaacgatcaaacagatggcgatggtgtctgccgtcacaatgctgtttgtcttcatcttctgcgtcattttgctgtttcattccgtacagcagaatcgctataacacggcttcgcaactggaaagtattgcccgctcggtgcgggaacccctgtcggcctcgatcctgaaaggggatatccccgaggcggaatccatcctgaagcgcattcagcccgccggtatcgtgagccgcgccgacgtcgtgctgccgaaccagttccaggcgctgcggatgagctttatcccggagcgtcccgtcccgatgatggtgatgcgcctgtttgaactgccggtgcagatttccctgcctctctattccctggaaagaccggctaacccgcagccgctggcctatctggtactacaggcggactcgtaccgcatgtataaattcgtcatgagttgggttgctacgttagtgactacttacttacttttaaccttaatgttgagcgtggcgctgacgtggtgcatcaaccggttaattgtgcatccgttgcgccgcatagcccgggagctgaatgacctctctccgcaggagcatatggggcatcagcttcccttgccgcgtctgcatcacgacgatgaaatcggcatgctggtccgcagttacaatatcaaccagcagcgtgtcctgcgtcagcaggaagaggtcagtaataacgccacccgtttcccggtttccgacctgccaaacaaagcgtttttaatggccctgctggagcagaccgtcgctcgccagcagaccaccgcgctgatggtgattgcctgcgagaccttgcaggacacgacgggcgtgctgaaagagagccagcgcgagatgctattactgacgctggtggaaaaaatcaaatctgtgctggcgccgcgcatggtacttacccaggtcagcggctatgacctggtggtgattgcgcacggtgtaaaagagccgtggcacgctattacgttaggtcagcaagtactcactgtcataaatgagcggctacccattcagggtatccagcttcgcccaagtgccagcattggtatcgcaatgtactacggtggtctgaccgccgagcagttataccgtcgggctttctcagcagcgtttaccgcgcgccgaaaaggcaaaaaccagatccagttctttgatccggagcaaatggaaaaagcccagcagcgcctgacggaagagagcgacattctgacggcgatggacaatcgccagtttgcgctctggctacagccgcaggtggatttgcgcacggatgaagtgaccagcgccgaagcgttgctgcgcatgcagcagccggacggcacgtgggagctgcctgaggggatgatcgaacgtatcgagtcctgcggcctgatggtcaccgtcggatactgggtgctggaagagtcgtgccgccagcttgcggcctggcaacaacggggcatcacgctgccgctgtcggtgaatctttctgcgctacagctgatgcacccgactatggtgccggatatgctcgagttgatccatcgctaccgcatccagccccacacgttgatcctggaagtcaccgagagccattgtattgacaatcctgacgacgctgtcgccattctgaaaccgctgcgtaatgccgggatccgcattgcgcttgacgattttggtatggggtattccggcctgcgtcagctccagcacatgaaaaccctgccggtggacgtcctgaaaatcgacaaaacctttgtgaaagggctgccggaggattgcagcctggtgcaggccattatccagatggcgcacagcctgaacctgcacgtgactgccgaaggtattgaggccgaagcccagcgcgagtggctggctgcggcgggtgtggagagcggtcagggcttcctgtttggccgcgccgtgccgacggatacctttgagcgacgctatctcgccgacgatggcaataacgcaaaagtgtaa

SEQ ID NO: 119548 - DNA, 3483 bp, Enterobacter cloacae
atgcgcacgttcacactaaatctactcgccttatcgcttggcctggcgctcatgcccctggcccaggccgccaactccccgcagcagagacagctgctggaacaggttcgtctgggggaatccacccagcgtgaggatttggtgcgccagtcgctctatcgccttgagctgatcgaccccaacaacccggacgtgattgccgctcgcttccgctacctgttacgacagggggatacggcgggcgcgcaaaaagagctggatcgcctgaaaggaatggcacccgattccagtgcgtaccagtcttcccgtacgaccatgctgctctccacgccggatggtcgccaggccctccagcaggctcgcctgctcgccaccaccgggcacacgcaggaagctattgccgcgtatgacaaactgtttgacggtaatccgcccagcggcgacatcgcgacggagtactggaacgtggtggcgaaagagcctgcccgccgcaatctggccattaatcagctgaagaaaatcaacgccagcagtccgggcaacgccccgctacaggcttcgctggcgcagcttctgttccagagcggacggcgtgatgaagggtttgcggtgttacaggagatggccaaatcgaacaatggccgcagtcaggcgtcggacatgtggtaccagcagatcaaagatcagccggccagcagcgccagcgttaccgcgctgcaacaatacctgagcgtgttcagcgatggcgataacgtgacggcggcgcgcgcccagcttgaagcgcagcaaaaacagctcgccgatccggcgtttcgcgccaaagccgaagggttagccgcagtggatgccgggcagggaagtaaagcggtaacggagttgcagaaagcagtcagcgccaaccacgccgacagtgaagccgtaggcgcgctggggcaggcctattcgcagaaaggcgatcgcgcccgcgcggttgcgcagtttgaaaaggcgatcgccctcgatccgcagagcgacaaccggggcaaatgggacagcctgctgaaggttaaccgatactggctgctgatccagcagggtgataacgccctgaaagccaacaagacagcccaggcggaacgctattatcagcaggcgcgcaacattgacaatacggacagctacgcggtcctggggctgggtgacgcggcggcggcgcggaaagataacgacgcggctgaacgctattatcgccaggcattgcggatggacagcggcaacagcaacgcggtacgcggtcttgccaatatttatcgcgagcagtctccggagaaggcgacgcagtttattcagtcgctctctgccagccagcgccgcagcattgatgatattgaacgtagcctgacgaacgagcagctctcggctcaggctgaacagctggaaagccagggaaactatgcgcaggccgcagaaattcagcgccgacgccttgcgctttccccgggcgacgtgtggatcacctaccggctatcacgcgatctgtatagcgcgggtcagcgcagccaagcggataacctgatgcgtcagctggcaagccagaaaccgggcgatccggatcaggtttacgccagcgggctgtacctgtccggtaacgatcgggaccgggccgcgctggcgcatctgaacacgctgccgcgcgacaagtggaacggcaacatccaggcgctggcggaccgcctgcaaagtaatcaggtgctggaaaccgccaaccgcctgcgcgacagtggaaaagagcaggaggcggaagcgctgcttcgccagcagcccccgtccacccgtattgacttaacgctggcagactgggctgaacagcgtggcgatcacgaggccgcgaaaaccgcctacaacaccgtcctgcaacgggaaccgcagaacgaagacgcaattctcggcctgaccgaagtcaatcttgctcagggcaacagggacgccgctcgcgctgagctggcgaaactgcccgcggcacaaaacggcgaaccgctctccctcaatatgcagcgccggatcgccatggcgcaggccggtctgggcgattcagccgcggcagaaaagaccttcaacgccattgttcctcaggcaaaatcgcagccgccttctatggaaagtgcgctggtgatacgtgatgccgcccgcttccaggcacaaaatggtcagcctcagcaggcgctggacacctggaaggatgcgatggtctcatcgggcatcacgacgacccgtccaaccgataacgacagctttacgcggctcacgcgtaacgatgagaaagatgactggctgaagcgcggcgtgcgcagcgatgcaggcgatctttatcgtcagcaggatctgaacgtcacgctgcaacacgactactggggatccagcggcacggggggctattccgacctgaaagcgcacaccactatgctccaggtggatgcgccgctatcggatggccgcatgttcttccgtagcgatctggtcaatatgaacgccggttcctttgatacggacaatggaacctacgatccaacgtggggtacctgcgccgaaacgccatgtcacggcagcacgaaccagtcggccaacggcgccagcgtggccgtcggctggcagaacaaaacctgggcgtgggacatcggtacaacgccgatgggcttcgacgtggtcgatgtggtgggcagcctgagctacagcaacgacttggggccgattggctacaccctgaacgcccatcgtcgtccgatttccagctctgtgctggccttcgccgggcaaaaagatcctaataccgacaccacctggggcggcgtgcgtgctaccggtggcggcgtgagcatgagctacgacaaaggcgaagctaacgggatctggtcaagcctgagtgccgacagcctcaccgggaagaatgtcgaagataactggcgggtccgctggatgaccggctattactacaagcttatcaatcagaacaacgagcgtctgacggtcggtgtgtccaacatgctctggcattacgataaggatttaagtggctattcgctgggccagggcggttactacagtccccaggagtatgtgtcgttcgccttaccggtgaactggcgtaaacgcacagagaactggtcatgggagctgggcggttccgtctcatggtcccattcaaaaacaaaggatgtgatgcgttatccgttgcaggggctgatcccggacaatgagccaggccgttataccgataaaggtgtgatgggaaccggaagtagctcgtcagggacgggttataccgcaagggcgattgttgaacgccgtgtgacgtccaactggtttgtcggtctgggcgtcgatattcaggaagcgaaagactataccccgagccatgcgctgctctatgttcggtattctgccgcaggctggcagggtgatatggacttaccgccggaaccgctggtgccttatgcagactggtga

SEQ ID NO: 119549 - DNA, 1563 bp, Enterobacter cloacae
gtggactccatattttctattggcatccagtcattatgggacgaattgcgccacatgccagtcggaggagtctggtgggttaatacggatcgtaatgaagatgccatcagtctggtaaaccagacgatagcggcgcagggtaaggattaccgcgtggccgtcattacgatgggcgatgagccaaagtcaattatcaggctcgaaactgaccgtggaccccagacagtacgattattttccatgccagcggaggccgacagtttatactttttgccccgcgatattcagtgctctattgttcctgaacactatttactgattcttaaatgttctcaaaacggtctacaaaatatcccgtctgaaaaactgctgaaatggctgggaagaatcagcagatgggcaaaaaatcaaaattgcaccttattggttgttaacccgggcagtaataacgacaaacttttttcacttttaatgagtgaataccgttccctctatggcctggccagtattcgtgtccagactgacagccatctttacgacgtggctttctggtgcaatgaaaaaggggtgagctcccgacagcagcttaccctcaaaaatgacggggacgagtggcatcttgctcaacaggaagagacggtggttcagccacgcagtgatgaaaagcgcgttctgagtcatattgcggtactggaaggtgcgcctgcactgtctgagcattggtcactgttcgaaactaacgaggccttatttgatgaggcgcgcaccacgcaggcggcgaccattatcttctcgttgatccagaataaccaaatcgaaacgctggcacggcacattcacacattacgtcgccagcgcggcagcgcattaaaaatcgtggtacgtgaaaataataccagcctgcgcgccaccgatgagcgcttattactgggctgcggcgcgaatatggtcattccctggaatgctcccctgtcgcgctgtctgacgctgatcgaaagcattcagggtcagcagtttaatcgatatgttccggaagatatcagcaccctgctttcaatgacgcagccgatgaaactgcgcggctaccagaaatgggacaccttctgcgatgcggtgggcaacatgatgagcaatacgcttttaccggcagacggaaaaggggtgatggttgccctgcgtcctgtgccgggcattcgcgttgagcaggcgctcaccttgtgccgccctaatcgtatcggggatatcatgaccattggcgataatcgcctggtgctgttcctctccttctgtcgggtgaacgatctggataccgccctgaaccatatcttcccgctgcctaccggggatattttctcgaaccgcatggtctggtttgaagataatttgatcagcgctgagcttgtccagatgcgagccctggcacctgaaaaatgggccaaaccgttgcctgtaacaagtggtgccaaaccggttctgaacgcgaaacatgacgggcatgtatggcgtcgggttcctgagccgctacgcttaatggatgagaacaaggagagcgttccattatga

SEQ ID NO: 119550 - DNA, 1659 bp, Enterobacter cloacae
atgactaattctacctatacctcttcggcgccatcgccactctggcaatactggcgcggtctgtccggctggaatttctactttctggtgaagtttggtctgctgtgggcaggctatcttaatttccacccgctgcttaatctggtgtttatggcattcctgctgatgccaatcccgaacctcaggctgcaccgtatacgtcactggattgctatccctatcggtttcgccctgttctggcatgatacctggctacccggccccgaaagcattatgagccagggttcccaggtcgcaggtttcagtgcggactatatgctcgatctggttgagcgctttattaactggcagatgattggcgcggtatttgtcctgctggttgcctggctgttcctgtctcagtggatccgggtgacggtgtttgtcgtcgcgattatgatctggctaaacgtactgacgctgacgggcccgagcttctcgctgtggccagccggtcagccgacgacaaccgtaaccaccacgggcggttccgccgccgctaccgtcgcgacagcaggggatacgcctgtggttggggatattccagcgcagacggcgccgccgacatctacgaacctgaacgcgtggctctccagtttttacgctgcggaagataagcgtcagacgaaattcccggacgcgctgcctgccgatgctcagccgtttgagttgctggtcattaacatctgttctctgtcctgggctgacgttgacgcggctggtttgatgtcgcacccgctgtggtcgcatttcgatattcagttcaaagacttcaactcggccacgtcgtacagcggcccagcggctatccgcctactgcgcgcgagctgtgggcagccctcgcataagaacctctaccagccggcagctaaccagtgttacctgtttgataacctggcaaaactgggctttacccaacacctgatgatgggccataacggtcagttcggtaacttcctgaaagaagtgcgtgaacagggtggcatgcaggccccactgatggaccagaaagggctgccagtgacgttactgggcttcgatggctcgccggtctatgacgataccgccgtacttcagcgctggttcgacaccgtcggtaaagaggaagggacgcgtagcgcgacgttctataatacgctgccgcttcacgacgggaaccattatcccggcgtaagtaaaacggccgattataaggcccgtgcgcagaagttcttcgacgagctggaaaaatcaggccgtaaagtgatggtggtggtggtcccggaacatggtggagcgctgaaaggcgacaggatgcaggtgtctggtctgcgcgatatcccaagcccgtccatcacaaacgttccggccgggattaagttctttggcatgaaggcaccgcatcagggcgcgccagttgagatcacccagccaagcagctatctggccatctcggaactggttgctcgcgctgtagacggtaagctgtttgtggaagatagcgtgaactgggatcagctcaccagcgggctgccgcagacggcggaggtatcggaaaacgccaatgcggtggtgatccagtatcagaataagccttatgtccgactgaatgccggggattgggtgccgtatccgcagtga

SEQ ID NO: 119551 - DNA, 1239 bp, Enterobacter cloacae
atgtttcaagcactgttacgccgtcgggaagcccggctctttttcatcatcagcatcctgttctttatctgcatccatagcattgatgcattcctggcccccatgatgatcaaccagggcattgagccacagatcatgggcatcatcatgggcgcatccgggctggcaacccttctgatacgcttcccgttaggcattatttccgacgtggttaaaagccgcaggatcttcatccagattggcctgctgctgccaattatcgcctggccaattgcctggcttgaacccaatgccattacgctgtatctggcgaaagcggcagacggcgtcacggcggcgacatgggtgctgtacaacatcctgttcatgcgttacttcggtcgcaacgaagcccctgccgccgtcgcgctgctggcgctggcagggcccatcggcgtgtttctcggcaactgtattggcgcggtgctgattcactattttgccaataacatcgccttttttgtctcctgcatctccgccctggtggcgttgatcctgacgacccgcattcaggacgtgcacgacccggtgcaggcccccacgcttaaagcctgcatcaccggcgcgcgccagcagctggccgaccgttccgtctggctgattggcatcctggcgaccgtcgtcattctggtgcccttcgccacccgggacacgctgacgccggtctacgccgaacagctcggcgcccgggcggggatcctcgcggtactcggaaacatccaccttctgttttacgggctggccatcgccctgtgcagctcggtgttttatcagcgccttgagctggtaaaaaccgccgtgctcggcatcgttttacaggtgatctccaccttcggcattccctttaccagcaatatgtacgtcatttacctgtggcaggcgctggcaggtttttcgttcggtatggcctttgccgcattcatgtcgctcagcgtagtgaatacctcgtctgatgaacaatccacgcgaatgggactattccagaccatttattcctgcgggatgtttgtcgggccggtaatgatgggcgtaatgatgcaacatattaacctgtcgtccggttatatattgattgccgccctttccgttgtggccgctattgccacgccgctgtccgctcgatgggtatatgcccgtaaaacgcaaacctcagcccaattattaaaaaacggtgcgtacgccgccgcgccggatcaataa

SEQ ID NO: 119552 - DNA, 1071 bp, Enterobacter cloacae
atgaaacgtaagacttttgcagcagtcacatcccaacaggtcgctcagctggcgggggtatcgcaatctgcggtgtcgcgaacgttcacgccgggggccagcatttcaccggcaacgcgtgaaaaagtgctgaaggcggcgcgcgagttgggctatcgcccgaatgcgatagcccgttcgctcaacacggcgcgttcgcgcattatcggtgtcgtcatttcttactttgataaccccttttactcgcaggtgctggaggcgctggcacaaaagctggatacgctgaactatcacctgctgctgttcgttggcgaccgggacggtaacgttgaccgtatttttgaccagattatgcagtaccgggtggatggcattgtgctggcctcggtgacgctgtcgctggagttgtccgaggaatgtcttgccgccgggatcccggtagtgctgtttaaccgcagcgaagagagtggcatggcctccagcgtcaacagtaataacgaagcggccgcgcggcagattgccgagtttctgctggcgggggagcacaagcgttttgcctacgtgggcggcgtggcggattccccggtcaatatcgcccgccagcgcgggttcatctccacgctggaagaacatggcatcaccgatgtgcgggtggtgcacgggaattacgacgctcagcaaaccacccgggcggcttataccctgttttcggcgtcgccagcgccggatgcggtctttgtcgccaacgatcatatggccgtcacggtaatggatgtggcgcgctatgagtttggtttgcgcattccggaggaggtctccattgtcgggtatgacgacatcggcccttccggctggccctcttatgcgttgacctcggcgtcgcagccggtcggcgcgatggtagatgccacggtggaactgttaatgaagcaaattgacagcggaaccatagagcctgaacagattacggtgcccggtacgctggtgatacgccactcggcgcgtcgcccacgcagcggcgttatcgaaaccaatggtttaacgctattccagtctaaggagcgcacatga

SEQ ID NO: 119553 - DNA, 972 bp, Enterobacter cloacae
atgaccagattgcggggcttcagccctcaattcgactctatccagcagttcattttgacgctgacgcacgtggtgtgggagcagaaagatatcggccagctggcggatttttacgccacgccggtggttttcactacccccgaaaaacagctgcatgagctttcccagtttatgcgcctgacgcttgaggcgatgcacagcttcccgcagcgagcggtgctgacggaggatattctgtgcagcctgaacccgggggacgagtactatgcggctcagcgtaccgtagcccgcattcagcatcagggggagggattttttggcccgccgaccgggaaaaatgtctgggtccgcacctgggccgatcgcatctgtgttgatggggccgtacgccaggagtggctgcttcaggatcgtgctgcgattgtggcgcaactggggctggatatccgcgaatttgcctttaacctggcgaccatgcgccagcagcttggcgtggaggcggtctctgccgagacgctggatgcccgctgggcgggcgggcccgagggcgacgacgtagaaggggcgctggcaggcgtcgttgagcgctacttaaccatgtgggcgggcggtaacagtggcgtggtgcccggtctctatcacccggcggcgacgctttacgcgccgggtcattgcctctgcaccggtgagcaggaaattggggcacagctttctggctaccgcgcttcatttgccgacagcgaaacgcagctccatcatctgattgtgcgtaaagatcctaacgagccgaatcggctttccctgcgctggtcgttattaacctggcatgacggttacggcaaatttggtgcgccaacccgtaaacccatatcaattaccggtatcagccagcttgaattacgtgatggtttaattttccgtgaatatctggggatcgatgaattagcgatctggtcgcaaattgtaaattaa

SEQ ID NO: 119554 - DNA, 1143 bp, Enterobacter cloacae
atgtcttccaccgaagcaacaaataaagcaccagccgtacccgaaaaaagcagcgtgaaatcgctgaaagaggaacctgtattacaggtggaacgtcgtgattttgtcgatctggtaccggaaaaaagaccgcgcgtgcaatcattacgcggctttgatgactgctataccgatattgtcgattatatagttcgctgcacccataaaatatgggacgagcgcgatgtcggcttaatttattctcactatacccataactgcgtgctgtataacgcgctggggacactctataaccgtgagcaggtggtacaggatacgctgcaacgcttaattgccttcccggagcggcgcggcatggcaacccaggttatctggaacggaaatgatgttgacggtttttatacctctcacctggtgacgggaagcgggcggcatacccagcacagccatttaggcaagccgaccaaccgcaccttcgttacccgtaccgtggcagattgcatgatccacgagaataaaatttaccgggagtgggtggtcagcgacaacatgtcgttaatgaaacagcttggcctgaataccgatcaaatcgcatttaatatggcaaaggagcagtttgataaaggcttccgcgtgatggacatcggcgaaaatggccgcatgctgggacaatatccgccggagatggagtgcgatgtatccattgcacacaccgatacggaagagcagtgtctgcgctggctgcatgagatctacaatcgtcggatgttcggcaaaatcaaagaggtttacgcccctaacgtgcagtggcatggcccgctgatgaaagagctgtacggcaccgcggcggtaacccatcagacgctggcgctggtggggatgatccctgacggcgcgtggctgccgcagcatatctgttccaacccgtgcgatgaaggcggcgtcaaagtggcggttcgctggatcatcgaagggcatcacctgggttacggcgaactgggcaagccgaccggagaacgactgtttgtgatgggcatgtcgcactaccacatcgtcaacggcaaaattgttgatgaatgggtcgtgtatgaccacctggcgctgctggcgcaaatcaaactcggccagatggaggacgcgtaa

SEQ ID NO: 119555 - DNA, 1296 bp, Enterobacter cloacae
atgttaaatcaggtgagctggattaaggccccgcaggggcaggatgcgcaggccgatcgttccctaacggagaaggtcagcgccattatcgagcgcgtgaaaaccgaaggcgatacggcgctaagagccttttcgcagcagtttgataacgccgtgccgacgcagtttgaggtgagcgagcaggagatcgccgaagcactgcaggggatggatgcccagacgcgccgcgacagcgagtttgctattaatcaggtgcgtcgttttgcgcaggcgcagctggcgaccatgcagccgctggaagttgagacgctgcctggcgtgcatctcggtcaccggatcatcccggtgcagacggtgggctgctacgtgccgggtgggcgttacccgatcctctctgcgccggtgatgtcgattgtccctgcgacggtggcgggctgcgaacagatcatcgcctgtctgccgccgggagcgcatccgacgatgatcgcggtttgccatctggcgggcgcgcaccgcattttcagggtaggtggcgcgcaggccattgcggccatggcctggggaacggagagcattccatcggtggacaaaatcgttgggccaggcaacgccttcgttaacgaagcgaaacgccaggtgtttggtcgagtcggcattgatgccctcgccgggccgagcgagattttcactatcgctgacgacagcgccgatccgcgcattctggccgccgatatgctggcgcaggcagagcacgatattcatacccgcgtcgggctggcgacaaccagccgggatatcgctgagcgtaccctggcggaggttgagcgtcagcttgccagcctgccaacggccgccacggcgggggaggcgtggcgccggcagggtgagattgcgctttgcgaagatgaagcgcagctgattgcgtttgctgaccatatggcgacggagcatttgcaggtgcatacccgcgatccgcacgcgacggcggcgaagatccgcaactatggctcgctgtttattggtcagaacgccagcgtggtgttctctgataaatgctgcggcaccaaccacacgttaccgacgatggcttcggcacgctataccggtggtctgtgggttggggcgtacgtcaaaatctgtacccatcagtggattgacgagcagggtatcccggcaatcgcagaaccggcgatccgccagagccgtaccgaggggatgcaggggcaccgacgggcggcggaaattcgtctgcgtccgcaggacattgatgccattactaccggcatgcgggactaa

SEQ ID NO: 119556 - DNA, 294 bp, Enterobacter cloacae
atgcaaaatttctatcatattgatcagctgattcagggttatttcaatcaggatcatgacctcataaatgagggagaggatactattgagggcactattgaacgctataaaaaaacagccccagattggatgttaaaagagttagccgaagaggtcgattgttttcttaagctttacgaagacaggctggatgagcaattcaaaagccggtatggatttgatttctcacctgagttgtgggattcaaccccattcgatttcctgatgactgtgcgcagacttgccctttcttag

SEQ ID NO: 119557 - DNA, 252 bp, Enterobacter cloacae
atgcgtgcagctcaggcgaagtgggacaaaattcagcgcggagtcgcggagttttcaatctcgctggctattggtcgtgctgatttatttcctgagacaccgatagcggtcagaggctttaagcgcgttatagacaagcaggcttggataatcagtcgggtggtgcactaccttaacgggagcggctacacgacaggcttggagcttgaggttagagtttcggacgtggagtatgaatcactggaagaataa

SEQ ID NO: 119558 - DNA, 198 bp, Enterobacter cloacae
atgaatgaaagtaagcaaagcttacaaattcataaatacttcaggagttacttattactctttgtaaatatgtttttgattttgacttactcgaataaaacttgttttattcgtataggtaagcaattaaagaaagttattaatctactttctaatccttctaataacaacacaaatcatagatttggttgtaagtaa

SEQ ID NO: 119559 - DNA, 624 bp, Enterobacter cloacae
atgaaaggaagatttccaggcggggaatcatctaatcatttaggaggtttttgtttataccgcctgataaacaaggaagtaaatattatgccaaaatcatctatcactattggtgatgtattcattactaacaattgtgggttttgtactgtcattgattatacaaacaaagatagcgtaactatcaaatttgataatacaggtttcattacaaaggttagagcaagaaatttaaaatcaggacaagtaaaagatccctatgcaatctcggtttgtgaggttggttttataggagtgggtgtaccaactacgattaatggaaaacttacaagaatctatagtttatgggtacatatgcttacacgttgttatagtgaaaagtatcacttagatttccctagctataaaggttgtagtgttgcccctcgttggtgttgttttgctaattttgctaacgacatcaaaacacttgaagggtatgaagattggttagatccgcataataaaatttgcctcgataaagatgcaaaagatccaggtaataaactctatagtattgatacgtgtcgtttcattacctcttatgaaaacattgctgatgcttcctatcgtcgctctcattga

SEQ ID NO: 119560 - DNA, 606 bp, Enterobacter cloacae
atgatgaaatacattaaagatagccttgcattaagtgctttggttaaaagtaaaatggcgaccgatgatcccaaccagcttgaaacattaaaagaacagttaaaagatcggttcggcgttcctgtgggcgtccatatgacaggaattcctttggcagtgagcacgttactggctattttttgctacgccatgctgcaagtatccctctggttgttgctgtttcgctggctcggcttacccgaatttaaggttatgatgggagtattcattgcagcgattgtgtattgtctggtagtgatgagcacgatgtttctgactacacgaggttctttacctggatataaactgcatattttcgtcattacgctgacaggcataatgagcatcatttatttcatctggacggggatttcgcttttatacggccctgttgagaactacacaccgcaaataacctctttgctggggctgggatgtttctttctgaacattatgtggatgaattcatcgattttttaccgctccattgcgctaacgctacataatcgggtctggcgtaagcagctcaaaatcgaggcaaggccaatgtcacacctcaaacgttga

SEQ ID NO: 119561 - DNA, 966 bp, Enterobacter cloacae
gtgacattcacaggacaactttcaaaggatcttccagattacgaactcgcacgcagtcttggtcttgcctctggcggcgatataaatttcacagcacttgcaggtcaactggactgcagcagaaattttagccaggccgggattatctactcagacggtacacgtcagtggctagtacggccatcaagaaggattgcgacaccaaacgaaagctcggttagtcatgtagtcataaccaaagtaaatgcctcacaagttaaccccgttcacgcaacaacggctacgattcagtccccttccctggcgactgaaattggttcaacggcaatttcctgcggagccgcaattcttactgttgtacttgcggcaggggccggtatggctatacctctcactgcagggtcttccggtgctatagccgctgtgattttagccggtggtgtagcaactggaattcaatgtgcaaatgggcttggccgactatcgttgattgctatgaatcacgatgactacgttgcgtggatggactcccaggagtggtatacagcaaccaacacagccctggatgcgatttctcttgccggggctgctgcgggtttaaaaagcgctgcattaacatatcgccttcttaaccgttcatcgtctgagagtttgctctccttattacaaaaaatgagccgggccgaccgtacgcgattaacagaggagattattcgtatccgcaatcccggcatctcgaattcaggtgtaaaagcagcaatgaaggcaggcgtgtatcccaaacgttatccgtcagaagcgttgcagttgctcttacagcgtgagttgctgaataccatttcaaattcttctgccttcgttggaagtgccatctcaggaaatatcagaaatccacagaatgttgcacaaacgggtaaatacatttttggtttaattcagtctttttcatttacaggaagttattga

SEQ ID NO: 119562 - DNA, 1011 bp, Enterobacter cloacae
atgagtattaagaaactcgatgatggtcgttatgaagtggacatcagacctgctgggcgcaacggaaagcgcatccgcaggaagttcgacaagaaaagcgaagctatcgcttttgagaaacatacccaatacaaccaccacaacaaggattggttagcgaaaccgacagataagcggcatctgtcagagctaacgaaaatctggtgggagttgaagggtaagcacgaggttcatggtaagtctaatctggggaaaatagagattttcacaaagataaccggtgacccttgtgcatttcagattactaaatctgtgataagccaatacaccgctatacgcaggtcacaaggcgttaaaccatcgagtattaatcgtgacctaacctgccttagcggaatgttcaccgcccttattgatgcagaattgtttttcggtgaacacccgttccggggtatgaaaaggctaaaagaagataaacctgaaacgggatatcttactcaggacgagatcgcccttcttctttcaaaactagaaggtgacaataaaaaaatcgcaatcctctgtcttagcaccggggcaaggtggagcgaagcggcaagactcaaagctgaaaatgtgatccataatcgctgcacttttgtcaaaacaaaaacaaacaagccccgcaccgtcccaatatcagatgaggttgcagggttgattactggaaacaagcgaggatttttattcccagatgccaattatccggcatttaggcgactaatgaaggagttaaaaccagatttacctgccggtcaggcaacccacgcattacgacatagtttcgcaacgcatttcatgattaatggtgggagcattatcacattgcaaaggatactcgggcattcccgcatagaacaaacaatggtctatgcacactttgcacctgaatatctacaggatgcgatttcgctaaacccattgagaggtggagtgagtaccgtgagtgtccacactgcgtccacatcatag

SEQ ID NO: 119563 - DNA, 300 bp, Enterobacter cloacae
atgtcaactgctatcaatgagaagctcgcacttatgcgagagtctgaaaggttaaacagaaagcaattcgctgaaattacaggagttccatacagttcactaacttactatgagagtggcagaacgatccctcctaccgacgtaacaatgaaaatcctgcaaaacccccgttttagtaaatacacattatggtttatgactgaaaccatatcccccgagtccgggcaaatagcgccggctctcgcacactttgggcaatccgaaacaacctcgcagcactcagaccaaaagattggctaa

SEQ ID NO: 119564 - DNA, 276 bp, Enterobacter cloacae
atgagtaaacaaattgtcagcagtagcgatgcagtgccatacaaagagtttgcaaggcttattggtaaatcccccgatgccgtacgtggaatgattgagaaagggaagcttcctgtaatcgaaatgaccgacccaaaatcgtcagctaagcgggctggtgagtattgggtttaccttccagcttggaacaaaggaatgcaattagcgtatgaaagccgcccgaaagagattcgcgatggctggttgatgtggttaggtttaggcgaaccggtttag

SEQ ID NO: 119565 - DNA, 180 bp, Enterobacter cloacae
atgactgaacctcgttgtattgctcagttactccgtaacgagagcccgaccccgattaacttcaccatcacccacggccggggacgtaaaggcatcattatccgtacccgtaagcctggcattttggccgctgttgttaagcgcattatgaaaatcagagaggtgtcaaaatggctgtga

SEQ ID NO: 119566 - DNA, 501 bp, Enterobacter cloacae
atggctgtgatgactcttgatttggtacaaaaacaacctgctgcactgcgcgttgtcatcggcaaacatcttgcagaacctcgctggcaggactcctgcgatttttacaatcagatgatggagcgcgaccgcctgacggtctgttttcacgctcagcttaaacagcgtcatgcgaccatgcgctttgaagaaatgaacgatgtagaccgtgagcgtctggcctgcgcgattgacgagctgcgcggtgcgttttctaaacggcgtcaggtcggtgccagtgaatcggcgtatataagttatctgacagtaagccagcgccgcactttattccttcacgcaggattaactgaaaaggaatttaatcagccttactggcgagttaatgaggagtcatgttattggcgtgagaaattatttcgtgcgctacgtgagttattcagcctctttgaatatgccccaactattttgacctcggttaagcccgagcaatatttgcattaa

SEQ ID NO: 119567 - DNA, 216 bp, Enterobacter cloacae
atggaaaaagaaatatcagttcctcgcagcaacatgaaagagttgttagcgcaggccacctttgaggctcagatagtcaccgcgacgcgtttagcgtctgcgctcgattctctgatagctcacatttgcaagtcagaaatgaaccgcacggaaatcattgaactgttggggcaggagtccgaaaagcttcacagctctatattaaatcagcgataa

SEQ ID NO: 119568 - DNA, 276 bp, Enterobacter cloacae
atgagtattaatattgttatcgataataagttcgtaattaccagcgaccagttccagtttattttgcaggaaaagaaaatcgctaagtctggaaagaatgccggtaaagagtggctcgatactgttggtttttatccaacaattggcaagctcgtttccgctttagtgctgcacaacattttaaccggcgaagctcgtcagttttctgaattagagaagcaggtcgagaagttaggtcaaaaatgtctcgaagcattcactgctaatggccgttga

SEQ ID NO: 119569 - DNA, 2298 bp, Enterobacter cloacae
atggccgttgagacccgggggcgcgttgccccctcgccacccccaccaataccaaaaagcaccggtgagaatttcgtcggtgcttatccgtggaacaaatcccgcgaggccattggccgcgacagaccccttacacgtgccgaactccgtcaggtgcaaggtgttttaaaccggattgaccgtctgccgtttttcctgcaaacgctgtttacctcgcgttataacttcatccgccgcacaaagagccctttgggtggactgtatttcctcaaaaacacgtttgagcgcaagctgttgccgcgtcttgagcgggttaatgaactgtgcgggatgaatgaatccgcctcgataggttttttatctgcgcgtgatgaatatgcacgcctgccggatatgaacgacaaagagctcaggaaatttgctgccagaatagcctcgcagctctggagcagatacgaagaattaagcgatgcatgggcgcacgctcacggcggcagagagaccctcttcactgatgaggcgcaggcgcatttatacggaaaggttgccggagtcgcgcgcgcttttaactttaccccgatgtactggaaaaaataccgtaagggtcagatgacgatccgcatggcattttccgctatttcacgtctgattaaggatgagtggtgggttaaccagctcaaggcgcagcgtatgcgctggcgcgaggcgctgctcattgctgccggtgaggtcaacaaagaccgctccccctacgccagcaaaatggcgatccgcgatgtacatgcgcgacgcctggctaatctcgaatacctgaaatcctgcgagctcgaaaacaaagtcaccggcgagcgtatcgacctcatcagtaaggtcatggggagtatttctaaccctgaaatccgccgtatggagctgatgaacactatcgccgggattgagcgctatgcggccagcgttggtgatgttgggatgtttatcacgctgaccacaccatcgaagtatcacccgacacgtcaggtcggcaagggcaaaaacaaaacggtacagcttaatcatggctggaacgaaaccgcattcacccccaaagacgggcagcgctatctgtgccgaatctggagcctgatgcgcaccgcgttcaaagataacgatttagaggtttacgggatgcgcgttgtcgaaccgcaccacgacggcacgccgcactggcacatgatgctgttttgcaaacccggtcagcgtaaagccattaacgaaattatgcgtcgttatgccctcaaagaggacggtcatgaaaagggtgcggcaaaacagcgctttgagtcacgtcatcttaatcagggcggcgcggcgggttatatcgctaaatacattgccaaaaatatcgacggttacgcactcgacggccagctcgaccacgacaccggcaagcccctgaaagatacagccgccgccgtcaccgcatgggcgtccacatggcgcatcccgcagtttaaaccaattggcctcccgacgatgggcgcttaccgcgaactgcgcaagctgccgcgtggcgtgagtatcgccagtgagtttgacgaccgtgtcgaggctgtccgggctgctgctgatgaaggtgaatttgacctgtatatcatcgcgcagggaggagcaaacattaagcgtgatgctcaggccgtcagggtcgcccgtaaggtgacggatgaggtcaacgaatacgaggaagatatcgagagggtggtcggtatttatgcccctcaccttggggctgaccgtgtccgtgtaacccgtacagccgaatggcgcatcgttccaaaggttttggccgttgagcctttgaccttaaaaagcggcttcgccgcgcctcggagtcctgtcaataactgtggaaagctcaccggtggtggcgatccagttatgaaccccacaccgtctgagcaagccgcagcggtgttaaatctgattgagcgcggggttatcggctggaatgagccagacgtcgtgaaggtgcttaacggtgcgttgaaagctggcacaccgcgcaaaaatcgccagcaaagaagcaacgcgccgctcaaaacgagcgagcaagcgccatcagccaggatgacaaaacccgaaagggatcgcgtcgcgaaaattcgtttcgatttggctcaggagggcattaccccggaacggtgggagctcgatgcgctggcgcgtggagcaacggtgatttatggcgataaaaaattcagatattcggctgatgatgagtggccgggtcatacacacaaaaaggagtggagtttatgttag

SEQ ID NO: 119570 - DNA, 1005 bp, Enterobacter cloacae
atgtcaaaagaaaacacaccatcggaaccaaatataaatatcaaggcagatttcaccgaaatattaaactcctcacctaagggagctaaatacattttcaatatccttttcggtaaaagacacgctgaggcagagcgaagaataagattgtctaatgctcaggattatgccgacatgaaaaaaattatatctggggaagccgtatatgaaaatgaaagcaaccaggtcactgtccctagtcatgatatcaaatcattaattgtcagcaccttgcaagatgaagaagtcacaaaccttttaggctgcataaaaaacacacctcattatattaatgatgtttctgatgaaggaagtgagccatcacaagattttataaacagatggcgaaatgatgccaagctaataaatgacgaatctattcagtatgtctggggtcgaattctggcggaggaaataaacacccctaaaactgttagtataaggacccttgatgtaataaagaatttatcaaaagaagaagccgagattttctcagagtctctggattttatattttacaattcgtacctgattgagaatggcgatgataacaattcatttatccctgccgataaagtgcgtaagttgaatgatgctggcctaatgacatcatttacccctggcatgtatcaccaaagtacgtggcccacgcaacggtttgtccttaatggggatgccatacctaaagtattttacctcagcagctctgataaatacttctttattgacgcagataaagtgaaagaagaaccaaaagttaaggtatgggagttaacaaacgctggcaaggaattatatgaaatcctcaagaaaggtcatataacaaaagaagagtcagtaaagcaaattattgattggatcttaaaagatacaaatgcgcctgagttttactacgggaatattattgaaaccacaggcaataaaaagtcggtcgaagatttaaaaacagtaaccagaaacaaatag

SEQ ID NO: 119571 - DNA, 681 bp, Enterobacter cloacae
atgagcgtgaccggccagctcatgaagcttgaaacctccccggccaaatacacccgccggggtgtcgaggaggatgtttactggtacgtgtcggatttctcgcacccgcaccagttcgcccccggctcagtctgtcatctgcttgagcctgacatcaatcaggagctgtacgggatgccggaatacctgagcgcgcttaattctgcctggctgaatgaatccgccacgctgtttcgtcgcaagtattaccagaacggcgcgcacgcgggttacatcatgtacgtcaccgacgcggcgcagagcagcaccgacgtcgaggcgctgcgctccgcgatgcgcgactcgaaagggctcgggaatttcaaaaacctgtttttctatgccccgaacgggaaaccggacggcatcaagattgtgccgctgagtgaagtcgccacgaaggatgattttttcaacatcaaaaaggtgagcgccgccgacctgctcgatgcgcaccgtgtaccgttccagcttatgggcggcaagcccgagaatattggctcaatgggtgatatcgagaaggtggcgcgggtgtttgtacgtaacgagctgacgccattgcaggagcgtttcaaagaaatcaatgaatggctcggtttagaggttatccgctttaaggattacaacatcgaaactgagtaa

SEQ ID NO: 119572 - DNA, 1884 bp, Enterobacter cloacae
gtgaaaaatgacaatgcagtgcaacacaacaaccagactgcttctgagcagacattatccccggacgagggccacgtattgcataaggtgagagatcccgtgtgcgggatggtcatcctgcctgacaaggcgcacagcagcattcgataccaggaccatcagctttatttctgctccgccagctgtgagagcaaatttaaagcccatcccgatcattattttaccgaagatgccagtgaacattcccatcaccatcaccacgatcatcacgaagtcagccctgatcagataaaacagcctcacaaccaggcggaaaaagagaattctgaaggtgtgtggacatgtccgatgcacccggagatacgccgcagtggtcccggaagctgtcctgtctgtggaatggcactggagccgctcgtagctacggcatccacggggccgagtgatgaacttcacgacatgacaagacgcttctggctggggttgttgctggcgtttccggttctggtactcgaaatgggatctcatctgtttcccgacttgaggaatacagtaccgccacagtacaacacatggctgcagttgcttctggcctcccctgtcgtgttgtggtgtggctggccattcttcgcccgggccggaatgtcgttacgtaaccgctccctgaatatgtttacccttgttgcaatggggaccggcgtagcctgggtttacagcgtcattgcaaccgtcttcccctcctggtttcctgcatcgttcagaaacatggatggcctggtggccgtttattttgaagccgcagcagttattacggtgcttgttctgctgggacaggttcttgagctgcgggcacgggaacaaacctcaggcgccattactgcgcttctgaaccttgcccccaaaaccgccagacggctggatcatgacggtcatgaaacggatattaatgcggaagatgtcctgcctggcgataagctccgcatcagacctggagagagtattccggtcgacggtatcgtgatcgaaggcaaaacaaccgtggatgaatcgatggtgaccggggagtctatgccggttaccaaaacgaagggtgaccctgtcattggggggacgattaatcagacaggtagtcttatcatccgtgcagagaaagtcggtgatgaaacgatgctctcacgaattgttcagatggtcgctgatgcacagcgttcgcgtgcccccatccagagaatggcagacagcgtttcaggctggtttgttcctctggtgatacttatcgcggttgttgctttcttgatctggtctgtctgggggcccgagcccaggatggcgcacggtctcattgcggctgtgtcggtcctgattattgcctgtccctgcgcgctgggactggccacgccgatgtcgataatggtgggggtgggcaaaggcgcccaggccggggtgttaatcaagaatgccgaagcccttgagcgtcttgaaaaagtggacacgctggttgtcgacaaaacaggcacgctcacggaaggttcgcctacggtgacagggattatcagtctcagtccgggtggggaaatatctcttttacgtgtaacagctgcagtggaaaaaggttcgcagcatccgttgggtatggctgttgtcagagccgcgcatgaaaaggggatcgtgatacctgccgtcagtaatttcaatgccccgtcggggaaaggtgtctcaggcgatgtcgaaggtcaacgggttgttattggtaatgaactggctatgcaggaaaacagtatcgttattgataatcaaaaggccgttgcggatacgttgcggatggaaggcgctaccgttatctatgtggggtcggttccggctgagggcgaaatgacaccctaa

SEQ ID NO: 119573 - DNA, 1293 bp, Enterobacter cloacae
atggcttctttaaagataaaatatgctgcaataattatcagcagcctcatagcaggggggctgatatcggttactgcctggcagtatgtaaactcatcacaaaaaacagtacaaaccgaacaaaaggcaccggagcgaaaggtacttttctggtatgacccgatgaaaccggataccaaatttgataaacccggaaaatctccctttatggatatggacctggtgccgaaatatgctgatgaaagtggcgataaaagcagtggcgggatccgtatcgatccaacccaggttcagaatctgggattaaaaacgcaaaaagttacgcgaggaatgctgaattattcccagacaatcccggctaatgtcagttacaacgagtatcagtttgtcattgtgcaggcgcgttctgacggtttcgtcgaaaaagtgtatcccctgacgattggcgatcatgtgaagaaaggcactccgcttatcgatatcaccattcctgaatgggttgaggcacaaagtgagttcctgctgttatccggtacaggcggtacgtcaacccagataaaaggggttctggagcgacttcgtctggctggtatgccggaagaggatattcaaaggctgcgttcaacccgcacaatccagacccgttttaccattaaagcacctattgatggtgtcattactgcgtttgacctgcgcaccggaatgaatatttcgaaagataaagtagtggctcagattcaggggatggacccggtctggatcagcgctgcagtgccagaatctatcgcctatctgctgaaagatacgtcgcagtttgaaatttcggtaccggcttatccggataaaacattccatgtcgaaaaatggaacattcttcccagcgtggatcagacaacccgtacgcttcaggtccgtctccaggtttctaataaggatgagtttctcaagccgggcatgaatgcctatctgaaactgaataccaagagccaggagatgctgctgataccaagccaggccgttatcgataccggcaaagaacagcgcgtgattactgttgatgatgaaggcaagtttgtgccgaaacagatccacgttctgcatgaatcacagcaacagtccggcattggctccggcctgaatgaaggcgataccgtggtggtcagtggcctgttcctcattgactccgaagccaatattacgggcgcgctggaacgtatgcgccaccctgaaaaaacagaaaacagtatgccagcaatgtctgagcagcctgtaaatatgcattcagggcactga

SEQ ID NO: 119574 - DNA, 432 bp, Enterobacter cloacae
atgaaaaatatcgtattagcatccttgctgggctttggtttaatttcttcggcctgggccactgaaaccgtgaatatccatgagcgggtcaacaatgcacaggctcctgctcaccagatgcagtctgctgcggctcctgtcgggatccaggggactactcctcgtatggccggtatggaccagcatgaacaggccattattgctcatgaaaccatgacgaacgggtcggcggatgcgcaccagaaaatggttgaaagtcatcagaggatgatgggaagtcagaccgtttcccctaccgggccgtcgaagtcattagcggcaatgaatgagcatgaaagagctgcagttgcccatgaatttatgaataacggtcagtctggcccacatcaggccatggccgaagcgcatcgtcgcatgctcagtgcaggctga

SEQ ID NO: 119575 - DNA, 351 bp, Enterobacter cloacae
atgaaagccagaaacactttatttgcagtattattgttatccctgccagcgatttcagcagaacattcagaaatgaaaatgactgatatgtctacctcggcttcgtcacaggaatatatggctggcatgaaagacatgcatgacaaaatgatggctgccgtaaatgaatccgatcccgacaaggcttttgcgaaaggcatggtagcgcaccatgaaggggcaatagcaatggctgagaccgagctaaaatacggaaaagatccggaaatgagaaagctcgcacaggacatcattaaagctcaaaaaggtgaaattgagcagatgaataaatggcttgatagtcaaaagtaa

SEQ ID NO: 119576 - DNA, 909 bp, Enterobacter cloacae
gtgatctataagatttgccaggtaattgacggggagtacgtctgcgacattgatatcagtgtggaagaatggaaaaatctgttaatgaatgaaaaggtttttgactctaaaagtattgaggcgttaaaaaaatggtatattgaaccaaatcattcctgcacatgttttgatataggcaaaaagtacgaccagcacagtatgagtgctaatggcgttattaacgggctcggtggtagagttcaaaaagagctaggaaggtttgaagttaaagggatcgggaatatagcacctggcacaaaattcattacagtcatgaagagtaaagaaaccggtgaaaaaccaaaaagatacttatggactattcgtgatgaacttgttcaggcaattaaagagctggatttatttggtgtggaagaaataaccatcaatgagtattactcagacgatgagttgatcaacgccatggaagcgaataatacatttgatatcgcccaggcatttgaatatacaggggaagctaaaccaaagaaacatgcaattgaagtaaaaaatggcgtctcgtacccaagaaataaaggggtttcgaaaaatgcactgaacaaagcaggttacagatgtgaagtcgatggtgaacacccaaccttcagaaggcgtaactcttccctgaattatactgaacctcatcacattgtacctatgtccatgcaggatgattttaacacttcgcttgacgtcgaagaaaatataatatcgctgtgttgcaattgccataagcaaattcacctcggccagggatatgaagaaatgcttgagaaaatatataatgagagaaaggagttattaaaacaggtagctatcgatatatctctggaggatttgattcgctattataaaggtgagaacaggtga

SEQ ID NO: 119577 - DNA, 1023 bp, Enterobacter cloacae
atggataagagagtgatatttgcggttgccggctcgggcaagaccacgctgctgatacggcggttgagtgaggaccggagaacgctgatcctgaccttcaccgtgaataatgaagcgcatctgcgggcgcagattatcagacgttttggctttatcccggacgggatcagggtgatgacctggtttgagtttctgcacggtttttgcttccggcctttcctgcaggagcggctggcatcgcgtggcctgagcttcgaccgaccccctcccggaataccgcgcacgaatgcccggcattatcaggatcccgccggacggctatatcaccggaggctcgcacacttgctgacagcccgggggctgctgccggatatccgtacccggcttgcccgttactacgatgaactgcttgtcgatgaagtccaggactttgccggacatgactttgattttctgctggagctctgccgtgcggaaatcactgtgctgtgttgcggtgatttttatcagcatacctttgatacaagccgtgacggcaacgttaattcagcgctgcacgatgacattacgcgatatgaggcccgcttcgccgcagcaggtttcatggttgaccgtaacacgctcaaccgaacatggcgttgctcgacttcggtgtgcgagtttatcaccgggcaactgaacatccgtatcgctgcccatgggatacatgccaccctgattgaaacgatcacagatgcagagcgcacagccaccctgcacgccgataatacggtgattaagctcttctatcgtgaacatcaccgttacggctgctattccatgaactggggcgtcagcaaagggctcgatcactttcaggatgtctgcattgtgatggggcccgcccactggaagcttctgacccgtcaggaactggcagcccttccaccgtcgtcccgtaacaggctgtacgtggcatgctcacgggcgcgcggcaacatttattttgttccggaaactcatctgcgccgattccgaaactga

SEQ ID NO: 119578 - DNA, 1563 bp, Enterobacter cloacae
atgcctctgatcacgcggcttatgctacaaaactttaaaaagtttccggaactggatctgcgcttcactcatgaccgtaacattctggtcggtgacaacgagtccgggaaaagcacgattctgctggcccttgaccttgtgctgagtgacagccggcaccgggtcgaggcattgggtgtggaatcgctcctgtcccagtcagcagtcaggcattttcaggaaggtgagcgccgcgccgagctgttacccgtgctgacagctgacgttttcctgagtaatgggggagatcctgacctgaacggcaggcaaaatctggcgggtatcgatgcggatggactcagaatgcgcattgcaccaatgacggaggaatacggtcaggatattcacaatgtactacagcaggatcccgataattttccctatgaatactattccgtgcggttcagcaccttctccggtggtcatttcgccggcttcagacgctatctgcgccatctgctgttagacagtgcacgcatcgataacgagcacgccgcacaggaatatacgcgcacagtttacagcgtcaatgtgccggtggccgatcgttaccggcttgaaaacagttaccggcaacagaaaatgctcttctgcacccggcatctgtcagccataaacgacacgctggaaacgtatcagtttggcgtgcgttccggtgctaaatcaggtcttgaggcgaatctggacattaccgaggacggtatttccattcgtcaccgtggaaaaggaaggcagtgcttcatcaaaacagagtttgcgctgcagcggcatcagcagcagggagagctccacgcactgttgcttgaggagccggagaatcatctcagccatgtcagtatgaagaggctggttaatcagcttgccactgaacggcagacgcaggtgtttattgccacacacagcagccatatctcctcccgcctcgatctacgtaaggcaatcctcctcggatctacccggccggtactgatgaatgaactttccgctgagactgccgccttcttcatgaaagcaccggataataacgtgctggaatttgcgctagccagacgtgtactgctcgtggagggggatgctgagtttattctgattgaggccttttatcgccgcctgtatggcagggcgccggaggatgacggggttcacatcatcgctatcggcggaacgagtttccgtcgttatcttgaactggcccgtcttctggaaaatcgcgtcgcggcccttcgtgataatgacggaaactatcagcaaaactgcgatgaacgctatgctgatgtgctgtgttcccgcacccgggcatttgctgatcgcgacaacacccgatccacatttgaaatctgcctgtatcaggataacgctgctctgtgtgacgcgcttttccgcggaacccgccgaacactcacggtgcaggaatacatgctggccaataaggcagaagcagcattccggctgttacagctgcacgccgaagagctgacggtacctgattatattcaggaggcactggcatggataagagagtga

SEQ ID NO: 119579 - DNA, 411 bp, Enterobacter cloacae
gtgaacaaaatgtatatgctcgacaccaacatctgctcgttcatcatgcgcgagcagccggaagccgtcctgaagcgtctggagcaggcggtgctgcggggtcaccgcattgtggtttcggccatcacctgggccgaagtgtcactggcatcacaggaagcaggaccagccgcacagaagctggctgacgccttcgctgcccgccttgatgccatcctgccctgggaccgtaccgcggtggacgcgaccacggaaattaaggtggcgctgcgcctcgccggcacgccgatcgggccgaacgacacggcgatcgccgggcacgccatcgccgccggtgccgtgctggtgaccaataatgtgcgggaatttgagcgggtgccgggtcttgtgctggaagactgggtaagataa

SEQ ID NO: 119580 - DNA, 231 bp, Enterobacter cloacae
atgagaaccgtatccattttcaaaaacggcaacaaccgcgccatccgcctgccccgcgatctggattttgagggggtgagcgagctggagatcgtccgggaaggggacagcattattctgcgtcccgtccggccgacctggggctcgttcctggagctcgaaaaagctgacccggactttatggctgagcgcggggacgttgtcagcgacgaaggacgggttaacctgtga

SEQ ID NO: 119581 - DNA, 1128 bp, Enterobacter cloacae
atgtctggcatactgcttaatcgcctcactactaaagtgagagcacaactcaaacgcaccctcaaaggaaataagacatataagaagcatcgctggaaccttgttgaaagggcgcaggtttactgctccacgcattatctgaaggccatgtttttgctctgggctatggcaggcagtgctgtcctcatagcgataggctttcgtgctgaatttagtagctttgcggccaattacctgaaaaacgtcactaaacttcctgaatggatgtcaaacctgctgggcgcccagctgacgataatcgggattgtgttcccgcttgttgtcggactgatcagcgtgctctttcagaaaaaatcctcgcgaatccacattcagaccgcctatcagttgcattcgggttatatgtttgcgggactcagtgggctatcacttgctgcttttatactgataagtgggttatttttagctgccggtgacaaatatcttgatacggcatttgcggttacggccttaatctggatgcttttcaatattgtactttcgatatggttctttattaccagccttaacattctggatgacaagaaacgcgatcacctcatgctgaagtattttcagtcccagattgtagaaaaccatattctgcgttcccttaaatactcatggatacagtatcctggttcacacataggtaaggattatataaagggaataatcattcttccctactctgtctcaagcgaagaaagtatgggctcggttaaattccatattgaggatcatatcgaaatcagcgatgtgtatcttggaccactaaattttcttttacacctgctgaaacctgtgcaggataagaatggctcgattgttattctgccgtcccaggcaaaaagggataacaaaataacactactttcctcaacagacgtgattatccctggggggtggccgttctttttcagacaatgttttataaaaggtccgaaaataaactggaaagagtacagacacattacccgtgatttttatggagaggtttatgatgctctggaagacaaaaatataagtacctttatcatcgcaacagaccggctgattgatacatacacaacattgaaaaaaagctga

SEQ ID NO: 119582 - DNA, 885 bp, Enterobacter cloacae; identical to SEQ ID NO: 86382

SEQ ID NO: 119583 - DNA, 1545 bp, Enterobacter cloacae; identical to SEQ ID NO: 86383

SEQ ID NO: 119584 - DNA, 516 bp, Enterobacter cloacae; identical to SEQ ID NO: 86384

SEQ ID NO: 119585 - DNA, 279 bp, Enterobacter cloacae; identical to SEQ ID NO: 86385

SEQ ID NO: 119586 - DNA, 1404 bp, Enterobacter cloacae; identical to SEQ ID NO: 86386

SEQ ID NO: 119587 - DNA, 2064 bp, Enterobacter cloacae; identical to SEQ ID NO: 86387

SEQ ID NO: 119588 - DNA, 663 bp, Enterobacter cloacae; identical to SEQ ID NO: 86388

SEQ ID NO: 119589 - DNA, 1014 bp, Enterobacter cloacae; identical to SEQ ID NO: 86389

SEQ ID NO: 119590 - DNA, 642 bp, Enterobacter cloacae; identical to SEQ ID NO: 86390

SEQ ID NO: 119591 - DNA, 267 bp, Enterobacter cloacae; identical to SEQ ID NO: 86391

SEQ ID NO: 119592 - DNA, 1194 bp, Enterobacter cloacae; identical to SEQ ID NO: 86392

SEQ ID NO: 119593 - DNA, 630 bp, Enterobacter cloacae
atgaacaccacgcaattcaccgcctgtctacagcacgttgcccagggcatgatcgccagcgaaccgcgcctgaccgcactcgaccaggtcattggcgatggcgatcacggtattggcattaagcgcggctttaccgctttgcagacgctactttccgcgcctgaattttctcccgccgatatcggtgactgcctgctgcaaagcggcacgcggctgatgaccagcatgggcggcgcttccggcgcgatcttcggcaccctgttccgcgcgggcggcaaagggctggctggacgccgcgagctggatgccgcgacgctggctgaatggctggagacaggtatgcaggctatccaccagcgcggcggcgcagagccgggcgataaaacaatgatggatgcactcgccgcagcggcagcgcgcgcacgctcagacgcgaccctgccattatccgaagcgctggcaaactgcgcgcaggcggcgatggccggtgcggaagggacatccacgatggtggcccgcttcgggcgcgcgaaaaacctcggcgagcgggccatcggccactgcgaccccggcgcggtatcgatggcgctgattctgcaatttatggccgaattcccccatacccgctaa

SEQ ID NO: 119594 - DNA, 1005 bp, Enterobacter cloacae
atgcagaaacccaaaaagctgttcaacaacaccgataatatccgcagcgaaatcatggaagggctggtgtacgccgggcgcggaaggatccacgccctcccggagtactgcgcggtttatcgcacgatgacgcaaaccggccagaccgttatcgtcagcggcggcggcagcggccatgagccgacgtttgccgggttcgtcggtgaaggtggcatcgatgcctgcgcgctgggtgaagttttcacctcgccttctcccgatcagattatcgaagccagccgggccgttcatcagggcaacggcattctgttcctctatgggaattactccggcgacggcatgaactttgatatcgccgccgaaatactggcggaagaaggcattgagtgccgcaccgtgcgcgccacggatgatattgcctctgcgccgccggagaaaatgtccgatcgccgcggcgtcggtgggctggcgttcttgtataaactcgccggtgcggcggcacagtttgaacgctacactctgcccgcgctggaggctctggcgcaaaaggccaatcacaatacgcgtaccatcggcgtggcgctcagcggctgcgcactaccgcagtccgacgcctttaacttcacgctggcagacaacgaaattgagctgggaattggtattcatggtgaaccggggctatgccgcatgcccatgccgcatagcgacgagctggtcgagatgatgatcgcccgcctgtgcgatgacctgccgtttggccacggcgataacgtctgcgtcagcgtcaataacctgggtgcgctgagcaacactgagctcatggtcatcacccgtaaggtcggcatggcgctggcagaacgcggcattcacactcacgacgtgcaggtcggccacttttgcacctcgctggagatgtccggattttcgttaagcctgctgcggctggacgatgaaatgcaacgtctgtatgaccatcccatcaataccctcggctggagaaaataa

SEQ ID NO: 119595 - DNA, 903 bp, Enterobacter cloacae
gtggatttacgcgatctgaaaaccttcctgcatctggcggaaagccgccactttggccgcagcgcgcgggcgatgcacgtcagcccctccacgctttcccggcagattcagcggctggaagaagatctcggccagccgctgtttgtgcgcgataaccgcacggtcacgctgaccgaagccggtgaagagctgcgagtgtttgcccaacagacgcttttgcaatatcagcagttgcgccataccctcgatcagcaggggccgtccctttccggcgaactccatatcttctgttcagtgaccgcggcgtacagtcatctgccgccgatcctcgaccgcttccgcgccgaacatccctcggtggaaattaagctcaccaccggcgacgccgccgacgccatggacaaagtggtcaccggcgaggccgatctggcgattgccggtaagccggaaacgctgcccggcgcggtcgccttttcgatgctggaaaatctggcggtggtgctgatcgccccggcgctgccctgcccggtgcgcaatcaggtttcggttgataagcccgactggtcgacggtgccgtttatcatggccgatcaggggccggtacgccgccgcattgagctgtggttccgtcgtcacaaaatcagtaatccatctatttacgcgacggtaggcggccatgaggcgatggtctcaatggtggcgctgggctgcggcgtggcgcttattcccgaaatcgtgctggaaaacagcccggaaccggtgcgcaaccgcgtgatgattttagaacgcagcgatgagaagaccccgttcgaactgggggtctgcgtgcagaaaaaacggctgcatgagccgttggtggatgcgttctggaagattgtgctcgagcgtaaaatgaccgaatag

SEQ ID NO: 119596 - DNA, 1476 bp, Enterobacter cloacae
atggctaactactttaatacactgaatctgcgccagcagctggcgcagctgggtaaatgccgttttatgggccgcgacgaattcgccgacggcgcgagctacctgcagggtaaaaaagtggtcatcgtcggctgtggcgctcagggtctgaaccagggcctgaacatgcgtgactccggtctggatatctcctatgccctgcgtaaagaagcaatcgctgaaaagcgtgcttcctggcgtaaagcgaccgaaaacggcttcaaagtaggcacctacgaagagctgatcccgcaggcggacctggtggttaacctgacgccagacaaacagcactccgacgtggtgcgttctgtacagccgctgatgaaagatggcgcggcgctgggctactctcacggcttcaacatcgttgaagtgggcgagcagatccgtaaagacatcaccgtggtgatggtagcgccgaaatgcccgggtaccgaagtgcgtgaagagtacaaacgtggtttcggtgttccgaccctgatcgccgttcacccggaaaacgatccgaaaggcgaaggtatggcgattgctaaagcctgggctgcggccaccggcggtcaccgtgcgggcgtactggaatcttctttcgttgcggaagtgaaatctgacctgatgggcgagcagactatcctgtgcggtatgctgcaggccggttctctgctgtgcttcgacaagctggtggcagaaggcaccgacccggcttatgcggaaaaactgattcagttcggctgggaaaccatcaccgaagcgctgaagcagggcggcatcaccctgatgatggaccgtctgtctaacccggcgaaactgcgtgcttacgcgctgtccgagcagctgaaagagatcatggcgccgctgttccagaaacacatggatgacatcatctccggcgaattctcctccggcatgatggctgactgggctaacgacgataagaaactgctgacctggcgtgaagagaccggcaaaaccgcgttcgaaaccgctccgcagtatgaaggcaaaatcggcgagcaggagtacttcgataaaggcgtgctgatgatcgcgatggtgaaagcgggcgttgagctggcgttcgaaaccatggtcgattccggcatcatcgaagaatccgcttactacgaatcactgcacgaactgccgctgatcgccaacaccattgcccgtaagcgtctgtacgaaatgaacgtggttatctccgataccgcagaatacggtaactacctgttctcttacgcttgcgtaccgctgctgaaagagttcatgaccaccctgcagaccggcgacctgggcaaagcgattgccgaaggcgcggtagacaacgcgcagctgcgtgatgtaaacgacgccattcgcagccatgctatcgagaaagtgggccagaaactgcgtggctacatgactgatatgaaacgtattgcagtcgcgggctga

SEQ ID NO: 119597 - DNA, 282 bp, Enterobacter cloacae
atggcaaaaacagcagcagcactgcatatccttgtaaaagaagagaaactggcattggatcttctggagcagattaaaaacggcgccgacttcggcaagctggcgaagaagcactccatctgcccgtcgggcaaacgcggcggcgacttaggtgaattccgccagggccagatggtgccggcgttcgacaaagtggtcttctcctgcccggtgctggagccaaccggcccgctgcacactcagttcggttaccacatcatcaaagtgctgtaccggaaataa

SEQ ID NO: 119598 - DNA, 1494 bp, Enterobacter cloacae
atgtcgaagctccacttcgccattaccccggataatcgcatcgccgagattaacccccggctgtttggctctttcgttgagcatctgggccgtgcggtttataccggtatttacgaacccggccacccggaagccgatgcgcaagggttccgccaggacgtgattaacctggtgaaagagatgaacgtcaccaccgtgcgctatcccggcggcaactatgtctccggcttcaactggcgcgatggcattggccccaaagaagagcgtccggtgcgcctggactacgcgtggatcagcaaagagagcaaccagtttggcatcagcgagtttaaccactggtgccaacaaacccacgtcgagccgatgatcgccatcaatctggggaccggcacgccgcaggaagcgggatactttattgaatattgtaaccaccctggcggcaccacgctcagcgatctgcgcgtgcagcacggcgacgccgaaccctataactttaaactctggtgcctcggtaacgagatggacggcccgtggcaaaccgggcaaatgagcgccgacgactacgccaaaaaggcgcgcgagacggccaaaattctgcgctgcgttgacccggaggttgagctcattgcgtgcgggagttcaagctcgatgatggataccttccccacctgggatcgggttgtactcgaggaactttacgactacgtcgattacatctcctgccaccagtattatgaaaacgaaggcactgaaagcgacttcctggcctccttcgtcaatatggacaactttatcgagaccatcgtcagcaccgccaactatgtgaaagcgtacaagcgcggtaagaaggacattatgatctccttcgatgaatggaacgtctggtatctgcgcggcgacccctgggatgcgccgatgaagcataaagagaatcgctttaaggttgcgccgcctttgctggaagaccgttactcttttctcgacgcgctggtcgttggcggtcttctctgctccctcattaaccactgcgatcgggttaaaatggccagcctcgcgcagttagtgaacgtcattgcccccatctttaccgaagcgggcggcggggtgattcgtcagaccatcttctggccctttgcgatggtggctaacgtggcgaaaggcagcgcgttgcgccacttcattcctgcgggcaccttcagcagcaaatacggtgacgcacggcgcatccagtctgccgtggtgcacaatgccgcagcgggtaaactctatttattcgcgctgaacagcgattttcacgacagcttcacgctggatccggatctgtcggcgtttggccagacgcgtcttgcagaacatcagatccttcgctgtgacgatctctacgcgaaaaatacctttgatcgtccggatcgcgttgcgccggagacgctcacggcctccgacctcaccctgccgccgctgtcgtggaaccgcatcaccttcgacatcctgtaa

SEQ ID NO: 119599 - DNA, 474 bp, Enterobacter cloacae
gtgaaactatatatttacgttggttttattaccgcagccatctccatcctgatttactttatcgacccacgaaacatagagactattttcgccctcaacaccctgcgcggctatattggcgcgattacggtgccgatattctggtcctttattggcgatgccgacgactttggcgcatggaagttcaagcgtcgcatgtccggcgtctatgcatccggcaacctgttcgccctgaaggtgagtctggcgattgccggcacgattaccgccaccatcctgtccttaacacactatgttccggatgcgcctcagcaaacgccagagacactgaacgccattatgctgctgatcaccgtcattcccgcagcgggcagcatcatcacatcactgctgttcctgttcttttacaagctggacacccggatgatgaacgaaattcagaccgatttaaaagctaaccactaccccgcttaa

SEQ ID NO: 119600 - DNA, 357 bp, Enterobacter cloacae
atgcttgtgaccatgtcagataaagaactcagccggatcaacgtcattcagtcagttgttgataaacgcatgcgccgtcgtgatgctgctcatcagcttgctctgaccgaacgtcagacacagcggttaatgaaccgttttcgtgagtctggtgccgcaggtctggcaacccttcggcgtggacaccccggtaatcacaggcttcctgagtcactgaagctgcgtgtactttctttacttcacgataactacagcgactttggaccaacgcttgccgcaggaaaattgcgcgaacgccataacatcacggtgtctgttgaaacgctcagaaaatggatgatgaatcgccacggataa

SEQ ID NO: 119601 - DNA, 486 bp, Enterobacter cloacae
gtgggacgtgtaacagcaccagaaccattatccagctcccatcaactagcagagttcgtcagtggtgaggcagtacttgatgactggcttaaacagaggggattaaaaaaccaagctcttggtgcagcacgaacgttcgtcgtttgtaaaagagacactaaacaggttgtcggtttttactctctggccaccggcagcgttaaccacgtggaagcaatgggaagcctcaggcgcaatatgccagatccaattcccgtaatcatacttgctcgcctggcagttgatgtttcataccgtggccaagggctcggggccgatttactgcatgatgcagttctgcgctgttaccgtgtagctgagaatattggagtccgtgcgattatggttcatgcactgactgaagaagccaaaaacttttatcttcaccatggctttaaggcatcacaaactcaggaacggacattgtttttaaagttaccacagtga

SEQ ID NO: 119602 - DNA, 267 bp, Enterobacter cloacae
atgaaatcagatgttcagctcaaccttagagctaaagaatctcaaagagcacttattgatgctgcagcagagattctccataaatcacgcacggacttcatcctggaaatggcatgtcaggctgcggagaatgtgatcctcgatcgtcgcgtatttaattttaacgatgagcagtatgcagagtttatcgatatgctcgatgcaccggtttcggatgaggcggctattgataaacttctggcaaggaaacctcagtgggacgtgtaa

SEQ ID NO: 119603 - DNA, 1014 bp, Enterobacter cloacae
gtgaatgacaatcagatttctgttcactggtcagatctaccgaaagatgagctaacccgtttctgccaggatgtcgatgccggcactcagggtaatttcctcattgcaccggtcaaaaaattgccccgccgcaaacgcggtgagcattccacaaaagccaaatgtgagaacccggcctggtatcgcccggagcattataaaaagctctccggacagctcggtcatgcctacaatcgcctggtgaaaaaagacaaagaaaccgggcaggtcagcctgcgcatgcatgtttctcgtcaccctctctatgtcgccagccgccgtaaggcgggacgtaaatatggcttccgtccggaacgtcagcgcctgctcgatgcgctctggccagtgctcatcagcttctgtgatgccggcaagcataccgtcggcatgtgtatctcccgtcttgcaaaagaactcagtgcaaaggacgcaaaaggcaatgtcattcctgaaacggaggtgacggtgtcacgcctttcacggcttattgaggaacaggtacggtttggcgttctgggcctcgcagaagaacgcgcctgggatcgtgaatcccgcacctggttgccaacgtatgtctatataacccccgtgggattccagatgctgggcgtcgatatggacaagctgtttaaagagcaggagaagaagctccgtcagagcgccgagcgtgagcagctgatccgggaaggggtgatgagcgaacatgatgatgttcaggcccactctgcgcggaaatgctggtctggccgtaagcgtcaggaggcactcgtttaccgccgcaaaaaaggcgcggagcgtaaacgtgccaacaatctgattaagctgccggcagatgaacgactccatgcaatgtctgaatggatttatcgcaccctgccgcctgatgaagcgtactggtgcacatctgagcgcctgaaggcgctggccatccagcatctttaccagctggatctggcgctttctccaccggactag

SEQ ID NO: 119604 - DNA, 804 bp, Enterobacter cloacae
atggacatgttgcttttacccggccagaatccccgtgcctgggcggaaaccatgatcaacctggaggcctggaaactggttaacacggcaaacactgtggcggctatgcaccttcaggatggttttatccggattcagtttgtggatgagatcagggcattcatcatggcccagtttgaggccgcgcgccgggcgaaaacggatgacgactgtatggcctgtctgcgggccttacgggctgaaaataccagcctgctggagcagtcccgatcgctcagaaccggctatgcaaaactctatgccgaggtgaaggttgtccgggacgagaacaaaattgtgggctacatcatttcagcggtcgacgtcgtggtggccggtgcggccatctttggtgggatcgtcatgatgtcctcaatgacgccggtgggcgtggtggctggcgcggtgattgttgtaaatggctttaacacgatttcacgggaagccgcgcacaacctcctcggtgataagcagacggagggaatattcgctgacggctcgatggagatcgctgaatttctgggcttcagccggcagcaggggctggggacgtataaggctgtcacactcttcagcgaagtctatggcgcatatggcctgaggctgaaacccgaagcacaacggctgtggtactggaccaggcccgatttcttcaggaaagtatccggcacgccacgtcccgcaatggcgcttaaaattgcgggatggggagttaaagccaaagtggcgcttgatttactgactattgaaccttccgggaaatag

SEQ ID NO: 119605 - DNA, 324 bp, Enterobacter cloacae
atggctatcagtgagaaagagctgcttgaggcaggtttcagcaaaagcgaagtggataatttacagggccggcttgcatcaggcggaggcaccatgcagcatctcatcgatgcgctctcacggcgcttccgggtgtcggtatggatcactgtcgcgctggttctggttatgctggtcaccctcattgccggcagccggacacacattctttccgggggcatgagttcccttgtagtcctgatcattgcctgggtgaccttcccacctgtactgggctggaaggcattccgcctgcagaagactatttcccggaaggttcaatag

SEQ ID NO: 119606 - DNA, 771 bp, Enterobacter cloacae
atgaatcattcagtacccaacgttcttcccagtatccggaacgcgtgccagctcagtcccgcagctctcgatatggtcaagctcctcgcacttctggccatgattatcgaccacacgaatacggtgtttctgtcgccagcctggccgatgatgtatgcgcttggccggatggccttccccctgttcacgcttatatgggcgatgaacgtacagcgcaccccggaacgacttcagaagagagccaatcggttgtggatctgggcaatcattacgcagccggtgttcagcctggccttcctgcatcaccagccctggtgggccctgaacattctgttcgtatttgccggcgtcacgcagctgcttgccctgcagtaccggcacggccggaaaggaatgcttgcgggatatctgatcctggccctaatgatttggccactggagccggcaagctacgggctggcaggaattacgctggccatcagtatggcaaccttatcaggcagtggcatgcccggagtgaagcgaatggcggtcgctggcgtcgtgctgtcactgatttgtttaaacgggttgtcgcatatcctgaacctgcccgcagaaacattattactggccacgctgcctactctggtattccccctggtggtggtttctttctgcagggaaatctgtccggaaggccgccagcgtttcatgccgcgtaatttcttttattatgcttacgccggtcacctggggattattggtctgatacagtatactttcgcctga

SEQ ID NO: 119607 - DNA, 492 bp, Enterobacter cloacae
atgaaattaacagaaaatcgggtagatacactcatcgataccctgaacgacctaatctgcgatgagcaaagtattactcgcgaacagcgagaaaatttaattaaaacggttgccacactgggtgggcttaaggagcgactacgactcatttctgcggagaaagaagccagacagatcgctaaaaacgagaaggtaaagaaaccgcgcgaaccggacctggtgtttccccgtactggaaagccgtggctgccagaggacctcgatgttatccattccattatcgacgatatacctgatgacagaattgatgatcacatcctgtggctttcaaaacagcaagggcgcaccccctatgctgtcgcactgaagattgttggtgtaggaagaatggatgatgagtgggcgaaagcctggaaacccgcagcaaaatcgcttcgagaagattatgcaaagcttcatcctgctccctcttcggatatcagccaggaataa

SEQ ID NO: 119608 - DNA, 261 bp, Enterobacter cloacae
atggcccgtacgatgacggtggacgtgggtgatgagctgcgcgaatttatcgattccctggttaaggctggtgattaccgtacccagagcgaagtcatgcgagacgcactgcgtcttttgcgcgagaagcaggctgaatcccgccttcaggaactgcgcgatctgctggccgaaggactcagcagcggcgaggcgaaaccatggaacaaggatgtattcctgaataatgtcagggccagggtggcaaatgaaagagattga

SEQ ID NO: 119609 - DNA, 297 bp, Enterobacter cloacae
atgaaagagattgagctgacaccgaaagctgaagaagatctggaagcaatctgggactacagcttccgacagttcgggattgttcaggcggatgcgtatattgggcgtatagccgcagtgtttgatgttctggccatgcatgacatcggcacgcattgcgcggagctgggagacaatatctgctcgctgccggtggaacagcacatgatctattttgtgccatcgcattcggtggttacggtcatacgtattctcagccagtctcaggatacggcacggcatgaaccctggagataa

SEQ ID NO: 119610 - DNA, 435 bp, Enterobacter cloacae; identical to SEQ ID NO: 19847

SEQ ID NO: 119611 - DNA, 1401 bp, Enterobacter cloacae
gtgaggttcaaaatttccctgaccacacgcctgagcctgattttttctgcggtgatgcttacggtatggtggttatcaagttttatcctgattagcacccttaatggctatttcgataatcaggaccgcgattttctgacaggtaaacttcagctcaccgaagagtttcttaaaacagagacgttccggaacaaaacggatattaagtcattatcagaaaaaataaacgatgcgatggtagggcacaatggtttattcatttctataaaaaacatggaaaatgaaaaaattgttgaactctatgccaaaaattctgttgttccagcggtcctgcttaataagtcgggtgatattctcgactatatgatccagacggaagaaaataacaccgtgtaccgcagtatctcgcggcgggttgccatgacgccggaacagggtaaaagcaaacatgtcatcattacggttgccacggatactgggtatcacaccctgtttatggacaaactcagtacctggctgttctggttcaatatcggtctggtctttatttctgtttttctgggctggctgaccacacgtattggtctgaaaccgttacgggaaatgaccagtctggcttcctccatgactgtacacagcctggatcagcgtctaaatcccgatctggctccgccggaaatctctgagaccatgcaggagttcaataatatgtttgatcgcctggagggggcattccggaaactgtcagatttctcgtctgacatcgcgcatgagctgcgcacaccagtcagtaatctgatgatgcagacgcagtttgcactggctaaggaaagggatgtttcgcattaccgcgaaattttattcgctaacctggaagaactgaaaaggttgtcacgaatgaccagtgacatgctttttctggcacgttcagagcatggtctgctgcggctggataaacatgatgtggatctggcagccgaactgaatgaattacgtgagttgttcgagcccctggcagacgaaacaggaaagacaatcacggttgaaggagagggcgttgttgccggagacagcgatatgctccgacgtgctttcagtaacctgctttccaatgcaatcaagtattctcccgataacacctgtacagcgatacaccttgagcgtgacagtgactgtgtgaacgtgatgattacgaatacgatgtccggccaggttcccgctaatctggaacgtttgtttgaccggttctatcgcgcagactcatcaaggttctacaacacggaaggcgcggggctgggattatcaattacaaggtcgatcattcatgctcacggcggcgagctgtcagcagaacagcaggggcgtgaaattgtgttcaaagtgcgcctgttaatggattaa

SEQ ID NO: 119612 - DNA, 1818 bp, Enterobacter cloacae; identical to SEQ ID NO: 19853

SEQ ID NO: 119613 - DNA, 528 bp, Enterobacter cloacae
gtgcagagtgatttcctgctggcggtagccgaggaagggactgatgcccgcccggatatgaccccgcaggagttcttctttgaggggcttatccaggtgcaatcttacgagaagatgaaagagggcgagctggacggcgcagattatccgttgtcgctggcaagtgacatggtgttgccgtggccgtggagcctgacacgctatatcgataacgtttcgcacattggaacccgtaagggcaggccgtggaagcaggataaaatcaaccactatgttgacctgtggttgccctggcgcattggctttgtgcgcggcggcaaccattccataacggcgggtattctggccggggaagggaccgtgataccggagcacgtttacgatatgtcctggctgtttgagctggtccgaacggacggtaatcactggtttgttgacggccagaaagctgaagcggtgaagtcggggcggtcagcggctgttttcgaaattggccgtttacttactgaaggagcaaaaaatgggtga

SEQ ID NO: 119614 - DNA, 363 bp, Enterobacter cloacae; identical to SEQ ID NO: 86337

SEQ ID NO: 119615 - DNA, 312 bp, Enterobacter cloacae; identical to SEQ ID NO: 86336

SEQ ID NO: 119616 - DNA, 528 bp, Enterobacter cloacae; identical to SEQ ID NO: 86335

SEQ ID NO: 119617 - DNA, 1002 bp, Enterobacter cloacae; identical to SEQ ID NO: 86334

SEQ ID NO: 119618 - DNA, 1134 bp, Enterobacter cloacae; identical to SEQ ID NO: 86333

SEQ ID NO: 119619 - DNA, 888 bp, Enterobacter cloacae; identical to SEQ ID NO: 86332

SEQ ID NO: 119620 - DNA, 696 bp, Enterobacter cloacae; identical to SEQ ID NO: 86331

SEQ ID NO: 119621 - DNA, 132 bp, Enterobacter cloacae; identical to SEQ ID NO: 86330

SEQ ID NO: 119622 - DNA, 1038 bp, Enterobacter cloacae; identical to SEQ ID NO: 86329

SEQ ID NO: 119623 - DNA, 180 bp, Enterobacter cloacae
atgaacaaaaagttcagtctctgcgtctcttgcatttttacaatcagcatcctgcaaggattctgcattctttttgcattcaacaagcatttgttttcgttctgtctcatgcgacttataccaatctttgtcatgctcaggcttacaaccagcgagagcggaaacaccgataaaaactaa

SEQ ID NO: 119624 - DNA, 702 bp, Enterobacter cloacae; identical to SEQ ID NO: 86328

SEQ ID NO: 119625 - DNA, 2574 bp, Enterobacter cloacae; identical to SEQ ID NO: 86327

SEQ ID NO: 119626 - DNA, 318 bp, Enterobacter cloacae; identical to SEQ ID NO: 86326

SEQ ID NO: 119627 - DNA, 297 bp, Enterobacter cloacae; identical to SEQ ID NO: 86325

SEQ ID NO: 119628 - DNA, 279 bp, Enterobacter cloacae; identical to SEQ ID NO: 86324

SEQ ID NO: 119629 - DNA, 783 bp, Enterobacter cloacae; identical to SEQ ID NO: 86323

SEQ ID NO: 119630 - DNA, 318 bp, Enterobacter cloacae; identical to SEQ ID NO: 86322

SEQ ID NO: 119631 - DNA, 351 bp, Enterobacter cloacae; identical to SEQ ID NO: 86321

SEQ ID NO: 119632 - DNA, 339 bp, Enterobacter cloacae; identical to SEQ ID NO: 86320

SEQ ID NO: 119633 - DNA, 309 bp, Enterobacter cloacae; identical to SEQ ID NO: 86319

SEQ ID NO: 119634 - DNA, 186 bp, Enterobacter cloacae; identical to SEQ ID NO: 86318

SEQ ID NO: 119635 - DNA, 609 bp, Enterobacter cloacae; identical to SEQ ID NO: 86317

SEQ ID NO: 119636 - DNA, 333 bp, Enterobacter cloacae; identical to SEQ ID NO: 86316

SEQ ID NO: 119637 - DNA, 882 bp, Enterobacter cloacae; identical to SEQ ID NO: 86315

SEQ ID NO: 119638 - DNA, 1188 bp, Enterobacter cloacae
atgcattcatacgaggaccggatccgggccgtcgaactctattaccggtacggaaagaaagcctccgttgtcgtcatggagctgggatatccttccacaaaacagctgggccgttgggttcggatttatgaagagaagggcgatttacccagggaattaaagccaagagaacgctattcacggacacagaaaattgctgctgttgagcattatcttactcacggtggttgcctgtcgtacactcgccgagccatcggctaccccagtaacgaaattctaaagcgctggattgaagagttttacccaaatgcgcgtcccctggtcattcgctcaggcacaaacaaatgcttcagcccggaagagaggtctcaggccgtccgggagctctgtaaccgacgtggaaccgcgcgtaaagttgcacaaagcataggcgtcagcgtcccggtcctgtacaaatggaagaaagaccttatcagtgacgaggcttatcaatccatgcgcaaacgaaaggcagcccctcaggataaaaatcaggatgctttactcggtgaaatccagcgactcaggcagcaggttcatcagctgcagctcgaacgtgacatactgataaaggcgaatgaactgataaaaaaagatctgggcatcagctttctgacactgaaaaacagggagaaaaccctgatagttgatgcccttaagaaaaagtaccccgttgctgagttgctaagcgttctgcaacttgcccgcagctgttatttttaccacaaagccagcaaacgtctgtgcgataagtatgcggaaatacgcgtgatcatggccgatatctttgaggagaattaccgctgttacggctaccggcgccttcacgcgatgcttcgcggtaacaacagggttatttctgaaaaggttgtccgcagactgatggcagaagagcagctcgttgttaagcgcaccaggcgacgacgatacaactcttactgtggcgaaatcggcccggcaccggaaaatttactcgcccgggattttagttcctgcaggccaaatgagaagtggctgaccgatattacggagttccagcttccggctggaaaagtctatctgtcgccggttatcgactgctttgatggccaggttgtaagctggtcgataggaacacgcccggacgcgactgaatcgccacgggtttaa

SEQ ID NO: 119639 - DNA, 1125 bp, Enterobacter cloacae
atgataaagcaaatgcgccagcagggtgcgtatattgttgatattgccactcaggttggttgctctgagcggactgtcagacggtacctgaaatacccggaacctccggccagaaaaacacgccacaaaatggccaaactcaggccgttcatggactatatcgacatgcgtctggctgagaatgtctggaacggcgaggtcatcctcgcggaaatcaaagcgatgggttataccggcggacgctccatgttgcgttactacatccagccaaaacgtaagatgcggccatcgaagaaaacggttcgcttcgaaactcagcccagttaccagctccagcatgactggggagaagttgaggctgaggttgccgggcaacgatgcagggttaacttcgcggttaacacgctggggttctcacgtcgcttccatgtcttcgcggcaccaaagcaggatgctgaacatacctatgagtcactggtccgcgccttccgctacttcggcggcagcgtgaaaaccgtgctggtcgataatcagaaagccgcagtgctgaaaaataacaacgggaagatggtgttcaactccgggttcctgctgctggccgatcactatggcttcctgccacgggcatgccgtccacgaagggccagaaccaaaggtaaggtggagcggatggtgaaatacctcaaggagaacttcttcgtccggtaccgccggttcgacagcttcgcccaggttaatcagctactggagcagcggatggctgacgttgccgacaggcgggaacttcgccagttcaggcagacaccggaacagcgcttcacgcaggaacaggagcatctgcagccgttgccggatacggacttcgataccagctacttcgatatccgtcatgtctcctgggatggctatatcgaggttggcggaaaccgttacagcgtgccggaaagcctgtgtggccagccggtatcaatacggatctcgctggatgatgaactgcggatctacagtaatgagcagcagatggcatcgcaccgtctctgttcggctgcatccggctggcagaccgtgccggagcatcacgccccgctctggcagcaggtcagtcaggtggaacccgaaatctga

SEQ ID NO: 119640 - DNA, 429 bp, Enterobacter cloacae
atgattgagataattagcgacaggaaaattttacggatttccccctttgggcgtgataatacccctgacataccagagtatgactggatacatacctatgtggagtacgaactacccgagcttaaaacacaatatcaggcatcctttaatgtcggagagcttaatgctcttaaagctaaactcagggagttacatagaagtttagttgatggcacgaaggctcgtgaggtgatttttgatagcacagaaaatcagttaaatcttgtgttttcaccatcatcaacagggcgtggggtgcttttaacattaacgctaaggccggaaaatcctgctgaaagcgtcgtagtcagtgatagtcttggaatggatgaaagttattttcctgcaatactttccgggctggacgaaatcattaattggacgagttga

SEQ ID NO: 119641 - DNA, 678 bp, Enterobacter cloacae; identical to SEQ ID NO: 86348

SEQ ID NO: 119642 - DNA, 207 bp, Enterobacter cloacae; identical to SEQ ID NO: 86347

SEQ ID NO: 119643 - DNA, 183 bp, Enterobacter cloacae; identical to SEQ ID NO: 86346

SEQ ID NO: 119644 - DNA, 267 bp, Enterobacter cloacae; identical to SEQ ID NO: 86345

SEQ ID NO: 119645 - DNA, 369 bp, Enterobacter cloacae; identical to SEQ ID NO: 86344

SEQ ID NO: 119646 - DNA, 717 bp, Enterobacter cloacae; identical to SEQ ID NO: 86343

SEQ ID NO: 119647 - DNA, 432 bp, Enterobacter cloacae; identical to SEQ ID NO: 86342

SEQ ID NO: 119648 - DNA, 423 bp, Enterobacter cloacae; identical to SEQ ID NO: 86341

SEQ ID NO: 119649 - DNA, 1533 bp, Enterobacter cloacae; identical to SEQ ID NO: 86340

SEQ ID NO: 119650 - DNA, 3219 bp, Enterobacter cloacae; identical to SEQ ID NO: 86339

SEQ ID NO: 119651 - DNA, 135 bp, Enterobacter cloacae
atgttctggaaccgaaataagaaagaaaaagccgctgccggcaatgaaaaaaatcgcttcgatcacctgctttcggtggccgaaaaattacccgttgaggggtcggttccggctgagggcgaaatgacaccctaa

SEQ ID NO: 119652 - DNA, 1305 bp, Enterobacter cloacae
ttggcagcatcacccgaagagcgccagcaagccaaccagcaaataagagaaacggttgagcaaatacttgcggatattgaaaagcgtggaaataaagccattcgcgaattatccattaaattcgatcgttatgaccgtcaggattatcgtctgacccccgcggagatcgaccgctgcataaaacagttaagccgccaggatattcaggatattgaattcgcccaacagcaggtggcgaattttgcccgcgcgcagaaagaatgcctgcgtgatctggaaattgaaacgcgtcccggcgttattctcgggcataaaaatattccgattaacgccgtgggatgttacgtgcctggcggaaaatatcccctgctcgcctccgcgcacatgtcgattatcaccgccagcgtggcggggtgctcaagaattatcagctgtgccccgccgtttaacggtcagcccgccccggcgattgtcgcggcgcaaaaaatggctggcgcaacggaaatctatgcccttggcggcattcaggcgataggcgccatggcgctgggcacggactcgctggcaccggtcgacatgctggtcggccccggtaacgccttcgtcgcggaggccaaacgccagctgttcggccgggtaggtatcgatctgtttgccggtccgacggaaacgctggtgattgccgatgacaccgttgacgcggaaatgtgcgccacggatctgctgggccaggccgaacacggcgtcaccacccctgccatcctgctgacgaactcgctccagcttgccaaagagacgctcagcgaagtggaacggctgctggaaaagctccctaccgccgacattgcccgccagtcctggcaggactacggggaaatcatcgtctgtgacagctacgaagagatgctgctggaggcagatcgtatcgcttccgaacatgttcaggtgatgaccgaccgggacgactggttcctggctaacctgaccaattacggcgcgctgttccttgggccgcgtactaacgtggcctatggcgataaggtgatcggaaccaaccacaccctgccgacgcaaaaagccgcacgctataccggcggcctgtgggtgggcaagttcatgaaaacctgcaccttccagaaagtcctcagcgacgaagccaccgccgaaatcggcagctattgttcgcgtctgtcgttgctggagggtttcgccggacatgccgagcaggccaatattcgcgtgcgccgttatggccagacggaggttccctacgccacaccggccccggtcagggaaaaggtgtaa

SEQ ID NO: 119653 - DNA, 765 bp, Enterobacter cloacae
atgacgcttttgcaaacgccctctttcaccctgcacggcaaacgcgcgctggtaaccggcgggtcaagagggattggcttcgctgccgccgtcgccctcgcacaggcgggcgcagaggtatggatcgccgcccggggccgcgaggcgctggcgcatgccgcaggtgtggcagcggaacacaggctcgcatttcacccgctggagctggatattaccgacgctcaggaggttgagcgtgtgctggcgacattgcccacgcccgacattctggtgaacagtgccgggctggcccgccaccagccgtttcttgaggtgaacgaggacaatttcgatgcggtgatggcgcttaacctgcgcgccaccttttttgtcagccagcgcgtggcgcgcagaatgcgggcgggcggtaagggagggtcgattattcacatctcatcgcaaatgggacacgttggtggccccgagcgtagcgtgtactgtgcctccaaattcgcgcttgaagggttaacccgaacgatggcgctggagctgggcgatgcggggatccgcgttaatacgctgtgcccgaccttcattgaaaccgacctgacgcgcccggcgcttgccgatccggcgttccgccactacgtgctggacaacatcaagctgcgccggttaggcaggctggaggacattatgggcccggtagtgtttctcgcctcagacgccgccgggctgatcaccggcagtgccctgatggttgacggcggctggacggctacgtga

SEQ ID NO: 119654 - DNA, 744 bp, Enterobacter cloacae
atggaatatccgcttctggacaataccgatctgccactggtgctgcttggtggcacgctttgtaacgcccggctctggcagcccgttattgaacggctgaatgtcgcagcggtgtcgtgtattacgctgacgggtgcggagtccgcgccgcaggcgtcacggcggttattagaggttctgccgccgcgctttctgctggcagggttttctctcggtgccatagtcgcgctgcaaatggccgccgacgcgccagaaagagtgaacgggctgacgctgatttccgttaatccgttgcccgttgcgccagacaccctcgcttcacgccgggaagcggtacgcaccgcacaggcgcggggcctggccgactggctggtctcctcgctgtggcagagctatgtcgccccgtcacgtctgtccgatcggatcctgcaagagactatttgccgaatggcgcaagagtgcggcattgagacctttgccgggcaaacggaaatggccattcaccggcaggacaaccggactgcgtttaacgccctctcctgccccacattacttctaaacggcgcgcaggacgttatctgcacgccccatcatcatcagctactggccgcaggcaatgcgaacgtgaccagacatacggtggaggctggcgggcattttattccgctggaaaccccggatgagatcgcgccgctgctgcgtcagtggataacggagtgcatacagtgcgcaaaaacagtttaa

SEQ ID NO: 119655 - DNA, 792 bp, Enterobacter cloacae
gtgcgcaaaaacagtttaaagaccgcatttctggaaaatactcccatcataaacggctggctggcgatcccgtccggttatagcgcggaaattatgggccatcagggttacgacgccgtcaccgtcgatttgcagcacggcatgattgattttgccagcgcgctgtcaatgctacaggcgctatcggccacgcctgccgtgccgctggtgcgggtggcagataacgatccggcgcaaatcatgcgcgtattagacgccggcgcgtacggcgtaatctgcccgatgatctccagcgcggaacaggctcgccgttttgtcgctgcctgtcgctatccaccgctgggtgttcgctcctttggtccggccaggggtctactctacggcggcagtgattatccacagcacgctaacaacgagatcctgacgctggcgatgatcgaaacccgcgaagggctggctgatcttgacgccatccttgataccgaagggctggacggtgtgtttattggccccaacgatctctcactgacgctgaccggcagcgccagcgccgaatcccaacatcccgaaatgcttgctgctattgagcgggtgattcactgctgccgccagcagcagaagattgccggaattttctgcacttccggcgcggccgccgcagcgcgcattgatcagggttttcagtttgttacccctgcaaacgacgtcatgcaactgggtcgcgcctcgcgtgaagccattgccctcgcccgcggcaacgctatccctaccaccggtgcatccggttattaa

SEQ ID NO: 119656 - DNA, 1179 bp, Enterobacter cloacae
atgaaaaccatccatcttacccagagtcaggctcgaacacggttaatcgcccccgaggacatggtttcctgtaatcttgcttttattgattgcaagctacccggctcgcatctcaaacaaaactattccttcatcggcccgggtgtaacccagtccagcgagcaggtcgtcaatattcccgagccgcacggctttaacattggcgcggcggctatgccgaaaggggtgacgaataatctgcatctgcatttcaccgccgaggtgttcctgatccatgaaggaacatggcgttttcgctggggtgccaacggcgagcatgaagctgaatttagcgcacccactatcctttcaataccgacctggatcttccgcggtttcaccaacgtcagtaaagaagagaccagcggtatggtgtttacggtgctcggcggggacaacacgggcggcatcatctggcatccttccgtgctggcggcagccagcgaatacggaatgtatttgagtaaagacaacatgctcatcacacaggaaaccggcgacccgcggcctgaccccgccgcgctgctgacgccgctgtcagaggaatatattgccgggctgcgtgactacagcgttgaggagatgcgccaacgtgcggtaaccggcgatgaccgctgctggtcagcccagggactgctggattcggtgctgccaggacacggcggcgaaattgcgccggttatcggtttcggcatttcgcaggatcgggattccgctcccgctatcgtgagcccgcacggtttttccgtcgaatggctgcgtctcgccgaggatcacgttgtgggccgccatctctgcccggatattcaggtcattatggtctttaaaggccagctggaggtcacctggaacgaggcgggcgaagaagtgagcgttatcgctccggaacgttcagtgatctctgttccggcaaacagctggcgtcgctaccgcgcggttgacggcaaaacggagtttattctgacgacccgcggcgatcagcgtaagcgcctctactgggatgaagcgatcctgcaacaggcgagagaacacaatcgctgtctcgatcccgatggctacgtagccgatgccgacatcctgcctgccacggcccgtcgggccggtgcgatactggagacatgcaacagcaacaaaacctga

SEQ ID NO: 119657 - DNA, 930 bp, Enterobacter cloacae
atgctggacggtatatctgttgatcaactccgcacctttattgctgccgttgatgaagggagtttttccgccgccggtcgcaggctgcggcgcgcgcagtcggttgtcagcgcgacgctggcaaaccttgaggcacaggtcgggtttccattattcgatcgtaccgggcgttatccgacgctgacggaggcgggcgtcgccatgctggaagcggcgcgtcttgccactgccgggatggacgcctttaaggctaaggcgcgcaccttagccgaaggtcttgagcctgaactggcggtgtccgtcgacgtgatgtttcccgtagcgcagctcaccgctgcggtgcaggcgtttcagcaggcatttcctgacaccccgctgcgtttgtatgtggaagcgttgggggcggtgttccagcctttactggacggtcattgccgggtggcgataaccggatcgctgccgcatcttccggcgggatgcatctcagaattccttctcagcgtgcctgcggtggccgttgtctcccctgagcatccgctggcgaacgcgtccggtccgatccttcgttcacttttacaggaacacgtccagctggtgctgaccgatcgctcctctctcaccgtgggccgaagctttggcgtcatgtcgtcaaagacatggcatttagcggatatgggcgcgaagcacgccttcctgcgtgccggactggggtggggttatatgccgctgccaatggtcgaggaagatctcgcagcgggaaaactggttacgctgaacgtgccgatgcagcccgacgtcgggcccggtttttccatgcaggcggtgcacctggaggaacatccgcccggcccggccggacgctggttcgttaacaggctgaaaatgcaggctggcatgcctctcaacgaacgcagcggatccggcaagtga

SEQ ID NO: 119658 - DNA, 606 bp, Enterobacter cloacae
atgaaaacgactactgtaggtatcatcggcgctggcgctatcgggcaagcctttgcagaacaactggttaaagcgggcatgaacgctattctgagtaacagccgcgggccggaaagcctgactgcggtggttgagaaactgggccacggggctcgcgctggcaccgtagaacaggccgcccaggccgacctcgtttttgtcagcacaaactgggacaaaaccgaggccgcgttacgcggcatcaactgggaggggcgtatcctgatcgacgcgaccaacccggtcatactgccaggcttcacgctggctgaactgggcggaaaaaactcaagccaggtggtgacacagtgggctccgggtgcacgcgtcgttaaagccttcaatactctccttgcaggggtgctggctcaggatccggcgcaggcgggtggccgtcgtgtcgtctttatctccggagaccatcctgacgcaaaggcggaaataacagccttagccgggcaactgggcttcgcaagtattgatttaggcagcctggaggttggcggtacgctacaacaattccccggagggcctcttccggcggtgaacctggtgcaactggcatag

SEQ ID NO: 119659 - DNA, 882 bp, Enterobacter cloacae
atgacgcagcgtacttccgcagagacctttgaagaataccttcccggcaagctgatcagagaacatcgggcgcaatcttcccgggatgtattcgtgcaaattctggcgcgcagacacgtgcaggaaaacgtcattattccggcagtgccggagccttttatcgtctggatcctctcaggtaatgccgtcgttgaggagcgttcccccggtgagccgtggttagcaaaccgcgttaccgcaggcgatttctttctcacaacggcggcttctcctactgaaatgcgctggcacgccgggccagatacgcctttcgtcgttatgcatgtttatatgggagtggctatgatgcaggagtatgaactgcgggaagtctccggcgcgcgcgacgacacgctatccgccctgctggagcagatacgtcaggagctgtatctgcaaaatccacccagcggcccgtttgttcagggcattgcgcaggcgctggcagtacatctgattcgcacctatggcacacatgcgaaacgacaccgcgggggcttgcaggcatttaagctgcaccgggtcttcacggcaatgcgtgaagggttagcccagccatttgacctggcacgcctggctgaactgaccgatcttagcgaataccattttagccgcgcctttaaacagtcaaccggactttccccttctcactactttatccggctacgcatggaggaggcgcgtcgcatgctatcggaaagcaatgattccattatcaatattgcactgaacgtcggatacaccagccccagccactttgctgccgtattcctcaggcataacggcgtgacgccctcccactatcgcagcgatgccgttcgcagcaaaagcccgacagtttga

SEQ ID NO: 119660 - DNA, 747 bp, Enterobacter cloacae
atggaactcaacggtaaagtcgcgctcatcaccggtgcttcaagcggaattggtgcctccacggccaaaaagttagcggaacagggcgtcagggtgggtctcgccgcccgccgtctggatcgtcttcaggcgctggtgtctgaaattgaggctgctggcggggaagccatggcgctggctatggatgtcactgacccggcctcagttaataaaggggtggaggcactgcacaaacgctatggccatattgatatcgcctttaataacgccgggctgatgccgatttcggatatcgccagcctccgggttgacgagtggcatcgaatggtagatgtaaacgtaaagggcctgtttaacacggtcgcggccgtattgccgattatgcagtcacagcgctcgggtcatatcatcaatacctcgtcgatcgccgggcgtaaaacgtttcccggactgggcgtatactgcgcgacgaagcacgcggttgccgccttctcggatattttgcgtatggagctggcccctcagttcaacattcgcgtcacctcgcttcagccgggtgccgttgaaagtgaattattcgagcatatcagtgacgaaaattatcgtgcacagatggaacagctgaaagagaagatgacgttcctgaaagccgatgatatcgccgactcgattctttacgtattgcaggcaccggaacatgtggacgtggcagagctgtttattatgccgaccgaacagccgtggtaa

SEQ ID NO: 119661 - DNA, 639 bp, Enterobacter cloacae
gtgttcctgggtgcacgcaggctggatcgcatccacgctctggctgatgaaatccgcagcgcaggaggggaggcagaggctcaggtattagacgttaccagccgccagtcgatggccgccttcgttcaggcagcacgggataagtggggccgcattgacgtacttattaacaacgcgggcattatgcctctctctccgctttcggctggcaagcaggatgaatgggagcgcaccattgacgtaaatatcaagggcgtactgtggggtattggtgctgttttgccgattatggaagcccagggctcggggcagatcgtcaatataggctcgattggtgccttggccgtcgtgcccacggccgccgtctattgcgcgaccaaatttgcggtacgggccatttccgatggtttacgccaggaaagttcgaacatccgtgtgacctgcgtcaaccctggggtagtggaaagcgaactggcctcgaccattacgcaccaagaaaccatggcggtgatggatgcgtaccgggctattgctctcaaaccggctgatatcgctcgcgccgtgcgccacatcatcgaggcgcctgagagtgtcgataccaccgaaatcaccatcagacctacggcctctgcaaactaa

SEQ ID NO: 119662 - DNA, 399 bp, Enterobacter cloacae
atgaaagccgttggtttctggcaacccggggaaagtacatccgttattgaagatttgtcgcttccccacccatccatgcccaaggggcgtgatcttttgatcagagtcagggcggtcgcggttaacccacgggacctgaaaagccggcgaaacatcagtccctctgcaggcaatccggtagttatgggatacgacgcttccggtgttgttgaagcaaccggaccagatgtgacgctgttcaggccaggtgaccacgttttctatgccggtgtgctcgatcgccagggagccaacgcagagtttcagctggttgacgaacgcattacggggataaagccggcagcactaagttttgaagctgcagcgtcggttcctctgaccggtctgacagcctggtaa

SEQ ID NO: 119663 - DNA, 279 bp, Enterobacter cloacae
atggacatcttaacgattggttcattgattgtttcagctttagtattgtgctggactgtttatagggattttacatctgactcagacgaattagatgcacgtatttctaccgttgaaacgaaagttgctttgatggatcagtctctaacttcgcttgagcaggaacaagatcaaatgaagaagacattaaaaaacttagaagatagtgtacatatgcttgatattaaaattgagcgtgtaattacaatgcttgaaacgctaaaaaataaaaggggctaa

SEQ ID NO: 119664 - DNA, 447 bp, Enterobacter cloacae
atggatttaaaaaacaggctaattagctatgagggatcatttgcctatcaaactaaagttggttattttaagaatggtaagttttggacatataaagatagtcttggttatccaactattgggtacggtcgactactaaaacctgatgaatcatatccaaacggtatcacaccagaacaagccgaacggatgttagaagaagatatcagtactgctaagtcagctgttcgctcattaggattagatttgccttctgactggcaggacttcatgaccattatggtttttcaactcggcctatcaggtactttaaagttcagaaagatgattcaagccttacgtgataaaaactataaagaagcgattgtacaggctaaggattcactctggtacagacaaaccaaatcacgagtagatcagatgattgcaaaactcaccaacaaataa

SEQ ID NO: 119665 - DNA, 432 bp, Enterobacter cloacae
atgaagcaatggaattacaatgatgattggagtgaggaagaattaacaaacggtagttatgtaggattcgtgtacttgttccagttcgaagacagcaccttttatattggtagtaaacagatgtataagagagttaaggacgttaagaaactaaaagctaactcaattgaaaatggatggcgtgagtacagttcaagttcaaagatagttaatcaaaagattgaagagggtttagattatactcgtaccattctgtgggcttttccatcaataaaagaaacattattcgtcgaaacagcactaatcattaatgaaggtttaaaaacgggaaatattaatctttccgttatgcataaggctcgtttaccgagtggtaaggatgctgtgcgtattcgtggaattcttcaatcactatatgaaattttaaattaa

SEQ ID NO: 119666 - DNA, 609 bp, Enterobacter cloacae
atgacatggcgtaggggcaatagcccaaatgatatgaggcgttttataaacaacaacagcccagcgatagggcaggagttcaaaaaagaacttagtagccgtatgcgtatagttacccaacacatgcaacgtaaattagataatgatgtagcaggtggcggtgtaccgtttactggtaagagtatgtactttaattttagaaagattagtgactacaagaccgtaaaccagatcatagtactacctaaccaaacttcatacttaaagttcattcttgatcccgcttacaggcatgttaacgaacgtaaaataattccgtacaagaatgctaagttaacgaaacagggaaatattacacaactacgctcaagaactcagagcgataaatacaaaaaggtaaagagtaggaacggtaacacgtacttaatcgacgctaccaagaaatcctctaaacgtaatcctaaattggctcgtgaacagagggtgattggttactatggttccgttggtagaaaaacattatttgatttctacgatgaaaccgagaaaaaagtaatagaacaattaagaacattacgcggtacgtttgattaccgttggaggaattaa

SEQ ID NO: 119667 - DNA, 294 bp, Enterobacter cloacae
atgattggtgtgatagtagaactactaacaaaaggtgtggacttctttctaaaacgtaaaacgatagaacaggaagtgcagaaaacaaatgctgaaggacaaatagaaaccaagaaagaagagatagaaaaggttactttccactggcgtaatgctcttggattcgtaatcaccttaatcattctctataactggatcatagtaccggtacttgatgcttttggtattgtggttatccaagtaccattaggacaactgatgcaagtactattgattatggtaggtggaagctaa

SEQ ID NO: 119668 - DNA, 1101 bp, Enterobacter cloacae
atgaagtattatatggatgaaagcggaaacactggcgatattattaacagaaaaaaggatgtgaatttttcaaatcagcctatttttgctcattcatgtattggctttagtactgagagcctcagaaagatcgaggctttcattaaagtattaaaaagaaattttgatatacctgatgagcaagaattaaaatcagaagatttttatttcaaaaacccaaaactaattttgttgatatctttatttttggttgatcacaacatccccataatctgtgaggtcacagataaaaaacataatatctcattagctatagtgcaaaacttgatttttcctcaaagtgaggaaaatgagagacaagaagcaaatgtcatacgaagcatgatagctgagagaatcacagaacatgcaccagaagaatgtttcaaaagatatatggcaatgtgtcaacttcgaacagagaagagtttctatgatctaatcgatgttttgaaggtgtttttttctggatctgacccacaggatatttttgcattaaaaatgattaaaatgacaatcgatgattatgaagaatttaaaaaagaaaacaatattgaaagtgctacgaaatattttatgatgttgcctgattttgatagcagtggtaatgaagtaaaaatgttaccattagtttacagcttttataacattgcagctcgtttgaataaacaccataaaaagaatctcaagaatattaaagttatccatgatacaacatatgaatattgtaaaacactaaaatattgcttgaccaacattctcaaatcagaattgaaaaataaagatagcgtcccaaatagtgattatgaattggaagagacttttgaacttgatttcgaagattcaaagaatagtattggtattcaagtagcagacttggtagcaggatttctacaaagatacattaatggcacgctgtataaacaaattaaagttgaaaatatctaccacggtattttcgaactattgataaaacaaaaccacttaaacaatccgcttggagttaactttgtattacccgagactaagcgttattggctttttcataaatttgacttgtaa

SEQ ID NO: 119669 - DNA, 210 bp, Enterobacter cloacae
atgactgaagaacaatttgaacgcgagtacccaaaagataagtaccgttatgtaaaacaaagaatgcgtacaaaaggaacgatgcaacaaacagaaatcgaagatttcgacataattcttatagaatctggcgaagtagttctaaaggcaacacgaacagaacacaccaaccttaagggatttaaaatcactgtcgattgggattggtaa

SEQ ID NO: 119670 - DNA, 729 bp, Enterobacter cloacae
atggcaagaattactaaaaaggaatctgcattacacattcaggttatggatctcatccactctgataagcaactcacacaagacaataaagagtttatcttcaacaattacaaaggcgatggtataggggctactggtgctttcttcacacctgaaatgctcgcatgggatttcatacttgatgctggctgtactggtcagtgtatcgaactatgtgcgggtatcggtcgtctcagttactaccagtacttaaggaataagccaacacacattacatgcgtagaactcaatcctgaatacgtgatgattgggaagagggtactaccagaagcggaatggatcacaggtgacgcactacagtactcaccagaccgtttctatgaagttgcctatggcaatccacctttcgggaagatcaacacatcagaagcatacacaggccgttataagtgtagtgagtttgaatacaaggtgattgaacatgcaagtaccttatcctcatatggagtatggatagtaccgcagggttcagcagggtttaagtactctggacataggtactatgacgcttcagtacaaactgctaagtatcagaagttcgtggatgatacggggtacacgtttcaacctggggtggggattgataccagtatctacaaggatgaatggaatggcacgaaagtgatttgtgagagcattttagttgattatgacggcacaaatctatga

SEQ ID NO: 119671 - DNA, 1236 bp, Enterobacter cloacae
atgtcctccacagatgctcccataaactggaaacgcaacctgacggttgcatggctgggttgttttcttactggcgccgcctttagcctggtaatgcccttcctgcccctctacgttgaacagctcggcgtcaccggccatagcgcactgaatatgtggtccggcctggtgttcagcattacgttcctgttctccgccattgcgtcgcctttctggggtgggcttgcggatcgcaaaggccgcaaaattatgctgctgcgctccgcgctcggcatggcgatcataatgctgttgatgggggtggcgcaaaatgtctggcagttcctgatattacgcgcgctcctgggtctgctcgggggatttatccccaatgccaacgccctgatcgcaacccaaatcccacgccataaaagcggctgggcattgggtacgctctccactggcggcgtaagcggcgcactgctgggtccgctggcgggcgggctgctggccgaccactacggactgcggccggtattcttcattaccgccagcgtgctgttcctctgcttcctcgtgacgcttatctgcatccgtgagaatttcacgccggtagccaaaaaagagatgctgcacgcccgggatgtgctggcctcgctgaaaaacccaaagctggtgctgagcctgtttgtgaccaccatgattattcaggtggccaccggttcaatcgcgcctattctgacgctctatgtccgcgatctggcgggcaacgtcagcaacattgcttttattagcggcctgatcgcctctgttcccggcgtggccgcgttgctgagcgcgccacggctcggcaagctgggcgatcgcatcggcccggagaaaattctgatctgcgccctgatcctctccgtcctgctgctgatccccatgtcgatggtgcagtctccctggcagctcggcgtgttgcgctttctgctgggcgcagcggacggcgcgttgcttccggcggtgcagacgctgctggtctataactccaccaaccagattgccgggcgtattttcagctacaaccagtcgtttcgcgatctgggtaacgtcaccgggccgctggtcggcgcgggggtttcggccagtttcggtttccgggcggtctttatcgtgacggcaggcgtcgtgctgttcaacgctgtttattcctggctcagcttatcccgggcgctacgcccggcgcgcataacacaacatcgtgacggctaa

SEQ ID NO: 119672 - DNA, 969 bp, Enterobacter cloacae
atgacaatcaagggccaggagtatctttatctttcaccggacggtgtatggcagtttcaaatctacatcccgtcttacatgcgccacatgttcggcgggaaacgcctctaccggaaaagtacagggacaagagatatctacaaggcgcgtcacttccgtaaccacatgctggtagagtggaacaaccttaaagaacagttcaagcctgatactgaggataagcgtattcagcttgcgatcacttccctgcactctcaaatcaggaagaacaagaataaaccattgattgaagagcgagccagttcgattcctcatctgtgcttcttacgagatgaatacgctactgcataccaggataggagatcattctccaccctgagcaaatcagcgcgagccgttgaggtgtttctccagagtattgggaaagttgatatcagtctggatcagattggacgccgattagttacagacttcatagaagaacagcagaaacgcgatgtagcgccccagacggtgcaaaactggcttacatcgttaggtagcctgtacgagttcgccaaacgtcgctacgacgctatagcgccgctcaacccgtttcatggtcacaacctcgaagcgcggcgcacaattgaaagctatcagccgtttgaatggcatcagctatctacactactcaacgaagcagacgaagagctacgagcagttattctgatcggtttgttctctggtgcaaggctggacgaaatagccagcttgaagaaagaagagatcgttatggtggaagggatacggacattctacattagcaaatccaagacgaaggcagggattagacacattcctatccatgcttttctgatcggcatggtggattattatctgagtttgaacactggagattacctgttaccacaggctaacaagattgaacgcaaagacggtaagaaaggaccattctattcccagtga

SEQ ID NO: 119673 - DNA, 807 bp, Enterobacter cloacae
atggatattgcgttgcttaacaggggctggaacagaacatggtcagataccatggtgaatctggaggcccggaaactcgtcgaaactgcaaatcggctatcagcattctatttgcaagatgggataacacgtatcaagtttgtcgaagagataaaacaggttgtagataaagaatttgaaactgcacgacgggccaaaaccgatgaagaatgcattgcatgcatcaaaaatctgcgtgccgaaatagataatctgcaagaacaagaacgcctgttaagaaccagagccgcccaactttatgcaaaggtcgagtttgtcagggaaaacaataaaatcgtcggatacgtgatttcggcaatccatatagtggtatctggagcagcattatttggtgggatggttatgatgtccactatgacccctgttggagttcttgcaggagcagttttatttgttgatggtattaacggtataacaaaagaagcaagccatcttcgctatggtgaacaatccaaatcggaaggaatttttgctgatggcgcaatggagaccgcgcaatttatggggtttagcccaaaaagtggattagctctttataatacggtgactctaggggcgagtgtctatagtatcttcggcttagcaaggaaacccggagcttggcgattattccgttggctgccgcgtgattactaccgaaaagttgacacaatgagcaagcctaagctaacgatgaaaatcgctggatatggtgtcaaagcgaaagtcatttttgatcttctggctactgataacagtactaattaa

SEQ ID NO: 119674 - DNA, 240 bp, Enterobacter cloacae
atgatgctgaccgtactggcagcagtcgcacagatggaacgtgaaacgatgctggagcgccagcgtgaaggttacgaagcagcaaaagccgcaggcaggatcaccggacggggcaaaggtcgctctattgatcgtgaagccattaaagcagaactcgcagcaggtaaaaccattcctgcaatcgcagaaagccacaacgtcagcaccagaacagtcatgaacattaaggccgaagcctga

SEQ ID NO: 119675 - DNA, 228 bp, Enterobacter cloacae
atgaaagtgactgatgaggctttgttacgttcagggtttacgcagcccgaattgcagaagataaaaagcaatattgataaatatggaggaacgcctggagaggccataaatgacctcgctagacgatttgttaccctggcgggagtggtggctgtgtgtacctttaccctactgtacttttcgtcttcagctcacctgatagagcagctgcatgggggctggcgatga

SEQ ID NO: 119676 - DNA, 549 bp, Enterobacter cloacae
gtggttaatggaagacgagcgggaattatctctgccgctggtgtagcattaggtagttgcacacatgcaattgcaagcgctgtgggattaaccgcgttgataacagcatctccgatgatgttcaccatcattaagtctctcggtgcggcttatctgatgtatctcggtagtaagatgatttggggaacgctgacaaagcaaaccacgaatcacaacgaagctgaacgtgttaaggcaaaagcgactctgacgagtctacttactaaaggtttcataactaccttaaccaacccgaaggtactgttattcttcatctcctttttccctcaattcgttgcgcctggaagcgagcaccagacagcttcttttctactcctgggaatgacctacgcattgatcgcttttatgactgatttaacgttcgccgtacttgcaggtagtgcagccggaaccgtttcgcaaaacagaaggttgcagaaaatactggatagaattgttggtgtaacattcattggattagggctcaggttggcgtttacacgccgttaa

SEQ ID NO: 119677 - DNA, 762 bp, Enterobacter cloacae; identical to SEQ ID NO: 101528

SEQ ID NO: 119678 - DNA, 861 bp, Enterobacter cloacae; identical to SEQ ID NO: 101527

SEQ ID NO: 119679 - DNA, 597 bp, Enterobacter cloacae
atgttatggagcagcaacgatgttacgcagcagggcagtcgccctaaaacaaagttaggccgcatggacacaacgcaggtcacattgatacacaaaattctagctgcggcagatgagcgaaatctgccgctctggatcggtgggggctgggcgatcgatgcacggctagggcgtgtaacacgcaagcacgatgatattgatctgacgtttcccggcgagaggcgcggcgagctcgaggcaatagttgaaatgctcggcgggcgcgtcatggaggagttggactatggattcttagcggagatcggggatgagttacttgactgcgaacctgcttggtgggcagacgaagcgtatgaaatcgcggaggctccgcagggctcgtgcccagaggcggctgagggcgtcatcgccgggcggccagtccgttgtaacagctgggaggcgatcatctgggattacttttactatgccgatgaagtaccaccagtggactggcctacaaagcacatagagtcctacaggctcgcatgcacctcactcggggcggaaaaggttgaggtcttgcgtgccgctttcaggtcgcgatatgcggcctaa

SEQ ID NO: 119680 - DNA, 324 bp, Enterobacter cloacae
atgctcaccatgtgggtgacggaggacgagcaccggcggctgcttgagcgctgcgacggcaggcagctggcagcgtggatgcggcagacctgcctggacgaaaagccggcacgttccggaaagctcccctcactctcgccggcgctgctgcgccagcttgccggcatgggcaataacctgaatcagatagcccgccgggttaacgccggcggcgacaccggccatgacagggtacagattgtggcggcgctgatggccatcgatgccgggcttgagcggctgcggcacgccgttcttgagaaaggaacggacgatgatcgttaa

SEQ ID NO: 119681 - DNA, 492 bp, Enterobacter cloacae
atgagcagtcttttaacgctggcgaaggacttagagcagcaatcgaaagcgcggcagcagagtaccggcgagatgctgaaagccgcattcagcgagcacgagcagtctgtcagagcggaactgagcgcaagcgcgaggagaatcagcgacgccatcctcgcccacgagcagagtatgagcgaggcgatggagaaaaaccggcggagcgtactgcggactgccgggcggacatggctcaccatcctgatggtgtcagcgctgctgatcggcacgagcgggagcattctgtggtggcaggggcagcagataaccgacaattacacgcatcttcgtcagcaggaagataccctggcgaaaatgaccgcccggacgtggggagtgcgctatcaggagagcagcgacggccggaggtttcttatcctgccgccggggatgcaaaccgaagccatcccttacgacgggacgacatggatccgcctgaaacaggagtag

SEQ ID NO: 119682 - DNA, 216 bp, Enterobacter cloacae
atgacagagctggaaaagcagttgctgagcgcattagagcagctacagcaggactactcgcaaaggctggacgagtgggagagcgccttcgaggaatggcggagcatgtgtgggcttatgcaacgggagaacgcgatgctgaacgagcgcgtgtcggacttgagcacgcaggtgctgagtttaagcgagcagctgcgccgcttgtccgggaactga

SEQ ID NO: 119683 - DNA, 582 bp, Enterobacter cloacae
atgaataactctttgattttattggttttttttaataaattagtgtccatagacaaacgggagacgactatgtccgcaagagcaagaaaagcaggtaagagaaatcagtcagaacgacgtcaggatttgattgaaaaattgtgggaagacgacgaaatcgatacttggcatcgacttgaaaatgatgggtactcaacagttccacgttatttgcctttgataggcgatctcatggatggtctgtcaaaaggatcaccattatcaacaacctacttggctttatggttcagggtttctgatgagggtttgattgaaataagagataaagcagcactggcttttgaatcagggttcgctagtgaaagaggcgtaactacatgggcagggagaatgaaaaagctaaaagaactggggttcatatcctgtcgtgaaggcagcaccggtgaatttcattacgtgttaattgttcacccattagttgcagtcaaaaagctgcttgatgaagggattatccctaaaggaaagacttataacattttgtcggagcgtgtaattgaggtgggagcctcttgggagggttaa

SEQ ID NO: 119684 - DNA, 495 bp, Enterobacter cloacae; identical to SEQ ID NO: 94320

SEQ ID NO: 119685 - DNA, 327 bp, Enterobacter cloacae; identical to SEQ ID NO: 94321

SEQ ID NO: 119686 - DNA, 489 bp, Enterobacter cloacae
atgcgatacaggatatattccgcttcctcgctcactgactcgctgcgctcggtcgttcggctgcggcgagcggaaatggcttacgaacggggcggaaatttcctggtagatgccaggaagagacttaacagggaaacgataaggccgcggcgaagccgtttttccataggctccgcccccctgacaagcatcacgaaatctgacgctcaaatcagtggtggcgaaacccgacaggacttaaagataccaggcgtttccccctggcggctccctcttgcgctctcctgttcccgtcctgcggcatccgtgttgtggtggaagctttacctaaatcaccacgtcccgttccgtttagacagttcgctccaagctgggctgtgtgcaagaaccccccgttcagcccgactaccacgttgtcccggtaactatcatcttgagtccaacccggaacagacacgaaaaatcgccagtggcggtagccattggtaa

SEQ ID NO: 119687 - DNA, 708 bp, Enterobacter cloacae
atggaccgatttccgcgttccgattcgatagttcagcagacccgtagcgggctgcaaacctacatggctcaggtatatggctggatgacggttggcctgctgcttaccgcgtttatcgcgtggtatgcggcaaacacgcctgaactgatgatgtttatcttctcaagcaaaatcaccttctttgggctgattattgcgcaactggcgctggtattcgtgctctccgggctggtgcacaagctcagcgcgggcatggcgaccacgctgtttatgctctattcggcgctgaccgggctgacgctctccagtattttcatcgtttacacctactcctccatcgccagcacctttgtggtgaccggcgggatgttcggtgtgatgagcctgtacggttacaccaccaaacgtgacctgagcggcttcggcaacatgctgtttatggggctgatagggattgtgctggcgtcgctggttaacctgtggctgaagagtgacgcgctgatgtgggcggtgacctatatcggggtggtgatcttcgtgggcttaaccgcttacgacacccagaagctgaaaaacatcggtgaacaaattgatgttcgcgacagttcaaacctgcgcaaatactcgattctgggcgcgctgacgctgtatctggacttcatcaacctgttcctgatgctgctgcgtatcttcggcaaccgtcgctag

SEQ ID NO: 119688 - DNA, 285 bp, Enterobacter cloacae; identical to SEQ ID NO: 86407

SEQ ID NO: 119689 - DNA, 378 bp, Enterobacter cloacae; identical to SEQ ID NO: 86406

SEQ ID NO: 119690 - DNA, 564 bp, Enterobacter cloacae; identical to SEQ ID NO: 86405

SEQ ID NO: 119691 - DNA, 291 bp, Enterobacter cloacae; identical to SEQ ID NO: 86404

SEQ ID NO: 119692 - DNA, 423 bp, Enterobacter cloacae; identical to SEQ ID NO: 86403

SEQ ID NO: 119693 - DNA, 789 bp, Enterobacter cloacae; identical to SEQ ID NO: 86402

SEQ ID NO: 119694 - DNA, 534 bp, Enterobacter cloacae; identical to SEQ ID NO: 86401

SEQ ID NO: 119695 - DNA, 330 bp, Enterobacter cloacae; identical to SEQ ID NO: 86400

SEQ ID NO: 119696 - DNA, 486 bp, Enterobacter cloacae; identical to SEQ ID NO: 95527

SEQ ID NO: 119697 - DNA, 210 bp, Enterobacter cloacae
atgacggaactggaaaaacagttgctgagcgcattagagcagctacagcaggactactcgaaaaggctggacgagtgggagagcgccttcgcggaatggcggacgatgtgtggtcttatgcaacgggagaacgcagcgctgagcgagcgcgtcacggacttgagcacgcaggtgctgagtttaagcgagcagctgcgccggttgtcgtaa

SEQ ID NO: 119698 - DNA, 228 bp, Enterobacter cloacae; identical to SEQ ID NO: 95528

SEQ ID NO: 119699 - DNA, 234 bp, Enterobacter cloacae; identical to SEQ ID NO: 95529

SEQ ID NO: 119700 - DNA, 345 bp, Enterobacter cloacae; identical to SEQ ID NO: 95526

SEQ ID NO: 119701 - DNA, 606 bp, Enterobacter cloacae; identical to SEQ ID NO: 107131

SEQ ID NO: 119702 - DNA, 2898 bp, Enterobacter cloacae
atgtcacgacgccatattttcaccgaacggcagcgagcagcgctgttcgatctgcccacggacgaactgtcgctactgaagttctacacgctgggcgatgatgacctggaaaacattaggcagcgccgcagaccggaaaacaggattggctttgccctgcaactttgtgccttacgatatccgggccgtgcactggctcctggtgagatgatcccgcgtgaaatcctttccttcgtcggtgctcagcttggagttccggctgatgcgcttctcacttatgccacacggcgccaaacccgtcagcagcacatggacacgctgcgcgaaatttacggctacaagaccttcacgggccgtggtgcccgtgatctgcgggagtggactttcggccaggccgaagatgccagatcaaacgaggatcttgctcatcgttttattgtgcggtgtcgggaaacttccaccattctgcccgcagtatcgacaatcgagcgcttgtgcgcggatgctctggtcgccgctgagcggcggattgaaacgcggattgtggaaaatttaacagcggatgttcgcgatcacctggacaaacttctgagtgaaatgctcgccggcaatatcagtcgtttcatctggcttcgcaacttcgaggttggtaacaactcggctgctgctaaccgtttgctcgacaggctcgaatttctgcgtaccctgaatatcaatcatagtgctttggccagcatacctgcccatcgcattgcccggctgcgtcggcagggtgaacgctacttcaccgacggtttgcgtgacatcacttcggaccgccgctgggcgatccttgccgtctgtgttgtggagtgggaagcggcgattgctgatgccatagtcgaaacccatgacaggatcgtaggaaaaacctggcgggaagcgaagcgccagcatgacgaaacaatttccggctctaaagccacactcgcggatacgatccgtaccttcaccgcgctgggagcttcgttgcttgaggcccgcagtgacggaaccccgctggagatggctgtcgccagttcggttgcatgggaccggctcgctcaactggtagcgacagggactcaactcagcaacacgctagccgatgagcctcttgcatatgtcgggcagggataccatcgctttcgtcgttatgcgccccgcatgttgcgctgtctgaagctcgaagccgcgccggtcgccggaccattggtagcagcagctttgtcgatcggagagatgaaaggtgttgcatcgccagaaaggcgtttcctgcggcccagctccaaatggaaccgtcatttacgagctcaggaaaaaggagatacccgtctttgggaagtggcggtactctttcacctccgggatgcttttcgttccggagatgtctggctcgctcattcgcgccgctatggtgacctcaagcaggtactggtgccgatgatcgcggcgcaggaaaatgcaaaactggccgtgccttccaacccacaggattggctggcagacagaaaggcgcgactcacgatcgctcttaagcggctggcccgggctgcccgtaacggcactattccgcacggtagcatagaagatggaacgttgcggatcgacaggttgacagcagacgtgccggatggtgccgaggcactcatactggatctgtatcgccgaatgccgtccgttcggattaccgacatgctgcttgaagttgatgcagcccttggtttcacagatgcgtttacccatctgagaaccggggctccatgtcgcgaccggatcggtctgctcaacgtcctgctcgctgaagggctcaatctgggcctgcgtaagatggcggaagctacaaacacgcatgattactggcagctctcacgccttgcccgctggcatgttgaaagcgaagccatgaaccaggcattggcaattgtggtggccgcgcagggtaaactgccgatgtcacgcgtctgggggatgggcacgtcagcatcgagcgatggtcagtttttcccgacagcgcggcatggcgaagccatgaacatggtcaatgccaaatatggttctgttcccggcctcaaagcgtatactcacgtaagcgaccagttcgcgccattcgcttgtcagtcgatcccggcgaccgtgagcgaggcaccgtatattctcgatggactactgatgaacgaggtcggtcgccatgttcgcgaacagtatgccgatacagcaggattcaccgaccatttgttcggagccagtagcctgctcggctacaatctcgttctgcgaatcagggatctgccatcgaagcggttgtacgtatttaatcccgatacgacccccagggagttacgcaagttggtaggtggaaaagcccgggaggatcttatcgttgcgaactggcctgatattttccgttgtgccgcgacgatgaccgctggcaaaatcaggcccagccaactcctgcgcaagctcgcttcttacccacgacaaaacaaccttgcagttgcgcttcgtgaagttggtcgtattgaacggacccttttcattattgagtggatcctggatacggacatgcagcggcgtgctcagatcggtcttaacaagggagaggcccaccatgcgctcaaaaatgcgctccgtatcgggaggcagggggaaattcgcgatcgcacgacagaggggcagcactaccgaatcgctgggctcaatttattgactgcggtgatcatttactggaataccgtccatcttggtcatgccgtcacggagcggcggaacgaagggttggatgttccccctgaatttcttccccacatatccccattgggctgggcgcacattctactgactggcgaatatctttggcccaaggaaccgaaagcttag

SEQ ID NO: 119703 - DNA, 498 bp, Enterobacter cloacae; identical to SEQ ID NO: 86415

SEQ ID NO: 119704 - DNA, 201 bp, Enterobacter cloacae; identical to SEQ ID NO: 86414

SEQ ID NO: 119705 - DNA, 270 bp, Enterobacter cloacae; identical to SEQ ID NO: 86413

SEQ ID NO: 119706 - DNA, 792 bp, Enterobacter cloacae; identical to SEQ ID NO: 86412

SEQ ID NO: 119707 - DNA, 498 bp, Enterobacter cloacae
atgaaactggaattaaccaacgaccagcatcaatgggtagaccagtggctccagttgtggggcgcatggtgccagaccggcaagattgataaagcgatgatcaacatgattgccagattcatggctaccgtcgagccccagcaagcatcacggccggtatgtagtgatgatgacggaatgctcattgatgctgtcattcgccactacctgaagaatgtggatgaaaatgcctggcgggttatcttcgcctactatgtctgcaactccagcgagatccgaattgcatcatggcagcatgcagtaagtaagcctcgccttatgaagacgcgtggcggaaatcagtacaaacacccaagcatctcgacaatccgtagagaggtgaagcaaatcatcaatgcttcattgttctgtttataccaaccgcttcaaaatgcgtttaacgatcgcgaaaatgtgaggaaagttgcaaataaatcacacaacgtgcttgcaatttaa

SEQ ID NO: 119708 - DNA, 225 bp, Enterobacter cloacae
atgtatcgcatggaaaaaataaccactggtgctgcctatggcgcttcagccgggagcatcctaaacggcatgttgaatgcctacagtcccgagcagtggaacgctatcggcgtgctggtgggtatcatcattgccgtactgacgtatctgacaaatctctatttcaagatccgcgaagacaaccgccgcagcaggagccgagatgaacccgacactcaggaataa

SEQ ID NO: 119709 - DNA, 495 bp, Enterobacter cloacae
atgaacccgacactcaggaataagctggtgggtgccattgttggcggatccggagccatcaccattgctgcagtgatgttgggcaatgctgatgggctggaaggacggcgttattacgcctatcaggatgtggtcggcgtctggactgtttgtgatgggcacacaggtgccgacatccgccgcggtcaccgctacaccgacaaagagtgtgacaacctgctgaaggcagatttgcgaaaagtggcaaacgccatcgacccgctaatcaaggttcgcattcctgagcctacccgtgccgcgctttactccttcacctacaacgttggctctggtgccttcgctagctccacgctgctgaagaagttgaactccggtgatgtgccgggggcatgcaaagaactgcagcgctggacgtatgccggtggtaaacagtggaaggggctgatcacccggcgtgagattgagcgtgaagtatgcgaatggagccaaaaatga

SEQ ID NO: 119710 - DNA, 303 bp, Enterobacter cloacae
atgagagtggcattactggtagctgtattcatgcttacggcatgtgatcgtggccctgagccagcaaaatcaacaatggctgtttcctctcaactgtcctctgacgcagaccgcattaaggtgaccaaaatgtcagagttcagggataacctggcttacgataactggcgcggcgtatacctcattcaggatcagcaaaccgggaaggaatacatcggcataagcggtatcggcatttcagaagtaggttcacatacgcaactggtaggcaaagttcagcaatccgtaagggatgagcgatga

SEQ ID NO: 119711 - DNA, 468 bp, Enterobacter cloacae
atgagccgattaacatccatcatttgcgctgtcgttatctgcctgctggtttcaatggcctgggcgattaaccactaccgcggcaacgccatcacctacaaagaccagcgcgacaaagccaccaagaacctccgtctggctaacgacaccattaaagacatgcagacccgccagcgtgatgtcgctgcgctggatgccaaatacactcaggagttagcggatgcaaaagctgaaaatgatactctgcagcgcaagcttgataatggtggtcgggtgcgcgtcaaaggacgctgtccagtgccagccgcaaccgaagcctccggcacctccagcttgggccatgatgccaccgtcgaactctctgaagttgctggacgaaacgttctcggtatccgatccggaatcaagcaagaccagtcagccctgagagtgctgcaggagtacatcaatagtcagtgcttgaaatag

SEQ ID NO: 119712 - DNA, 585 bp, Enterobacter cloacae
atgaatcctgcaatttttattaagattttcggaaaagtagatatctcaaaattattcctttctattgaccaaaatgaagatgaacttggctcggttctaagagttcaccttttgtgtgagcgattgctagacgcatggatagctgctcaccttgatagagaggatttgtttgaaaactccgcaggcgaaaaaataaagttcaatccaagctatggcatgaaactgggtctagcaaagaagctggggatgaatgcaggcctctgctcatgccttcaaactatcaataaaatcaggaatagcttcgctcaccgctatgattgcgagcctcttttagataaagacatgcaagcgatggctagcatactgaaagagatccctctcccggggaaagttaagcgtgtcgacgatgtcgatttcaagattattgatagttgtggcaaagaaataaaaagttacggcttcaacgatgaaaaaacccccaaccgcatccgcctcagcattatcttttccaatattcttgcaagagtggttactgctgtagaggaggatttcaataaaattaaccctttaggatttaaatattaa

SEQ ID NO: 119713 - DNA, 429 bp, Enterobacter cloacae
atgggcagcggatcaagcacgcaaaatccacaattgaatgttgtctctttctctgagacattcaatctttattacacatcccgcttttctcaaaaaacactcgataaaatcgatgacttcatcgaacatttcgagaagtacaatctttttggcgatgccttaaaaggccatccggcttggattggcaaggtatcgccatcttggaacgtgcctgacagttacgaaaacaaagaagctattgaagaacatgccagggctaataaattgtggcatgcccatataggcgatcccgttttcatcgatacatttcacgggaagtacaaagtctctgattgggtcatccacttccaacgtctagcgccgaaccatataaaactgttagagcttgggtatcatgaccctatgcaactcccccaaaatttcgaatga

SEQ ID NO: 119714 - DNA, 429 bp, Enterobacter cloacae
atgagttacgcaatagaaaaaaaatggaaggctggaggtctgtcattaggatggactgcagtacctactgtgttgttttttatacaaaatgagaagaaattgagccctgtagcattcaataccttgctgaatctcatagtacactggtggaatctacaggagtggccgcacccctcaatggagagcctggctatacggatgggggtgtcagtaaggacggtgcaaagggctattaatgacctagaaaaagccaatctcttagataaaaaaccgacatcaaaaagcgacaaccgatatggtggccgcaacatatacgaccttacaaagcttgtagattatttagacataattggtccttctgtgtccgagcaagtaagaaagccgcgacataaaaagccaatatatacagtaaggaaaaaagccgattag

SEQ ID NO: 119715 - DNA, 396 bp, Enterobacter cloacae
atgaatgctgatgaagttacacgaattcttgcgcaatcgagtcaaaatgattggattgtggatgatgagacaggggcgtttacttataaaaatgatttagcactgcacattaagagagctgattacgacgactacaactcgtttaatgagccttgggctgttcgtcatcctgatagtaatgcgtgttcagtcgagtacaccgttcactatggttcttcgtttgttgatagaaaaaccttggtttccgtcgatggtcatcgtgcaaccttgcctatgcctgcatccgcaacggatctaaacgtgtcatcggctgatgtgaatttcgccaaaattgtaaacattggcgatcgcgttgatgaatacattcaacgttctggtcttacgattaagccctaa

SEQ ID NO: 119716 - DNA, 690 bp, Enterobacter cloacae
atgattagaaaaggtaacatagataatgcccttcaaatgttagaagggcatttgaaatttttagaacgtaatacaggtttaactaacgataacaaaaatgaacattttgtttttaatccagataaagtacttgcaaataacaggcactttatagcggaaacaggatgggaagcacaacctgatggtgacgcaaccaccgaagggcagtcattagcaattttaggtgcaatatacgcatatcaggcaaccaaagaaccccactatctggaactggcaaaggactactttaacgggtatcacaatgcattctacagaggggtagtttttccagatccacctgatggttcattacgctgtaactggatatgtaacggaaaagctccggtactggcacactacccattagatccagagtacccaactcatggaggcttcaagggagtactgtttacatggacaaacggacagacacagataccacatggtgcaccaaactatggtgagtacctcgatgctgtatggttcgcttttcctgaacgtgcttctttaggctggaatcaggtaaacgctactgtatatgcatgggattcagaaggttcggtagactggaaaaccaaagcacctacatacgatgttgattggatcatcgtgaatcgccacgggtttaacagacacctcagagtcatttaa

SEQ ID NO: 119717 - DNA, 1110 bp, Enterobacter cloacae
atgttgggtatcacgaaccttgatggttctaacggtactcagttagtgatgaacaaatccggtactccggtactgaatttccgtaacttctcatcagcaagtactggtgcatggtacaaggtctataccactgccgataagcctactttgtcagaacttggtgcagcagcggctactgatctcagtaactacgtaccgattacccgtaccatcaatggcaaaccattaagcggaaatatcattcttgtagcagccgatatttctgatgtgtactcaaaaacacagaccgataacagctatgttcctaaagtgttccagttaaacggacacgcactaacaggtacggcgttaaacttggtagcagccgatattttagatgtatattcacagacgcaggttaatacaaactttgtagcaaaaactactacagtaaatggattagcattaacaggtaatattactctaacggcagcacagttaacggatatggcaagcctaagttatagtaatagtactttcgttccaaagacgttcctaatcaataacaagccattatctggtactaacattcaattggtagcagcagatattagtgacgtatattctcgtacccaggctaacgatctctttgcactacgtattactactgttaacggttatccattaagttctaacgtgtctctgaactataatgatgtaggtacttactcaaaatcacagattgatgtaaagaatgcagcactacaggcaaacattgacactaaggttactatcactcaagatttgttagtactaaataccgtaacagacgcacttagtcttgatatgtcagatggtaaaagagtgttctctggaacacttacctctgcgagtactcaattaagcattatcaatgcaagtggtagtactaagaacagtcaaaccatcacgatatatctgatgcaaggcacaggtgctaataaaatagaatggccttcgaatgttaaatggtcatacgggcgtactccagtattaaccttcactaaagattctgttgatgtttttcaattcacgtcaatagatggggggagtacctggtacggctccttactaatggcggatcttcattaa

SEQ ID NO: 119718 - DNA, 759 bp, Enterobacter cloacae
gtgctcaatagtgttgatcacgtcatcacccgccacggtattcacgcgcaggcccggcaggttagcgtcgatagcgatctcgcgttcgccggtgccggtgttgccgtggccgttggtgacggttgccgtcacgctcaggctgccgttgccgagtgcggtcagcacgtcagacggcacattcacggaccaggacagattgttctgcaccgttgcggtgtagctgtgaccgccgatagtcacggtcacggtgttgcccgcttcggcattcgccacggtgccgctcagggtctgacctgccgccacttccgccgcgttaatcacgttgtcgcccgccacggtgttgatggtgacggttggcagcgcggtgtccaccagcaggttcgcggtgttgctcacgctgttgcccacgccgttggtggcggtcgcgttcagggtgtaactggcctgaccgagaccggccagatccgccgccggaaccgtcaggctccaggtgccgtctgccgcagttgtcgccgtgtagtttttgccgttcagaattacggtcaccacggtgccttccgccaggttggcgctggtgccgctgacgctcaggtcctgccctttttctaccgcgttcagtacgttgtcatcgctgatggcgttgaagctgaccgacggcagaccggtatcgacggtcacattatgcgtgccgctgccggtgttgcccgccgcgtcggtgacagacgcagtgacggtcacggtgccgtcgctgaggactga

SEQ ID NO: 119719 - DNA, 1158 bp, Enterobacter cloacae
atgccctggactgagacccgacctatgcaacgccttgattttatccgtgcctgccatgcaggtacggattctttttctgccctctgccgtctcttcggcatcagtcgaaaaaccggttacaaatggcttcagcgttttgacccctctgacctgtcatctctttctgaccggtcgcgtgctccgcactcccactcccggacagttcctgaagatatcgccgggcagcttacggccctgaggcaaaaacaccctgactggggccccaaaaaactgcggatgtggctgctcaatcatcacgtcgattttaccgtccccgctgccagtactatcggcgatatcctcaagcgtgaaggcctggttccggataaaaagcgaaaacgcagaaccccgggcaatcgccagcccctgaccatcatcagtgagaacaatcaggtctggagcgctgattttaaaggcaagttcaggctgctgagccggaaatactgtcatcccttcaccctcaccgacaatcacagccggtatcttctgagctgccggggagcagaccgggagagcgagcccttcgtcaggcagtgcctgacggatgcgttcctggagtacggtctgccggaagtcctgagaacggataatggtcagcctttcgcaggaacaggtatcgccgggttaagtcgccttgcagtctggctgataaagctgggcatcagaccggaacgcatcagaaaggggcatccggaagaaaacggccgtcatgagcgaatgcatcgttcgctgaaaagtgcagtaaaacagggcaacatctttatgacgatggaagaacaacagcggtggttcagtggctaccgggaagagtttaactacgaaaggccacatgaagccctggcgggtgcaacgcccggaacggtatggcaaccctcaggccggcactgggatggcagggttcctgaatatgcttatccggaaggaggtacggtctacagggtgaaatcaagggggacactctatatggggaaaaaggggacggtgttcctgagtgaagcgctgactgatgagtacatcatgctggaagaacaagatgatggcctggaggccatcatctttaatggaataacgcttgcgtactacgaccgaaaaacccagagtgtgctccggatagactga

SEQ ID NO: 119720 - DNA, 513 bp, Enterobacter cloacae
gtgaaagccgccgctaagcgaatcaaggagcagaaagaggcagagaaggccgggcgcaaacgccgcaaggccaagcgcgagtcactcaagtctaaatcccagtgggataaagaggctcaatcagctttcaatcgctacatccgggtccgcgatgaaggtaagccatgtgtcagttgcggcaatccactcatcggcaaaagcaattacctgactggcagcgccattgacgccagccattaccgttcacgcggcgctgcctcacacctcaaattcaacgtgtttaacgtccactccgcttgcacccgctgtaaccggcagttgagcggtaatgctgtcgagtaccggatccgcctggttgatcgcattggccttaagcgcgtagagcggctcgaagctgacaatgccccacgccggtttgacgttacctacctgaagcgcgtgaaagcaattttttcccgcagggccaatgcactgatgaagcgccgtcaaaaattacaggagagtgcagcatga

SEQ ID NO: 119721 - DNA, 642 bp, Enterobacter cloacae
atgaaatgcaaagttgaaggttgtgagcgtgaatgcaaacactacccaggaaagggtatctgtcaaatgcactacttccgaatgatgcgctacgggacctacgaactcacaaaaaacggtaaagggaaattcaggcataaaaatgcgaagggatatcaaatgctcaaaattcctgatcacccactatcaatggcgaatggttgcgtttatgagcaccgaaaagttgtttacgaccgctatggagaaacacttccaccatgcgaaaaatgcggaaagaaggtcacatggaaaaccgcgcatattgatcacattgatgaggttgttgataacaatgcggactcaaatcttagggtgctttgccgagcgtgtaatgtcatgcgatctcgagtgcatatccctgagcacacaaaaaaaggacgcacagccataactttcaatggcgaaacgaaaaccgccacagaatggtcaagggaccctcgcgtttcagtatcagaaacatccatcaagcgtcgactaaaaaatggaatgaatgtagaggatgcgcttttttctcccaaagtaacccacaggcataccaggccaagaggaagaacacctctgtatggtgaatatcgcggaccaaagcagaaggagtcagcatga

SEQ ID NO: 119722 - DNA, 831 bp, Enterobacter cloacae
atgttgatgtgtgatgcgaccggtctgtcgcaacgtcgtgcctgcaggcttacaggtttatccctgtcgacctgccgctatgaggctcaccgtccggctgctgatgcgcatttatcagggcgcatcactgagctggcactggagcgcaggcgttttggctaccgtcgtatttggcagttgctgcgccgtgaagggcttcatgttaatcataagcgcgtgtaccggctttatcacctcagtggcctgggcgtaaaacgcagaagacgtcgtaaagggctggcaacagaacgtctgccgctgctccgtccggcggcgcccaatctgacctggtcgatggatttcgtcatggacgcactttccaccggtcgcaggatcaagtgtcttacctgcgtcgatgatttcacaaaggaatgcctgacggtcactgttgcctttgggatttcaggcgttcaggtcacgcgtattctggacagcattgcactgtttcgaggctatccggcgacgataagaactgaccaggggccggagttcacttgccgtgcactggatcaatgggcctttgagcatggtgttgagttgcgcttaatccagccgggcaagccaacgcagaacggatttattgagagctttaacggacgatttcgcgatgaatgtttgaatgagcactggttcagcgatatcgttcatgccaggaaaattattaatgactggcggcaggattataacgaatgccgcccgcactccacgctgaattatcagacaccgtctgaatttgcagcgggctggagaaagggtcattctgagaatgaagattccgacgttactaactga

SEQ ID NO: 119723 - DNA, 264 bp, Enterobacter cloacae; identical to SEQ ID NO: 94215

SEQ ID NO: 119724 - DNA, 498 bp, Enterobacter cloacae
ttgcctctttacctcagccagttattgctgaaattacaacagcattatcactatcttgttgagcagattaaagatttggaatcccagttgaaacgaaagttggacgaagatgaggttggacagcgcttgctgagcattccctgcgtcggaacactgacagcgagtactatttcaactgagattggcgacgggaagcagtacgccagcagccgtgactttgcggcggcaacagggcttgtacctcggcagtacagcacgggaggtaggacgacattgctgggaattagtaagcgaggtaataaaaagatccgaactttgttggttcaatgtgccagggtattcatacaaaaactggaacaccagtctggcaaattggccgattgggtcagggatttactgtgccggaaaagcaactttgtcgtcacttgtgctctggcaaacaagctggccagaatagcctgggccctaacggcacgacagcaaacttatgtagcataa

SEQ ID NO: 119725 - DNA, 276 bp, Enterobacter cloacae
gtggcttccatttccatcagatgtccttcctgctccgctactgaaggcgtggtgcgtaacggcaaaagcactgccggacatcagcgctatctctgctctcactgccgtaaaacatggcaactgcagttcacttacaccgcttctcaacccggtacgcaccagaaaatcattgatatggccatgaatggcgttggatgccgggcaactgcccgcattatgggcgttggcctcaacacggttttccgccatttaaaaaactcaggccgcagtcggtaa

SEQ ID NO: 119726 - DNA, 618 bp, Enterobacter cloacae
atgacaacccagtatggattttttattgattccagccgctgcaccgggtgtaaaacctgcgagctggcctgcaaggattacaaagatctgaccccggacgtcagcttccgtcgtatttatgaatacgcgggcggcgactggcaggaggataacggcgtctggcatcagaacgtcttcgcctattacctgtcgattgcctgcaaccactgcgaagatccggcctgcactaaggtctgcccgagcggggcaatgcacaagcgcgacgacggttttgtggtggtggacgaggatgtctgcattggctgtcgctactgccacatggcctgcccgtacggcgcgccgcagtataacgcggctaaaggccacatgaccaagtgcgacggctgccacagccgcgtggcggacggcaaaaagcccatctgcgtcgagtcctgcccgctgcgcgcgctggactttggcccggttgaagagctgcgtaaaaaacacggtcagcttgctgcggtcgcgccgctgccgtctgcgcacttcacgaagccgagtattgtgattaaacctaacgccaacagccgtccgacgggtgataccaccggctacctggcaaacccgaaggaggtgtga

SEQ ID NO: 119727 - DNA, 456 bp, Enterobacter cloacae
gtggatctgagtgcatccggtctgaatattgacctgaccacctccactcctgacgaaactgtcgcgttcttcaccggcccgttcgcgaaactgctggacgataactatgtgcaggaaaaggtaaaagcatgggcatctccggatatcatgcgcaacctgaaccgaccgtactccgatgctgccggattcaaagaaggcactgtgctggaatacatcctgcgctatggccgcatcgagtcgttcaaccagacctttaagctgaccggtaaccacttcattgcctacgtacgcaattcgcagtacatcaagacgcgcatcgccgcgccggtgggtaccttcatgatcccgcgtcagaatccgttcgacaactacaactccctggtctggagtgctgtcggtctgcagattaagcgcgatttcaacggtcgttctaaagtgttcaacgcacagggttaa

SEQ ID NO: 119728 - DNA, 276 bp, Enterobacter cloacae
atgtcgtcaaaaccatttgaagacccgcgcattctgcccggtgggccggggattacctataccgtggatgacggaatgggaaataaagtcagaggtaagctggaacccggttcttctggccctgcttgggggctggattacatcaccaaagaaggtctgcacgaagatatagctcaatttaagacaaactatcaggacctacccgacagcgtacccgaggtgaagggctattccggctgggatcatatgcgctgtgatatggatgcggggcgataa

SEQ ID NO: 119729 - DNA, 276 bp, Enterobacter cloacae
atgtcgtcaaaaccatttgaagacccgcgcattctgcccggtgggccggggattacctataccgtggatgacggaatgggaaataaagtcagcgggaagctggaaccccgttcccctggctgggcctggggaatggtctacatgactaagcaggggcttgagggcagcacgcagcaacttaaggctaactggcaagatttacccgacagcgtacccgatgtgaaaggctataccggctgggatcatatgcgctgtgatatggatgcggggcgataa

SEQ ID NO: 119730 - DNA, 471 bp, Enterobacter cloacae
ttgctgggaattcaggcgaagttctttatcaagatgttcacgaattgtacgcctaatcatatgacgctggatgagcatcgggtcaatatcacccacgacatcacccacttgcatatagtaggtattagaaggcgtctccagtgtcagatagccttctttgcccgtgcggatctcacttatcctgtatccctgataaatatcacgccccgtttcgtcatcaagtgtcataccgtcatgcacggtaatttcagaacgagttacattcccttttttatcggctatatcaacaataacagtcgcgctaatgctattcttcttactgttaatactgaccagttttacataggggctattgcttgcattctggacttcaagcccggcaacttcgatttgtttcaccagtttctgattgtaagcatcaatggcatcgaggcgatacaccatatgatgtttatgcacatgtgtcgctga

SEQ ID NO: 119731 - DNA, 123 bp, Enterobacter cloacae
atgcccgcaatcttttcgaaacctcgtctaagtcagtttacgaatatgttcctaaagattctgaagtcgaaagtcgtttcgctcaagaactcgaagaacaggatgaagttaagctttatgtga

SEQ ID NO: 119732 - DNA, 1896 bp, Enterobacter cloacae; identical to SEQ ID NO: 117999

SEQ ID NO: 119733 - DNA, 795 bp, Enterobacter cloacae; identical to SEQ ID NO: 117998

SEQ ID NO: 119734 - DNA, 231 bp, Enterobacter cloacae; identical to SEQ ID NO: 117997

SEQ ID NO: 119735 - DNA, 165 bp, Enterobacter cloacae; identical to SEQ ID NO: 117996

SEQ ID NO: 119736 - DNA, 351 bp, Enterobacter cloacae; identical to SEQ ID NO: 117995

SEQ ID NO: 119737 - DNA, 387 bp, Enterobacter cloacae; identical to SEQ ID NO: 117994

SEQ ID NO: 119738 - DNA, 201 bp, Enterobacter cloacae; identical to SEQ ID NO: 117993

SEQ ID NO: 119739 - DNA, 4005 bp, Enterobacter cloacae; identical to SEQ ID NO: 117992

SEQ ID NO: 119740 - DNA, 609 bp, Enterobacter cloacae; identical to SEQ ID NO: 117991

SEQ ID NO: 119741 - DNA, 735 bp, Enterobacter cloacae; identical to SEQ ID NO: 117990

SEQ ID NO: 119742 - DNA, 924 bp, Enterobacter cloacae; identical to SEQ ID NO: 117989

SEQ ID NO: 119743 - DNA, 243 bp, Enterobacter cloacae; identical to SEQ ID NO: 117988

SEQ ID NO: 119744 - DNA, 327 bp, Enterobacter cloacae; identical to SEQ ID NO: 117986

SEQ ID NO: 119745 - DNA, 222 bp, Enterobacter cloacae; identical to SEQ ID NO: 117985

SEQ ID NO: 119746 - DNA, 288 bp, Enterobacter cloacae; identical to SEQ ID NO: 117984

SEQ ID NO: 119747 - DNA, 312 bp, Enterobacter cloacae; identical to SEQ ID NO: 117983

SEQ ID NO: 119748 - DNA, 222 bp, Enterobacter cloacae; identical to SEQ ID NO: 117982

SEQ ID NO: 119749 - DNA, 228 bp, Enterobacter cloacae; identical to SEQ ID NO: 117981

SEQ ID NO: 119750 - DNA, 1089 bp, Enterobacter cloacae; identical to SEQ ID NO: 117980

SEQ ID NO: 119751 - DNA, 306 bp, Enterobacter cloacae; identical to SEQ ID NO: 117979

SEQ ID NO: 119752 - DNA, 537 bp, Enterobacter cloacae; identical to SEQ ID NO: 117978

SEQ ID NO: 119753 - DNA, 255 bp, Enterobacter cloacae; identical to SEQ ID NO: 117977

SEQ ID NO: 119754 - DNA, 204 bp, Enterobacter cloacae; identical to SEQ ID NO: 117976

SEQ ID NO: 119755 - DNA, 312 bp, Enterobacter cloacae; identical to SEQ ID NO: 117975

SEQ ID NO: 119756 - DNA, 507 bp, Enterobacter cloacae; identical to SEQ ID NO: 117974

SEQ ID NO: 119757 - DNA, 1842 bp, Enterobacter cloacae; identical to SEQ ID NO: 117973

SEQ ID NO: 119758 - DNA, 207 bp, Enterobacter cloacae; identical to SEQ ID NO: 117972

SEQ ID NO: 119759 - DNA, 1590 bp, Enterobacter cloacae; identical to SEQ ID NO: 117971

SEQ ID NO: 119760 - DNA, 1344 bp, Enterobacter cloacae; identical to SEQ ID NO: 117970

SEQ ID NO: 119761 - DNA, 399 bp, Enterobacter cloacae; identical to SEQ ID NO: 117967

SEQ ID NO: 119762 - DNA, 354 bp, Enterobacter cloacae; identical to SEQ ID NO: 117966

SEQ ID NO: 119763 - DNA, 399 bp, Enterobacter cloacae; identical to SEQ ID NO: 117964

SEQ ID NO: 119764 - DNA, 738 bp, Enterobacter cloacae; identical to SEQ ID NO: 117963

SEQ ID NO: 119765 - DNA, 423 bp, Enterobacter cloacae; identical to SEQ ID NO: 117962

SEQ ID NO: 119766 - DNA, 321 bp, Enterobacter cloacae; identical to SEQ ID NO: 117961

SEQ ID NO: 119767 - DNA, 2517 bp, Enterobacter cloacae; identical to SEQ ID NO: 117960

SEQ ID NO: 119768 - DNA, 348 bp, Enterobacter cloacae; identical to SEQ ID NO: 117959

SEQ ID NO: 119769 - DNA, 591 bp, Enterobacter cloacae; identical to SEQ ID NO: 117958

SEQ ID NO: 119770 - DNA, 630 bp, Enterobacter cloacae; identical to SEQ ID NO: 117957

SEQ ID NO: 119771 - DNA, 858 bp, Enterobacter cloacae; identical to SEQ ID NO: 118087

SEQ ID NO: 119772 - DNA, 759 bp, Enterobacter cloacae; identical to SEQ ID NO: 117721

SEQ ID NO: 119773 - DNA, 4305 bp, Enterobacter cloacae; identical to SEQ ID NO: 118100

SEQ ID NO: 119774 - DNA, 522 bp, Enterobacter cloacae
atgacttatgcatccccggctcttcgtcgtaaaccacaggaagtatctgaacactttattaaactcgttcatgctcgaattgctgaagtgtctggctggaagtatatattcgaaagaatacctgctttcaaagacgcttgtgcaaaagccccgagccaggttccttgcccgtttactggcgcagggaaatcgaagtttcgtttccgacaaaaagacctttataccggatgtgcgatccataatgactttccggtaaatgagttttgcgacggaattgatgttctggcgaaatattatgaattaagtaaaacgcagacttgcaaaaagattctctcagattttttcgggatggatctgcatgctccgttaactgacgccgacattgaaaatgaacgacgctataaatcagcagttcgtgccacagaaactcttgaccgagaggaagtggcaaagcgaatgcgaaaacttgatgtgatgtatcactataccggtgaaataaagcctaaatcctttggtaagtga

SEQ ID NO: 119775 - DNA, 594 bp, Enterobacter cloacae
atgattgcaatctatcgtgacacccgaggtcggcctctgactatccatagaacatacgtagacaaaaacggtgataaggcacctgtagaaaatccaaagctgatgatgaagcctcctgccgatatgacaggtggctcaattcagttgtttgaccctcactatgattcaggtagttcgacctggacactgggagtggctgaagggatcgagaatgcgctttctgttgtagaagcgacttcaacaccatgctgggcagccagctccgcatggtgccttgaaaacgttactgttcctgattttttactgcctccgccggatgtaaaatatataaacttttatatctgggcggataaggatattgctaactcacaaggcactcgtgccggtatcgaagctgctcagcgacttcaaagccgcatggttgagtttttggctaaacgatatcccgcatcaaagctgacaattgaagtcttcgaaccagcacaagatattcctgatgggaaaaagggtatcgactggaacgatgttctccagttaacagggcaggatggattcccgattcactgggctcctgaatgtcttaatcagctgtaa

SEQ ID NO: 119776 - DNA, 141 bp, Enterobacter cloacae; identical to SEQ ID NO: 36145

SEQ ID NO: 119777 - DNA, 1164 bp, Enterobacter cloacae; identical to SEQ ID NO: 118569

SEQ ID NO: 119778 - DNA, 318 bp, Enterobacter cloacae; identical to SEQ ID NO: 118567

SEQ ID NO: 119779 - DNA, 240 bp, Enterobacter cloacae; identical to SEQ ID NO: 118566

SEQ ID NO: 119780 - DNA, 480 bp, Enterobacter cloacae; identical to SEQ ID NO: 118565

SEQ ID NO: 119781 - DNA, 177 bp, Enterobacter cloacae; identical to SEQ ID NO: 21678

SEQ ID NO: 119782 - DNA, 1047 bp, Enterobacter cloacae; identical to SEQ ID NO: 30071

SEQ ID NO: 119783 - DNA, 315 bp, Enterobacter cloacae; identical to SEQ ID NO: 16841

SEQ ID NO: 119784 - DNA, 1479 bp, Enterobacter cloacae; identical to SEQ ID NO: 118643

SEQ ID NO: 119785 - DNA, 141 bp, Enterobacter cloacae; identical to SEQ ID NO: 36145

SEQ ID NO: 119786 - DNA, 1362 bp, Enterobacter cloacae; identical to SEQ ID NO: 114635

SEQ ID NO: 119787 - DNA, 525 bp, Enterobacter cloacae; identical to SEQ ID NO: 114634

SEQ ID NO: 119788 - DNA, 165 bp, Enterobacter cloacae; identical to SEQ ID NO: 114633

SEQ ID NO: 119789 - DNA, 1134 bp, Enterobacter cloacae; identical to SEQ ID NO: 26635

SEQ ID NO: 119790 - DNA, 435 bp, Enterobacter cloacae; identical to SEQ ID NO: 31726

SEQ ID NO: 119791 - DNA, 786 bp, Enterobacter cloacae; identical to SEQ ID NO: 118711

SEQ ID NO: 119792 - DNA, 348 bp, Enterobacter cloacae; identical to SEQ ID NO: 6026

SEQ ID NO: 119793 - DNA, 840 bp, Enterobacter cloacae; identical to SEQ ID NO: 6027

SEQ ID NO: 119794 - DNA, 606 bp, Enterobacter cloacae
atgttcggcatgacgattcttcattcaggatttggttatgcacttcaatatgctgcacgcaatctgagcggatttcactggagaactctcgaaaacggagttaaaaatccatggattaaggtttatgacacgaataataccactaaatccagcgatggtaccctgaaagcagcatctccggtcgctcgtatcgttgcgagtgctgatacatgcctgcgctcagatattgctgaggatggtttttcatggtgcggctgcggtactgcgaacaccgaagctgaaggaatcaaaatttcccggctcgatgttggtgtttatgtgctgaccggttcggcaggcctggcgtctgatggatggcagttactgccgccaatggaccctggcggcatgggggaactgggtgtagttgaggcagagcaaaccgaaaacggcggactgactatccgcctgtttaagcgaaaatacctgctgggtgatgacggggagattgtcaaaacgaaaggggaaccgatggacgtgccggtgaacagctggatcgatgttcgcgtggatatgcctgatgattctgcctttaatcagcggatgaggcaggtacttcagccatag

SEQ ID NO: 119795 - DNA, 981 bp, Enterobacter cloacae
atgagccatcaactcaccttcgccgatagtgaattcagcactaagcgccgtcagacccgaaaagagattttcctctcccgcatggagcagattctgccatggcagaatatgaccgctgtcatcgagccgttttatcccaaggcgggcaatggccgacggccctatccgctggagaccatgctgcgtattcactgcatgcagcattggtacaacctgagcgacggtgccatggaagatgccctgtacgaaatcgcctccatgcgcctgtttgcccgattatccctggatagcgccctgccggatcgcaccaccatcatgaatttccgccacctgctcgagcagcatcaactggcccgtcaattgttcaagaccatcaatcgctggctggccgaagcaggcgtcatgatgacccaaggcactttggtggatgccaccatcattgaggcacccagctctaccaagaacaaagagcagcaacgcgatccggagatgcatcagaccaagaaaggcaatcagtggcactttggcatgaaggcccacattggtgtcgatgccaagagtggcctgacccacagcctggtcaccaccgcggccaacgagcatgacctcaatcagctgggtaatctgcttcatggagaggagcaatttgtctcagccgatgccggctaccaaggagcgccacagcgcgaggagctggccgaggtggatgtggactggctgatcgccgagcgtcccggcagggtaaaaaccttgaagcagcatccgcgcaagaacaaaacggccatcaacatcgaatacatgaaagccagcatccgtgccagggtggagcacccgtttcgcatcatcaagcggcagttcggcttcgtgaaagccagatacaaggggctgctgaaaaacgataaccaactggcgatgttattcaccctggccaacctgtttcgggtggaccaaatgatacgtcagtgggagagatctcagtaa

SEQ ID NO: 119796 - DNA, 153 bp, Enterobacter cloacae; identical to SEQ ID NO: 114632

SEQ ID NO: 119797 - DNA, 690 bp, Enterobacter cloacae
atgcgttttgtacagcccagaactgaatctcagcaggcaatgcgtgcgctgcatcgtgtccgtgaatccctggttcaggataaggtaaaaacaaccaatcagatgcatgcttttctgctggaatttggcattagcgttccacgaggagctgccgttattagccgactgagtacccttcttgaggacaatagtttgcctctatacctcagccagttattgctgaaattacaacagcattatcactatcttgttgagcagattaaagatttggaatcccagttgaaacgaaagttggacgaagatgagattggacagcgcttgctgagcattccctgcgtcggaacactgacagcgagtactatttcaactgagattggcgacgggaagcagtacgccagcagtcgtgactttgcggcggcaacagggctagtgcctcgacagtacagcacgggaggtcggacgacattgctgggaattagtaagcgaggtaacaaaaagatccgaactttgttggttcaatgtgccagggtattcatacaaaaactggaacaccagtctggcaaattggccgattgggtcagggatctactgtgtaggaaaagcaactttgtcgtcacttgtgctctggcaaacaagctggccagaatagcctgggccctaacggcacgacagcaaacttatgtagcataa

SEQ ID NO: 119798 - DNA, 705 bp, Enterobacter cloacae; identical to SEQ ID NO: 8686

SEQ ID NO: 119799 - DNA, 276 bp, Enterobacter cloacae; identical to SEQ ID NO: 118716

SEQ ID NO: 119800 - DNA, 492 bp, Enterobacter cloacae; identical to SEQ ID NO: 15993

SEQ ID NO: 119801 - DNA, 141 bp, Enterobacter cloacae; identical to SEQ ID NO: 36145

SEQ ID NO: 119802 - DNA, 132 bp, Enterobacter cloacae
atgtatatggtgcctgcgcgtactttagctatctcaaaaataggtatttccaatacaatttttatcattgcccgtcaccttaccgcctttcttatgaaatgcattatttatcaatgcattgaacaaatctaa

SEQ ID NO: 119803 - DNA, 360 bp, Enterobacter cloacae
atgtggagtgcccataaagccgcagttcatgctcgccagcatgcaggtcagtatagccagaaaagatgtgcagaatttgtttcgaaatccattcgcgccggcggtgctaatctacagaacacacattatgctaaggatatgaaaagcaatttaattctggcgggtttccaccaggtttacggtgagcctgttgagggcgatgtggcggtgatccagcccactgcgcaccacccatatggccacgcttgcatctatggtgggaacggcgtctggtactctgattttgttcagcgaacaatgtatccgggaaaggaataccgggaattaaagccagcatatgcaatttacaggcatgactga

SEQ ID NO: 119804 - DNA, 453 bp, Enterobacter cloacae
atgaaaaaaataattctggcgatcctgcttctgcccactctcgcatccgctgcacagaagttcccccctgaggtatccgctgcccttcagtttaataagtggtacatctcgcaaattattatcgggaaagagcccctgaaaaactatgaagcgctgaggccatatgtaacccgcgaaactatcagcaaactcaaagccatggataagctggatccagatgaatatgacgtgcctgacgtcgatatgttcatcaaggctcagggatatgaagatgactggggcatcgtcagtgcgcgggcgctagattacgatgccgcctgtatgcaggtttatatctcattcggcaaaaagcgggatcacaccgtgattgactgcatggtcaaggaagatggcgtgtggaaagttgaatccgtggccagtatgaatatttcagacaacctgatgatggaataa

SEQ ID NO: 119805 - DNA, 729 bp, Enterobacter cloacae
atggcctattacagtatcggcgaagtggccgaacgatgcggtatcaaccccgttacgctgcgtgcctggcagcgacgttatggattgttgaagccgcagcgaagcgaagggggtcatcgtcagtttgacgatgaagatatcctgcgtatcgaagagatcaagcgcctgatgaaaacgggtgtttcggtcggtaaagtaaaagcgcttcttgaaaatacagaagtaatgactcaggggaactgggcatcttttcaggaagagatgttaaccgttctgcgctatgccagtccggcaaaactgcgcgccaaaatcggcgagttccgccgtgaccatgcgatggatgttctgatagataacatcatcacccctgtgcggcagcgaatgaaccaggaccagaatacggtgcgtcacatggcgagcctgctggacggtgtcctgattgagtttgccgttgcaagcctgggtgagtcgcgaaaaaaagcaggtaaggatgcgctgctgattgggtgggattgcgacgaccgtacgcatttgtggctggaagcggcccgtcttgcctataaaggctggcatatcgacgtgctggctgagccgattgattctccacgtcctgaactcttccccgggcaaaaaatcttcgtctggaccggtaaagcgcctacgcctcgtcaacaggagcagctcgaccactggcgtgaacagggtttcgccgtttcgttccatcactga

SEQ ID NO: 119806 - DNA, 1344 bp, Enterobacter cloacae
atggatcagacacgctctctggaaagctttcttgcccatgttcagcagcgcgacccgcaccaaagcgagtttgcccaggccgttcgtgaagtcatgaccaccctgtggcccttccttgaggaaaatccgcgttaccgtcagatggcgctgcttgaacgtctggtagagccggagcgcgtcatccagttccgcgtggcgtgggtggacgaccgcaatcaggtgcaggtcaaccgcgcgtggcgcgtgcagtttaactccgccattgggccgtttaagggcgggatgcgcttccacccctcggtgaacctgtcgattctgaaattcctcggcttcgagcagacctttaaaaatgcgctcactaccctgccgatgggcggcggtaaaggcgggagtgatttcgatccgaaaggcaagagcgaaggcgaagtgatgcgcttctgccaggcgctggtcactgagctctatcgccaccttgggccggacaccgacgttcctgccggggatatcggcgtgggggggcgtgaagtgggctttatggccgggatgatgaaaaagctctccaacaacagcgcctgcgtctttaccggcaaaggtctgtcgtttggcggtagcctgattcgcccggaagcgacgggttatggtctggtctatttcaccgaagcgatgcttatgcgtcacgggctgagcttcgaggggatgcgcgtggcggtctccggctccggcaatgtggcgcagtacgctatcgagaaagcgatggcgtttggcgcgcgcgtggtgaccgcctccgactccagcggtaccgtggtggatgaagctggctttacggcagaaaaactggcgcgtctgtgcgaaattaaagccagccgtgacggtcgggtagcggattatgcccgtgaatttggcctgacctatctggaaggtaaacagccgtggggcgtgccggtggatatcgccctgccgtgcgcgacgcaaaacgaactggacgtggatgccgcccggacgctgattagcaatggcgtgaaagcggtagcggaaggggcaaatatgcccaccactattgaagcgaccgacctgttcctggacgcgggcgtgctgtttgcgccaggcaaggcggcgaacgctggcggcgtggcaacatccggtctggaaatggcgcaaaacgccgcgagaatgggctggaaggcagagaaagtggatgcccgtctgcaccacatcatgctcgatattcatcacgcctgcgtggagtacggcggcgaggcctcgcaaactaactacgtgcgcggggcgaatatcgccgggttcgtgaaggtggccgatgcgatgatcggacagggtgtgatctaa

SEQ ID NO: 119807 - DNA, 261 bp, Enterobacter cloacae
gtgaatcgcgatccgggactccagccagagcgaacgttgttggcatggcgtcgtaccggatgggcgacgctggttccggcgctgctctgtctgcgtcactggctacgcttcggcgaagcgctgcatatggtgaatgctgtattgttgctggctgtggggctggggatgttatgcggcataatgcgcagacacagcgttgtttcgctgctggttagcggaagtggcgcgctactgctggccggaatagtggtacgtttatag

SEQ ID NO: 119808 - DNA, 396 bp, Enterobacter cloacae
gtgagtcttcaggagaataattcgtcatttcctccacgcccgcgcggtaaatggtggctggcgggcaaaacgccagactaccggtttacgctggcaaatgagcgtaccttcctggcgtggatccgcaccgcgctggccctgatggcgggggcagtggggattgaacaattttcgcctcagctttcctccgttgcgttgcgcaccatcctttccgcgtcgctgctgagcgtagcatcagcgttggggatcatcgcctggcggcgctggcgtcacaatgaatatgcgatgcggctggggagcgatctaccctatacgcgcggattacttctgctggggggatttatcctgttgtcaggattgctgcttgcggtattgctgtggcagggggcgccgtga

SEQ ID NO: 119809 - DNA, 885 bp, Enterobacter cloacae
atgagcgtgaatcgggaaaacgtgcgggtctatatcagcaatattttgggtggcttaagtgagaccgatcgccgtatcgccgggtttattgttgagcaaccggctcaggtggcacagatgccagtaagccggctggcggaggcgattcaggtcagtgaagcaacgatcgtgcgtttttgcaaaaggattggctatggcggcctgctcgatctcaaggcggcgctgaaacgtgaattgcttgaggagagtgagcagccgttgcctgtctcgccggacattttcctggatgattcacgaaatgaagtggcgcagaaaattgcgctaacgctggagacgacagtaaaagaaaccatcggtctgctcgatatgaaagtggtgcatccggtggttgaccgtttcctgacggccagccgggtgctgtttgttggtttcggcgcatcaggcctgtcagccatggaagccagggacaaaatgaaccgccaggggattgattcagaggcttacaccgatcgttttacgatgacccttaagcttgccaatcttaagccggaagatctggtcgtagccttttctcactcgggcgaaacgccagaggtggtcaacgctttccggctggcgcgtaaggccggggcgcattgcctggcgattacccataacctccagtcgccgctgaccgagcttgccgataactggctattaacctgcggcagcgcagggccgtttcagggggattctatcgccacacgactttctcagctttttattatcgaattcctctgcaccgaaatcacccggcataatctgcgcgacagtgcgtcaaccgggctttctataaaagaactgttgattaaggaaagaatcaaacgtgagtcttcaggagaataa

SEQ ID NO: 119810 - DNA, 858 bp, Enterobacter cloacae
atgtggacacttgaaaacgaacgttataccgcaacggtgcaggccacaggcggtgagctggtcagcctatggcacaaacaaacgcgtactgagcggctatggcaaccgcaggcggcggtctggaaccatacggccacgccgttatttccagtggtcgggagactcatacacgacgggctgtggctggacggcgaattctggtcactcccggcacatggttttctacgcgagcaaacgttctgttgcgttgagcagacgtcggatacgctgacgctggaagcctgctccacggcgcagacactgaaacactggccgcgccgctggcgggtgcggcaggcaatcactctcgacggcggtggactgacttttcgacagacggtctttaatgacgacagccgaacgttgccttactctgctggctggcatcctggtttcgccctggccattgcctcccgccccggctggtgggtggaatttagcgctgcggtaagcggaccgttctttacttgcgatcgcacgctaaacactggcggacaacagcgggctacaacacgatttgcgctaacgagagcatcttttgcggcgggggccgtctatttcggcgaatgtcagcgcaggattatttctgttcgtgcccccgacggttcgctcgccttagcgctggagacgggcgaacagccctggctggccttgtggggcgtgccgggggccgatttactctgtattgagccgttagccggtaccaccgatgcaccggatgccgacggacagacgatgaataaacgaggtatgcggcatctggccgcgggagaaagccagacttttaccgtccggttgcgctttacggtggacgcatga

SEQ ID NO: 119811 - DNA, 1749 bp, Enterobacter cloacae
atgaaagcagtcatgttgatgttcgatacgctaacccgtaatcatcttgctccctatggcggcgacgcgattacgcccaattttacccgtcttgcgcaggagtctgcgcagttcgatcgcttttacgtgggtagtatgccgtgcatgcccgcccgccgggaactgcataccggccgctataattttttgcatcgtagttggggtcctgtggagccatacgacttctcaacctttcaggctatgcgtgaggcagggatccatactcatctggtgactgaccacaaacactactggcgagacggcggagccacttaccatacccgctacactacctttgagtttattcgcgggcaggagggggactgctggaaaggccaggtcgaaaaaccgaccattaactggcagggtcaggaggatgaagaaaccctgcgcaggcgcagtggacggatgacccaggatctcatcaaccgcgcagcgatgccggggcaggaagaacactatacgcatcgtaccattcaggcgggcatggaatttcttgaaaccaatcagcaccaggataactggtttttgcagatcgaatgttttgatccccatgagccattctttgtaccggaaaaatacctcgcgcagtatggctgtactgccgatgaattcgacggatgggtgccgtattactgcggcgcgccgggcgggcagaatgaggaaaaggttcgcaagttttaccaggcgttggtcaccatgtgcgatgactaccttggtcaggtgatggataaactgaaggcgctgaacctgtgggaggacaccctctttatcgtctgcaccgatcacggtttcctgctcggcgagcaccagtggtggggcaaaaatattatgccggtctataacgaaatcgcgaatacgccatttttcatccgcgatccacgtagccgcgaacacggagtgaggcggcaggcgctggcgcagactatcgatattcccgccacgctgctcgactattttaatctgccgcgcccggccacgatgaccggccgaccgctgggtgaagcagtgcggcatgacaggccagtgcgagactacgccctgttcggctattttggcggccacatcaatatcaccgatggtaatttcgtctatatgcgctgtcctcgggaagaaggtaaagacagtctgtacgaatacaccttaatgccaacgcgtatcgacagcatgtttaacgtcagcgaactgcaaaatattacgctccatccggggttcgattttactcaaggggcgcaggtgatgcggatcccggcgaccttcggctacctcaacccgtggcgattcggcgataagctgtttgatctgcatgccgatccgggacaagtggtttcgcttgcggacagcgaaaaaacgctgcattacgcacaggcgatgcgcgcgatgatgcaggcgcatgatgcaccttccgagttatttgcccgtttcgaactggacaccattagcgcaacgcgcgaggcggccttcgccgggcgctggtcacggctgaattccctggccgagtgcgagcatcatggtgtggaagaagcgctgcgttttatcctccatgccgtgaaggcgcgtggggttgcccataatgatttgctggcgcacttcccggcggggaaaacactccgcgacgacgatatctttaccctgatcgacgcattttttagtggcgatcggcaccgggcattggtttaccagacccgactgttgttacggacagaataa

SEQ ID NO: 119812 - DNA, 1536 bp, Enterobacter cloacae
atgaacaaattgtttgcgggcgcacaaaatctgggtaagtcgttcatgctacctattgcggttctgcccgccgctgggctgttactgggctttggcggcgtctttaccaatccggtgacccttgcgacctatccgatgctggataacacggtatttcagacactatttaccgtgatgaaactgtgtggcagcgtggtgttcgataacctttcactactgtttgcggtgggtatcgcggttggcatggcgcgcagcgacaaagggactgccgggctggctgcggtgctttgttacatcgtcatgaacaaggccattaacgcctcgctgctcctttcaggcacgctggcgtcggacaatctggccgcggcaggacaagcaaacgtcctgggcatcgttagccttcaaaccggcgttatgggaggcatcatgagcggcctgctggcatattgggtgcaaaaacgcttcggtaaaacggcgttaccggatctgctggccttttttagcggctcgcgtcttgtgcccatcgttagctcgttcttcgccatctttctcggtgtagcgctattttttgtctggccgcacatacaggcaggtatcagtcacctgggtggagtggtggaaaaaacgggctacgtgggaacgttgttctacggcatgatccttaaatgtttgattccactgggcctgcatcacctgttctatctgccgttctggctgaccagcgttggcggagagatggtggttaacggtcaggtagtccagggaacacagaaaatcttcttcgctcagcttgccgatcctacggtgtccgaatactacattggcgtgtcacggtttatggctggccgctttgccgacttcatgtttggtctgccgggcgcggcgctggccatctaccacacctcgcgtccggaaaatcgtaagaaggtcgccagcctgatgctatccgctgcactgaccgcgtttgttaccggcatcaccgagccccttgagttcgcattcatgttctgcgcgccgctgctttacggggtccatatcgtgctcactggcgtggcatttatgctaactcacatcctgcaaatcactgtcgggcagactttttccggtgggcttatcgactttatgttgtttggtgtgcttcagggcaacgccaaaactaactggctgcttatgttgccgctcggcgcggtgatgttctgtctgtactacttctcattccgcttcctgatccagtggcgacagttgaagacaccgggtcgcgagaaggaagaggatgccgtagatatggccatggcgggcaatgaacgcgccgccggtatcgtgcatgcgctgggtgggcgcgacaatatcatcgacgtagactgctgtgctacccgcctgcgcgtaaccgtgaagaaagcgcaagatgtcgtcattgaggactttaaacggctcggcagccgcggtgcttttattcgtggggaaggggtgcagatagtgtacgggccccatgtcaccctgattaagaacgaagtcgaagaatttatcggttcataa

SEQ ID NO: 119813 - DNA, 1215 bp, Enterobacter cloacae
atgaaccgtccctttcatctgatggcaaagtctgtgagctatcagtgcaacatcgcctgtgactactgtttttatctggaaaaggagcacgggacgcttcagccccgtcagccgtcgcgacacatggatgacgcaacgctggacgcgtttgtccgtcagtacatttcggcgaacccagggccggaggtggaattcacctggcaaggcggtgaaccaacgctggcaggcattgctttttatgagcgggcgctgcggttacagcgtaaatatgccgatgggaaacgcatcaccaacagtattcagaccaatggggtgctcattgatgaagcgtgggcatcgttcctggccgcaaaccattttctggtgggactctcgattgatggtcccgcctggttacacgatcggtaccgcaaaacccgtagccagggctcagtgtttgacaaggttgtccgcgccatgtcgctactgcaacaacacaatgtcgacgtgaatgtgctgaccgtcgtaaacaacgtcactgccgaacacccgcaggagatctatcgttttctcacccaagagttgggggcaagatttgttcaatttatccctgccgttgagcaacgaccgctggcagaaaaatacggcgaactgctttatccacagtcgcttgccgggggtagcgtcaccgaatggtcagtatccggcgagcaatggggaaaatttatcaacggcgttttcgacctgtgggtacgccacgatgtggggcaggtttatgtccagctgtttgacagcgctcttgcagcgtggctgggggagaaaccctctttatgcgtgatgcaatcctcctgcggttatgggctcgtcgtagagcaaaacggtgacgtctacagttgcgatcactatgtttaccctgagcaccgcctgggcaatctgcgcagagatagcctggtaaaaatggcgaacagtaaaaagcagcggaagtttggtttagcgaaaacagcggtatccgcagagtgcatgcgctgcgactggcgcttcgcctgtcacggagggtgtccgaagcaccgtatccataaaaacgggcagcggtggcacaaccatctttgcgcaggctataaagtcatattcagtcatatggatccgtatatgcgttttatggcgcagcagatccgggtgcgacaaccgcctgcaaaggtaatggaagtggcagggattattgccgggcggcaatag

SEQ ID NO: 119814 - DNA, 1302 bp, Enterobacter cloacae
atgaaactgtgtgcgatgtttgcttctttgattgcgttatccgcatcagcgtttgcggcggattatccggtgttaacccctgcacaaccggataccgtgggctttaatgttaaaaaattaaacagtatggttcgctggatccagcagcaagttgacgctggctaccccgggatgaatgtgctggtgataaaagataaccacattgtatttcagaaagcctggggctacgccaaaaaatatgacggctcgcatttagccagcaatcctgttatggccaccacggacaccatgtacgatctggcttccaataccaaaatgtatgcaacaaactttgcgctacagaagctggtctacgaaggcaaaataagcgcgaccgaccttgtcgcgaaatatattccagggttcgcggataaccccaccgacaaaattaaaggaaaagatgccctgcgaattattgatattttgcatcataccgccggcttcccggccgatccgcaatatccaaacaagcgtgttgcaggcagcctctactctcaggataaacagaccacgctggagatgattaagcgaacgccgcttgattattcgccaggtacaaaacatgtctacagcgacatcgattacatgatcctcggatttatcatcgagtccgttaccgcaatgccgcttgatgtgtatgttgagaaacatatttaccagccgctcggcctgaagcacacggtgtttaaccctctgttaaaaggctttaagcaacagcaaattgccgccaccgaacttaacggtaacacccgggatggtgtaatcagttttccgaatattcgtaccactaccctctggggccaggttcatgatgaaaaggcatggtattccatggagggcgtttcaggtcacgcaggtctgttctcaaatacacatgatattgccgtgctgatgcagaccatgcttaacggggggcattatggcaacgttacgttatttgatcagagtacagtagatgagtttacccgtagctcggcagcagatgtcacctttggactgggctggagggttaacggtaattcctctatgaccccaacctttggcgtactggcaagccctcaaacctatgggcatacgggctggacaggcacgctcaccgccattgatcccgtaaaacgtatggcgattgtcattctgggcaaccgaccacactcccccgtcgctgatcctaaaatgaatccgaatgtttttgtcagcgggaccttacctgcggcaacatatggatggattgtcgatcagatctatggcgcactgaacgagtaa

SEQ ID NO: 119815 - DNA, 1464 bp, Enterobacter cloacae
atgaaagggatattgcgccacattttacccctttcgctgcgggttcgctttttgctggcaaccgccgccgtcgtgctggtgctgtcgctctcttacgggatggtggcgttggtcggttatagcgtgagcttcgataaaaccaccttccgcctgcttcgcggcgaaagtaacctgttttataccctggcgaagtgggagaacaaccgaatcaccgtcgagatgccggaaaacctgaatcagcagagcccgacgctggcgctgatctatgatgaaaaagggaaattgctgtgggcccagcgcgatgtcccgtggttgaaaaagcgcatccgtccggaatggctgaaaaccaacggttttcatgaaatagaagccgacctcaactccaccagcagcctgctgcgtgacgatcgcgccttacagatcaagcttaatgagatccgtgccgaagatgacgacacggagatgacccactctgtggccatcaacctttaccccgccaccctgaacatgccgcagttaaccattgtggtgatcgataccataccggttgagctgaaacgctcgtatatggtctggaactggtttgtgtatgttctggctgccaacctgctgctggtgatccctctcctgtgggttgctgcgtggtggagcctccgcccgattgaatcccttgccaaagaggtgcgcgagctggaggaacatcaccgcgagaagctaaacccggagaccacgcgtgagctgaccagcctggtgcgcaacctcaaccgcctgctgaaaagcgaacgtgaacgctacgacaagtatcgcacgacgctcaccgaccttacgcacagcctgaaaaccccgctggccgtgatgcagagtaccctgcgttccatgcgcagttcgaaaatgagcgtggatgacgccgagccggtgatgctggaacaaatcagccgtatttcacagcagatcggctattacctgcaccgcgcgagcatgcgttccggaagcgctctgttgagccgtgaactgcacccggtagccccgctgctggataacctcacctctgcgctgaacaaggtgtaccagcgtaaaggggtcaacatcagtctggatatctcaccggaaattagctttgtcggtgagaaaaatgactttatggaagtgatgggaaacctgctcgataacgcctgcaaatattgtctggagtttgtcgaggtgtccgcgcgggtaacggataacgaactgcatattatcgttgaggatgatggtcctggcattccccgtaataaacgcgaagtggtgttcgatcgcggccagcgcgccgatacgctgcggccaggccagggcgtcggattatccgtcgccagggaaatcgtcgatcagtacgagggcaagattgaaaccggtgaaagtttgctgggcggtgcccgtatggaagtcatttttggccgccagcatcccgtatcgaacgatagttga

SEQ ID NO: 119816 - DNA, 996 bp, Enterobacter cloacae
atggcagataattcagaatcttttgcaacaatagaacaaattacctcacgccctaatttttcttctgatttagaaattactgttaaaagttttcgttctcttgtaggacgctatcatcttagtgagagtgtgaagtgccaggtaaaaaccgagcatgggaactgtggtcaaaaacatcagcatggatatcttggtgttgatgatactggacatgaaggtttaattggaggcatttgtggggataagtactttggtgagcacacgcaatatatacaggaaagaaatcgtattgatgctgagcttgacaggcgtgagagcatagagaaactaatatcttataaagataattttttagccttatcttctacgtacgctaatttattgaaagaaactcacaacataaaaaataaaatcaattatttatataaaggctttcctgacatagtacttacttatctttatcaagcccaaagaacacaaaattgggatttatatattgatgtgttgcgtcatactcgtggtgaaaagggaatgacgagtaattggtatattgaaaaactctgtacttttccacccttgccgtctcaacaagaaattaaaagtttgttagggaaaattgagagcttgcaatctattttcaacgaggcctgttcaaaaaaactagatgaacttggaacgccaaaattgaaaagttacgtgaaaagcatttccgaattctcagaattagagacttcttttaacaaacatcacaaaaacactgaagacttcattagaaaagaaaacatctttaatctatattatgcctgtgcaaatactaaggacaaatatagtactatcaaaacaattttataccttatgaagaattcaaatccaactgaagcatcagttagaaaaaaatgtgatgagattgaagctgcaacaagaaaaagatttgataattgtgaaatccgatacaacaaaaaagtaatgaagtttaagaagaatagcttaggttaa

SEQ ID NO: 119817 - DNA, 276 bp, Enterobacter cloacae
atgcgaagtgcaggattcgttaagaatgcggccatatacagtatctgtattgtctttgcatggtggctatcaagtttcggtaagcctctcaatggactaactcaatgggttatggataccgcctatagtactttcggttctggcctgagtggttcatatgaagctgatgcagatccggtaaggttcatcgccttaatcctgatggtacttatctacgctaccatactgttcttggtcgcacgcttagtactaagaaagtttcaggccaatcgctaa

SEQ ID NO: 119818 - DNA, 528 bp, Enterobacter cloacae
atgcaaataatgaggatgacatacgacgatattgataataatggctacgccaaattacacgtctatggaataggaactttctcggtttttagtgggcaaaacccatataccaatgatccaaactgtgcgtacttaccaaacagtgcaatacctactgggcggtactggatagttgataggccaactggctctacattgaataagatccgggcctggggcgttgatacaatcacaggtaatgaccactccgaatggtttgcactcttcagtgctcaaaccatgacagatagtataatgattaacggtgtatctcgtggtagcttccggttacatccactcaggccagatggttctggtttctcagaggggtgtattacattcgtcaatcgacccgatttctatagtgtacgtagtcagttgctccgtactaaaaaggttaaagtaccaggatcaaggactggattgatggcatatggttatgttgatgtacaaggggggagcgactatgcgaagtgcaggattcgttaa

SEQ ID NO: 119819 - DNA, 468 bp, Enterobacter cloacae
atgagcatattaacagtagcagctaaatacaaagatgtgttaactatttgtttttctgtactttcatttatcatagcatgtacttccttatttttttcaggtcgaacagcatggcatgatagatcaagattgaaaattacagggcgagttgtatacgaaccggtttacgaaaaggcttataaaattgaagtgaccgttcttaatgttggtaggcgtgatgctgtattagaagggattctatgtcattatgaagggaataataccagacatatttttgaaaaaaatggttttatacttaaagaaaagcaaagggaaatgtttcaaatcgaattcagggatttagtaattacagatgatgatggcaatgcttatgagttagaaaacattaccgtattagatgttgaagggaaagagcatgacattcctaactcaagaaatcttatttcaatgttttcaagaaatgcataa

SEQ ID NO: 119820 - DNA, 732 bp, Enterobacter cloacae
atgaacagaaaacaatttatccagtcgcatggtgctacttgtagtaactggaattggagttggtcatttgttaatcacgacaagaaaatggtgatctttggtgcttgggatgttcagaaagagcaagaaagatcagttatactaagggagcggtggaaaaccaaagtagttgatggtaggacaagaaaaaatctgggatacattcaagctattgaacacatccagttgatagctgaaggttatgatcttttcacgtttgatatggagcaggggcgaaacgatgaggatagagatgtagctgttatcaaacgttttacccctaaacttgaaaagcgttaccttcgaaaagaaggttctgtctggtatgcagacttcttacctaatccgtttcctgatgaaattacctcacctgaaaactacgctgaaggtgcaaaaaagcaagttacagtaaactcctacgaacgtgatccaaaagcacggcaggcgtgtattgaccatcacggtacttcttgcaagtgttgtgggtttgactttgagaaagtctatggcgaacacggtaaaggatttatacacgttcatcatatcaaaccactgcatacagtaggtgagaactatgtagtaaacccgattgaagatatggctcccctttgtccaaactgtcatgcaatgatacataggggaagtgaagtcttaagtgtcgaaagattaaaaataatagttgagaaaaaatga

SEQ ID NO: 119821 - DNA, 1023 bp, Enterobacter cloacae
atgagaaaagcactactcgcagttgccgtggcatgtaccctttccgtgacctttggcgcacaggcgcaggacacgccggacggctatcagctggaacaggtgctcatcatgagccgccacaacctgcgcgcgccgcttgccaataacggcagcgtgctggagcagtccacgccgaagcagtggccggagtgggacgtcccgggtggacagctcaccaccaaaggtggcgtactggaagtgtatatgggtcactatatgcgcgagtggctggcagagcaggggatggtgaagacgggtgaatgcccgccagcggataccgtctatgcctacgccaacagcctccagcgcaccgtggcgaccgcacagttctttatcaccggcgcgttccccgggtgcgatgttcctgtgcatcaccaggaaaaaatgggcaccatggaccccaccttcaatccggtcattaccgataactcccctgagtttcgcgagaaagcgctgaaagcgatggagacggaacggcagaaaatgcagctggatgaaagctacaaactgctggaacagctgacaaactacagcgactcgccgtcctgcaaggagaaaaaagtctgctccctgacggaggcgaaagatacgttcagcgccgattatgaaaaagaaccgggcgtctccgggccgctgaaggtgggtaactcgctggtggatgcgttcacgctacagtattacgaaggcttcccgacagaccaggtggcctggggggaaatcaaaaccgatcagcagtggcgcgtgctgtcgaagctgaaaaacggctatcaggactcgctgtttacgtcgacggaggtggcgcagaacgtggctaaaccgctggtgaagtacattgataaagcgctggtgaccgaccaggcaaaagcgccaaaaatcaccctgctggtggggcacgactctaacatcgcctcgctgctgaccgcgctggacttcaggccttatcagctgcacgaccagcaggaaagaacccccgattggcggtaa

SEQ ID NO: 119822 - DNA, 618 bp, Enterobacter cloacae
atgacaacccagtatggattttttattgattccagccgctgcaccgggtgcaaaacctgcgagctggcctgcaaggattacaaagatctgaccccggacgttagcttccgtcgtatttatgaatacgcgggcggcgactggcaggaggacaacggcgtctggcatcaggatgtcttcgcctattacctgtcgattgcctgcaaccactgcgaagatccggcctgcaccaaggtctgcccgagcggggcaatgcacaagcgcgacgacggttttgtggtggtggacgaggatgtctgcatcggctgtcgctactgccacatggcctgcccgtacggcgcgccgcagtacaatgccgccaaaggccacatgaccaagtgcgacggctgccatagccgcgtggcggacggcaaaaagcccatctgcgtcgaatcctgcccgctgcgcgcgctggactttggcccgattgaagagctgcgcaaaaaacacggtcagcttgctgccgtcgcgccgctgccgtctgcgcacttcacgaagccgagtattgtgattaaacctaacgccaacagccgtccgacgggtgacaccaccggctacctggcaaacccgaaggaggtgtga

SEQ ID NO: 119823 - DNA, 813 bp, Enterobacter cloacae
gtgttcggcagctacattccgagctttaccattccgcacatcggggagatgggcaccctgtggctggcactggcgttttgtctggcggggggagtcatcgccatggtatccctgcgcagcgtcaaaaccccaacgcacatgcataatctctccacccgggaaaaattcgccgagctgggccgtgcagcgacgctgctctacaccaaccgcagtattctgctctccagcatggtgcgtatcatcaacaccctctccctgttcgggtttgccgtcatcatgccgatgatgtttgttgacgagctgggcttcaccacctccgagtggcttcaggtctgggcggtattcttcttcaccaccatcttctcgaacgtcttctggggcgtggtggcggaaaaaatgggctggatgcgggtggtgcgctggtttggctgtatcgggatggcgctctcgagcctggcgttttactacattccgcagcacttcgggcataactttgccatggcgctggtcccggccatcgcgctggggatttttgtggcggccttcgtaccgatggcggcggtgttcccggcgctggagccgcggcacaagggggcggcgatttcggtgtataacctgtcagccggtctgtcaaacttccttgcgccggcgattgccgtggtgctgctgccctggttcagcacgctcggcgtggtcattgcctacacggcgctgtatgtcgtggccttcatcctgtgtccgtttattcgggttgaacagcctgggtttgttcgtcaggaaacctgtaagggtgaaacggtcggaatttcgtaa

SEQ ID NO: 119824 - DNA, 1419 bp, Enterobacter cloacae
atgcgcacgccctggtatgcaaaacgtaagagctatcgagttctgttctggcgtgaaatcaccccccttgccgtgcctattttcctggagaatacctgcgtcctgctaatgggggtgctgagcacttttctggtgagctggctcggtaaagaagccatggccggggtggggctggcggacagtttcaacatggtggtgatgtccttctttgccgctatcgatctcggtacgacggtggtggtggcgtttagcctgggcaagcttgatccgaagcgtgcccgcgaagcggccagacagtcgctgatgatcatgaccctcttttcgatcatccttgcggcggttatccattattacggcaaagaaattatcgacattgtcgcgggagaagcgaccagcgaggtgaaggatctggctctcacctacctggaaatgacggtgctgagttatccggcggctgccatcgcgctgattggtagcggtgcgcttcgtggagcaggaaataccaaaattccgctgctgatcaacggcggcatgaacatcctgaatatcattatcagcagcgttttgatttacggcgtcttttcctgggaggggctgggctttgtcggcgcgggtttggggctaaccatttcccgctatattggtgcggcggcgataattggcgtactgatggcgggaattacgccatcgctgcgcctgacactgaaaagctatttccgtccgcttaacttcgccattatctgggaagtgatggggatcgggattccggccagcatcgaatccgtgttgtttaacggtgggaaactgctgacgcagatgtttgttgccgggatgggaacggacgtcatcgccggcaactttattgccttctccatcgcctcgctcattaacctgccgggaaacgcgctggggtcggcgtcgacgatcatcaccggcagacgcctcggaaaggggcagatagggcaggcggaacgacaacttcggcacgtcttctggctttcaactattggactgacggcgattgcgtggggaactgcgccttttgccgggctgatggcctcgttctatacgcatgaaaatgacgtgaaagaggtcgtgaaggtgctcatttggctcaacgcggcgtttatgccaatttgggccgcgtcctgggtacttcctgccgggctgaaaggggcgcgcgatgcccggtttgcgatgtgggtctccatgctcggcatgtggggctgtcgcgttgtggcgggctacacgctgggggtaatgttgggtatgggcgttgtcggcgtctggctggggatgttccttgactgggccgtgcgcggggcgctgttctactggcgcatggtgagcgggcgctggctgtggaaatatccgcgaaaaaaaccggagcaggaggtttcggaaacggcaagtgcctga

SEQ ID NO: 119825 - DNA, 1317 bp, Enterobacter cloacae
atggactccacccttatctccgctcgccgcaacgaggagacaccttcgcttaaccgcgcccgccgcgccgctttaggtagcttcgcaggcgccgtcgtcgactggtatgactttctgctctacggtattaccgctgcgctggtctttaaccgtgaattctttccccagatcagccccgccatgggcacgcttgctgcgtttgccaccttcggcgtcggttttctgtttcgtcctctgggcgggataattttcggccacttcggtgaccgccttggccggaaacgtatgctgatgctcaccgtctggatgatgggcattgccaccgcgctgatcggtattttgccctcctttgcctcgattggctggtgggctccggtgttgctggtgacgctgcgcgccattcagggctttgccgtcggcggcgaatggggcggcgcggcattgctgtccgtggaaagcgctccgaagaataagaaagcgttttacagcagcggcgtgcaggtgggttatggcgtgggtctgctgctctccacgggcctggtgtcgctaataagtcagctcacgacagacgagcagttcctgagctggggctggcgtattccgtttatcttcagcattgtgctggtcgtggtggccctgtggatccgtaacggcatggaagagtcggctgagtttgaacggcagcagcgcgaaaaaccggtcgcgaagaaacggctgccggtgatggaagcgctggtgcagcaccctggcgcttttctgaaaattatcgccctgcgcctgtgcgaactgctgacgatgtatatcgtcaccgcctttgccctgaactactccacgcaaaacctcggcctgccgcgggaattgttcctgaatattggcctggtggtgggcgggatcagctgcctgaccatcccctgcttcgcctggctggcggatcgctttggccgtcgacgggtgtatatcaccggggcgctgatcggcacactcagcgcctggccgttctttatggcgctggaggcacagtcggtcttctggattgtcttcttcgcgatcatgcttgcgaacatcgctcacgatatggtggtctgcgtgcagcagccaatgtttaccgagctgtttggcgcaagctaccgttacagcggcgcgggcgtgggatatcaggtggcgagcgtggtcggcggcgggtttacgccatttatcgccgccgcgctggtgacgttctcgggcggtaactggcatagcgtggcgatttatctgctggcgggttgcctgctttctgccgccaccgccctgttgatgaaggaaaccacgcacagctga

SEQ ID NO: 119826 - DNA, 966 bp, Enterobacter cloacae
atgaatgcgacagggctgaatatcatcaagacgctggggtgtatgacggcggttacctttttcaccatctacaacacctgggatcattacgattatgactatcactggatcctcggttttttaaccttcatttcgaccatcgccacgccgttattttttgtggttgcagggtatctggacgggcaatcccgacacggcacgcgctggcagctggataagatcaaaagcctggtgaacgtctttctgttctgggtaacgatttactacctgtgggagccctatcagcgcggatatctgatccaaccctggttcgtgttcgcgtttatcgtgatttacacgtttcacccggtggtggagtggctcagccagcgacgaacgctcttttgcggggtaattgccgccctgctgcttttctcatacgggtacgatttactgtcagccctctatcctgatgcccatgtcctttcattgtcgccgcagtatcgcctgtggacgtggctgctgttttatctgacggggcagctcttttgcgatccgcagatcgcggcgtggatcggccgcaaaaatgtggtcagggcagcggtgattgccataccgtttatttatctcttcacgtggttttacgagcggcacttcttttttgcgctatttaaagcagacagaaacgcctttatcctcaccggatcgcaaatctacattctgattattgccctggtgattgcggccaacggcgtgcggtttcgccgcaatgcggagtttaaagagtccgtgctggccgccattagcaaaaccatgaccggggtctatattatgcactactcggtgtttcacctgctgaccgcgctcattccggtgacgtccctgagcaccaaacttgctctgattgtgcttacgtttgttacgtcggtcctgttttcgctgctgatcctgtccaacgcagtggccaaaaaagtgatcaccctctaa

SEQ ID NO: 119827 - DNA, 432 bp, Enterobacter cloacae
atgtataaaacgattctggtgccggtggatgtatacgaaacagcattgtctgataaagcgctacagcatgcccaattcctggcgcaaagcgcatcgggtaatgtccatctgctgtacgttatgccaaagttctcggcggaactgacccgcggttttattgcagacgcgagaaagatggatgaatatatgattaataatgctaaagaaaaactggctgcgctggtaaaaaaaatcaacctgcccgaagcaaatgtccatctacatgttcgcagcgggaatatacgtgatgaggtaatcaaactggcggatgagcttaacgtcggtgcgattattgtgggatcacgtaatccaaatattcaaactcatttattaggatcagaggcggcgagtatcgttcgttacgcgcatgttcctgttttcgttattcgttaa

SEQ ID NO: 119828 - DNA, 882 bp, Enterobacter cloacae
atgaaaaaaatgaaatatcttttaccaggcgcattgataatgctccccatgattgcgtttgcggactctggtaataatgaatatctatcagactggtggcatcaaagcattaatatagtcggcagcaactctactcgctttgggccacaaaaaagatcggatctctatccagaataccgtgcgtgggcacatgtggattggtttgatttttacggctatgcggatttacctaaattttttggtttaggaaatgacaacgacattggtatttgggacaatggctcgccattctttacagaaatagagccacgttttagcatcgacaaattaacgggacttgatttgagcgttggtccatttaaagaatggtattttgctcacaactatatttatgatgcgggtactaacgaaggacagcgtcaaagtacctggtatatgggaattgggacggatattgatacgggattaccgatgactttatctgcaaacatctacgctaaataccaggggaataattataacgccgccaacgaaaacgaatgggatggatatcgctttaaattaaaatatgctattcctttaactacactgtttggcggcaagctaaattacatcggtttcaccaattttgattttggctcagacttaaaagacgaatcaggtggcgagcaatccttttactcccgtactaatgactcaatagtttctacccatatcctcagcttagtttactctcactggagctatggcgccacccttcgttatttctatcatggtgggcaatttgaagaaggcagtaaagcatataatagcaaagggcagattacccgtatagactctacggggtgggcctactatttaactgccggatacactttttaa

SEQ ID NO: 119829 - DNA, 1425 bp, Enterobacter cloacae
atgaagaaaaatataaagctgagcctgattacgttatgttggttcgcaacgttaaccgcctcagttcatgcaaaagatgtaacaatttactataccaacgatctacatgctcatgtctctcctgggaaaccacccaccgttgacaaagaacgtctggtaggaggttttgcgaatatagcgaccatcgtcaatgatgctaagaaaataagtaaagatgtttttttctttgatgcaggtgattactttaccgggccctatataagtaccttgaccaaaggcgaagccattattgatatcatgaacaccatgccctttgatgctgtgtcagtgggaaaccacgaatttgactatggcgttgataacatggttaagcagttatcaagagcacacttccccattttgttaggtaatgttttttataccaacagtgaaaagcccgtctggaataccccctggacggttgtcgaaaaagatggcatcaaaattggcgtaatcggggtacatcagaaatttgcattttatgacacgattgcagctaaggcttacgctggttcagaggcgcgtgatgaagagccttatattcaaaaagggcttgatgccttaaaaggtaaagtggatatcatcgtgctgcttattcatgaaggtacgccagcgcgccagtcaagctatggaaacaaagacgtagccagaatgctacaagctgatatcgataccgcgaagaaatttaaggatattgatgtattaatcacaggccatgcccatgtagggacgccagaaccgattaaagttaatgacactctcattgtttcaacggatgcctatggtactgacattggtaaattagtattggattttaaccctcagacgaagaaaattgagcgttacaaaggtgaattaatcactgtattttctgatgaatataaacctgatccaaaagtacagcttaaaattgatgagtggaatgccagtctgaaaaaaatcactggccaggttattggttcgacaacggcgcactttacgcgttcatatggggaatcatcacccgtcggtaatttgataattgatgccatgatggcaaaagtgccggatgccgtcgttggattacaaaacagcggagggatacgtgctgatttcccacagggaaatttaacctacggcgatgttattaccaccttcccgtttaataatgacctggttgaaatggatctttccggaaaagatctcaccgatttaatgatccatgcgactaatctcaccaatggtattttgcaagtatcaaaaagcgttcatgttgtctatgacagtacaaaaccgctgggcaaacgtctcattaaattcactgtcaataatcaacccatagatccgaccaggatatatcgggttgctacacactcattttgtgcgacaggtggcgatggattttaa

SEQ ID NO: 119830 - DNA, 1554 bp, Enterobacter cloacae
atgaagataaagttaatcgctgcgggtattctgacgacgctaccattttgggcctgcgctaaggatgtcaccatcctttataccaatgatctccatgctcatgtagaaccttataaagtgccatggattgctgacggcaaacgggatattggtggctgggcgaatatcactactctggtaaaagaggaaaaatcaaaaagtaaagcgacatggttttttgatgcaggtgactatttcactggcccttatattagtagcttaactaagggaaaagcaattattgatattatgaataccatgtcgtttgatgttgtaacgataggtaatcatgaatttgatcatggctgggataatacattattacagctaagccaggcgaaattccctgtcgtacagggcaacatattctatgagaacagcagcaaattattctgggataaaccttataccatcgtcgaaaaagatggcgtgaaaattggcgtcattggtttgcacggcgtgtttgccttcaatgataccgtctccgcggcaacgcgcgtaggcattgaagcgcgggatgaaattaagtggttacagcgctatctcgatgaactgaaaggcaaagtcgacctgaccgtattgctggtccatgaaggtacaccggcgcgtcagtccagtatgggagggaccgacgtacgacgtgcactggataaagatattcaaactgcaagccaggtgaaaggtctggatattctgattacgggacatgcgcatgtcggtacgccggaaccgattaaagttggcaatactctgatcctctcgaccgacagcggcggcattgatgtggggaaactggtactggactacacgaagccgcatcagtttacgatgaaaaattttgagcttaaaaccatttacgccgatgagtggaagcccgatccgcaaacgaaacaggttatagacggctggaataagaaactggataaagtagttcaacaaacggtggcgcagtcgccggttgagttgacgcgcgcgtatggtgaatcagccccgctgggtaatctggctgcggacgctctactggtggctgcgggtaaaaatactcagctagccttgaccaactcgggcggcattcgcaatgagatcccgtcgggcgcaattacgatgggtgacgtcatcagtacgttccccttccctaacgagctggccacaatggatcttacgggtaaacaattacgcacgttgatggaacatgccgcaagtttaagtaatggcgtcttgcaggtttcaaaaggcctggaggtgaagtatgacagcagtaaaccaatcggtcagcgggtcgtcgtatttaaccttaatggcaagccgattgaggatgcgacagtctaccacattgccactcagagcttccttgctgacggcggcgatggttttaccacctttaccgagggtaaagcgcgtaatacaacaggcggttactacgtttctaatgccgtgatcgattacttcaaagcgggcaacactattacggatgagcagctcaacggcatgcgcgttgctgatgtgaaaaagtaa

SEQ ID NO: 119831 - DNA, 1059 bp, Enterobacter cloacae
ttgcactgccgggcatgtgggagttatccccctctgtttaatgaacaacaatttaatgaatggcttttttcttgcttaagcgcctatgccttagaaaacggttatttttgccctgaatgttattgcccgaaaactatttgttatggttataacccacgggggacacagcgcgttcagtgccgcgcctgcaaaaaagtctggacacccaaacagcaaaagcaaaaaaaaatagtgtctccagaacgtattgaaactgtgtcactggttgtaccgttccaggggagaattgcagaacagaaattgtatgtcctgatcagttttgatgccatccgcggtaatattattcatctctctactaattttactgagcatcaaagtggggaaacattacgttatcactggaagggaaatatcgagcctgatttgcatcacgctgatattgtaaaacgcgttgatatgcgagagacacagtttctgcgtcggagccagttcgatgaaatacagtatggaagcgcggctctgaaatgtaacgccagaggttcgattgtgcgcccggtgatagcggctcacgggcattttcgaatactgaatctcctctttcctgaggtaaagatgcatgttatttcacacgaatgctttcttcggggagcagtcattaccgcctgggcaaatttgtttcgcctggggcaaggtgaaatgtggtttatagaagaagaaatcaacgataatgatagtgatataccctggaattttcagagaacgtcacagcatggctggtggcaaagtcagtggcagctttgggagcagggaagaaaccgtaagatggtttgcccattaacagggggggatagcagtaacgctaaaaggctctctttaacggccagcaggtgctttatcaactggctatataaacaaacgcattttagtcgcagcgcgcaactatccgcagggcgggtgacgcaaatactactttccctggcgcaagactataacgataaatttacattagcgccttcaggtatgaataatggctcaatcttttcggcgatgaagtcatga

SEQ ID NO: 119832 - DNA, 1527 bp, Enterobacter cloacae
atgacaattacttatattaaaactgaacttgcaccagccgacaaccagctcgctgcatacctttattttacctcagataccccggtaagttattcttacactgttacaaaaaggacgaccagtccaaccagcgtagattttacctatacatcggatctcatttatggtgttacgcaaaccattaaaatccctgttattggtctttatgcgcaatatgcaaacagtgtgcaggtcgtatttaaggatgacacgggtactgaagttttcaatcagccatttatcatcagtacagaagatcaggaatatgatacatctgtcatcttccacctcgatattgagcaaaccgatcctgcactatttacctctgtatggggaaacagttggttaatggaatccactggccgaggttatgaccaaaatggtgacctgcgttttaacttcttatcggtttatcatctccagccgctgcggatccacaatggctacctctataccggcagcgacgaagatatggcgtggtacggccgtcgctttttcaaaattgatatcatgggcaatgtcgtccttgaattcgacatgcgtgatgctgatggcaatcactatgcaaatactcatgatgtagtctgggactccgcgggcgacatttatatgtttggcaccgatagccctaaccgactaaccaacacgatggcgcaagatgcgctggttctgaaatttaacgatcagacagggaaaatgatttgggcgaaaaactataccagcgaatatagtggttctcaaattctgaataacaatacgcctaatgatgtccattttaactctcttacatggattgcaagcagcccaaataacgaagaagccattattgtccattctcgcacaacgagtacaacttttggtatctctatcgttgatggaagtatcttgtgggcaatcgacacaggtaatttcaaccctcagttcccggcaaaacaagcgactattcatattgataattcgggtattactcattttgaaaatggtgcccatacggtgtgcattacgaataatagtgctttttctgccagtatcgatcctaccgcaggaaaatttgtcttatcagtgttcgataaccgatcttgcgtagatgaaaatggcaaccccgttattcgtccgataaatgacgcagcgacgtcggacccctatcaaacagatccagcccgcattctgttctatgcggtcgacttagcagcaggcaccgctgttgagattcatgcgcctgttgaactcccaacgacgcctatcctccaatggaccgactttatgggaggcgtgtttgatcatggtgattatttcactatttttacctgccatgcgcgctcattctttatcagtgacgtagacggtaatatggttgcctctatctatgatgtgatttctttatctgatggcgctcctcaataccctggggaggcctaccgtgcaagattatttaatgaaacggagcttactgacgtcatcactgcggcatctatttatgcaaattaa

SEQ ID NO: 119833 - DNA, 390 bp, Enterobacter cloacae
atgataaatcatgaatttagtagaaagactgaaaagaaccttaaaggagtacataaagatctttcggaggtgatgagaaaagcattgaaattatcgcctgttgacttcggtatttctgaaggggtaagaaaccaaaaacgacagcttgagctattagcattaggaaaatcattaacgtctaaaagcaggcatttaacggggcacgccgtcgatgtattcgcggtcatcaacggtaccgtttcatgggattttaaacattatcagacaattgcaacggctgtttttcaggccgctaaggagttatcagttgatattgagtggggtggcaactggacggaaataaaggatggcgttcattttcagctatcacgaaagatgtatcctgaatag

SEQ ID NO: 119834 - DNA, 726 bp, Enterobacter cloacae
gtggagggcaataccacgctgtacgctctgccccgcgcggagatcgtcgaacgctggcgcgagcaaaccagcgacgacttccgcttttgctttaaattcccggcgaccatctcccacaacgccgcgctgcgcaactgcgatgatttaacccacgagtttttcacccggatgtcgcctctggccaaccgtattggccagtactggctccagcttcccgccacgtttggcccgcgcgacctgcctgccctctggcagtttctcgacgccctgccgcatggcttcacctacggcgtagaagtaaggcatccggaattctttgccaagggcgacgcggagaaagcgctcaatcgcggcctgcatgaacgatcggtcaaccgcgtgatcctcgacagccgccccgtacatagcgcaatcccgcacagcgaagccgttgttgatgcccagcgcaaaaaaccgaaagtgcccgtccacgcgatcgtaacggcacagaacccgatggtccggtttatcggcagcgataacatgcagcaaaatgaggagatgttcgccgtctggctgcaaacgctggcgaaatgggagcacaccaccacgccgtacctttttttacatacgccggatatcgcacaggcgcctgaactggtcgatgctctctggcaggccttgcagcaggcggttccgtcggttggccccgcgccgtccatcccacaacaatcttctcttttctga

SEQ ID NO: 119835 - DNA, 1314 bp, Enterobacter cloacae
atggatagagttacatatccaacaggcgtcgaaaaccacggtggcacattgcgcatctggtttaatttcaaaggtaagcgtgtcagggagagcctcggtgtccctgacaccgctaagaacaggaagatcgccggggaactgcggacatcggtatgttttgccatcagaacaggcacatttgagtacgcggcacagtttccggactcccctaacctcaagacttttggggtggggaagaaagaaattacagtgtcagagcttgccgaaaagtggctggatctgaagagaatggaaatctgcgcgaacgcactcaaccgttatgagtcggtcacaaggaatatggtgccaaggatcgggggtaatcggctggtgtcggcggtgacgaaagaggaattactgtatatcaggaaagatttactgaccggtcaccagatgccaatgaaggggaaggtcccggcaaagggaagaagtgttgtcaccgtaaattattacatgacaactattgccggaatgtttcagtttgccgcagatcacggttacttagaggcgaacccattcgacgggatcaagcctctcaaaaaagccagggcagagccagatccgctaactcgtgacgaatttattcgcctgattgatgcatgccggcatcagcagacgaaaaacctgtggtcactagcagtatacacaggggtccgtcatggggagctgacctccctggcctgggaggatatcgatcttgaagctggaacaataacaatcaggcgcaattatacaaaactgggtgaattcactctaccgaaaactgaggccagtaccaacagagtgatacacctcattcagcctgcgatcagcgtcctgaggaatcaggcggaaatgaccaggtttggaaaaaagcatcaaatcgatgttcagctgcgcgaatacggcagaactgagagccacgagtgtacatttgttttcaaccctcaactggtcagaagatgtcagcaggtggggatcatctacaaagtcgactcgataggtgatttatgggacgcagcgatgaagcgagcagggataaggcacaggaaagcatatcagtcgcgtcacacgtatgcatgctggtcactgtcagctggcgctaaccccagcttcattgccagtcagatgggccatgcgagcgcccagatggtcttcaacgtatacggtgcgtggatggcagacagcagtagtgagcagatcgcaatgctgaatcagaggctcgcggattttgccccacagatgccccaaagcatacctagcggcaccagagcattattgaaatcagtaagttag

SEQ ID NO: 119836 - DNA, 237 bp, Enterobacter cloacae
atgagcgacgttgttcttctggtaccgaatgactgggttagcgaaaaggttctgattgcggttaccgggctcaagcccggaaccatcctccgggccagaaaagaatgctggatggttgggcgggaatatgtgcacgtttcaccggacggaaatccgaaaccttccagcgagtgcatgtacaaccgtaaagcggtcgatgcgtgggtggcctcaatgaaaaacaaacagcctgggtga

SEQ ID NO: 119837 - DNA, 147 bp, Enterobacter cloacae
atgaatacagcttttgaaatatgggttcgtaagcgatacggaaaccgctacgacctgacacgggatattcaggggctttattgccgggaagtggttaagcggatgtttgaagtgtggtgccactgctgtggcctggatgtagtgtga

SEQ ID NO: 119838 - DNA, 414 bp, Enterobacter cloacae
atgaacgataaacgcaccgtaagcatgattgacctggcattacagaaacatggtacgccagttggcccactgtacgtggcggtacgccacagacgtatcaaaaaatgcttcacgcgagatacggcgatccgctatctggctttcttcatgaccaccgaggcttttgagcgttctggttttccgcagcgtcacccgagggtgcgtattgatcgcgatgatatggaggtatggcgagatggggaaacaaaagcggagtatctggccgcccaccagcgttgtgttcgccgtctgcgtcgtatcctggcgcgcaagcgagaaatggagaaatggtgtgcaaaatgggacgcgatgcacgagcgctacgtcaaagaacgtgacgaactcaaagcaacaaagcctgccggggtacgctga

SEQ ID NO: 119839 - DNA, 255 bp, Enterobacter cloacae
atgaataaccagcaaacaatgctctttcagggcatgcagattccccgccccgtgttgaacgtggatctgaatgtcctccctgattttaccgggcgggtagttctgcacatcgagaacgggagggtgatatgcgaccgccggctgctcgacgacgagcacatttgctcactggccacgtttatcgaaatggcgcgcgaaatggagctgagatttgaggaggtagctggtggcactgacagcgatacgaattcctga

SEQ ID NO: 119840 - DNA, 369 bp, Enterobacter cloacae
gtgaaaaacaacgtaattgaaacctaccgacgccgaattttaaaggcagcgttattacgccaccaacgtaaaacaggcagtaactgccttgttattaagctcaataaaggcggtattaatacggtcgagttaacagagattcttctcgatggattattgcgaaaattcgaaaggcttgcgattagtgagtatgggaatgtcgaaggcgtaaaagctattaagggaatttacagcagctctgttgatgttaatggcagcggtgaattcctcacagatagcggaaaggaattaatcgacgagctcatttctgagctggttgagttcgtcaaaaagcagaaaccagttaccccggaggccagccatgaataa

SEQ ID NO: 119841 - DNA, 204 bp, Enterobacter cloacae
atgctcagtaaagacagctctctagaaaccgcaaaaaacacagcagataacctgtatcaattaatggaattaattaactccaatattattgatatggatatcgagcaaataatttctctgtctggcctctgccttgacttgtcggctcaggtttcaatgtggatggattcggagtttgaacgtcgtgaaaaacaacgtaattga

SEQ ID NO: 119842 - DNA, 423 bp, Enterobacter cloacae
atgaaaaatccaatcgaaatgctaaatgatattgctgcggaaatcactgagaatgcttcgttactggaggttatttaccgcataaatgaattttcaccggaagccgataacacaattgcctgcctgattcgttctatgctaaagaccagccaaactgcttacgagtatgtggagcaacttagcatccatgctggagctgaatgtcaacggggacaaaaattagagtcgctaacagcgctagctaatcaacttaactcttgggcttgtgatatcggcgattgtaagcttgccgtttataattcaatggatgatataccaacagaatcaaactcaattggggttttaagtctcgtctcccaaaaactggatgaaatgcagagcattattagctctaaagcggacaagatcgaattcaataagtaa

SEQ ID NO: 119843 - DNA, 201 bp, Enterobacter cloacae
atgtctcagaagataaaaacatttaaggggttgtccatccatccttgtgatgccttcaagaatatgtccttgattgttgaagcagctagtttgttatcggcggttgatgatgacgagtatagagaaattagcgacattcttctcgcgtttgtctgcaactatgcaaacgaggcccataaaaatgaatgggataaacgataa

SEQ ID NO: 119844 - DNA, 708 bp, Enterobacter cloacae
atgcaagagagaacacttaagacgctagctgacagacttaactacgcaatgcatgagatgggcatgagccagggtcagttagccaaagcggcgaatatggcacaaccaaccatatggcgaataacatctggaaatgctagaggcacaactaaaatcgttgaaatagctaatgccctgggtgttcgttcggagtggctatcaaacggtactggaccaatgaggggtgacgaccaacaaccacccccaccgatgaataacaaaaaagatccagccatcttcagagttgacgtactcgaccttaccgtaagtgctggcccgggcataattaacagcgaattcgtggaggtgctgcgctccgtggaatactcagttgaagatgcccgtcaaatgtttaatggccggaaacaggagcagatacgcatcatcaacgttcgaggtgatagcatgtctggcaccatagagccaggggacttactcttcgtcgatatcagcgttcagcatttcgacggcgacggtatatacgcgttcatctacgatgacacatcgcatgttaagcgcttacaaaagatgaaagacaaactcttagttatctctgacaaccatacctatctaccatgggacccaatcgagaaggaagagatgaacaaaattttcatcttcggaaaggtgatcggcagcatgccgcagacctacaggaagcatgggtga

SEQ ID NO: 119845 - DNA, 198 bp, Enterobacter cloacae
atgtcgcactcgatcactaccgaaaaccaagttaagccattggatatcgattatcgcgatccgcgcggtgtgattgtgcatgtcaccggctggaatcgggataaacagcaggtgtacttcaccaggcagaattatccgcatgaatgcatgcagcctgtctggaagtttcaaaattatttcaggagggttgtggagtga

SEQ ID NO: 119846 - DNA, 933 bp, Enterobacter cloacae
gtgagcaatttcttacagctcgttgatcgtccaatagcctttcaacggtccttcgttcgccttggcgtgggtattacaggtgcattgctattgtcacagattgtctattggcagaaccgcatggaagggaattggttctacaaaacccagacagatctcgaagaagagactggattaacgcgttacgaacaagagggagcgcgtaaaaagctggtttcctgtggcgtactggaagaagcaaaacgtggcatcccagcaaaattatatttcagagtaaaccaggagcgcttggaagaacttctacttggcgaaaaccagcatgcaggtatggggaaaaccaacaaacaaggatgcggaatttccgcaaacagtgatgcggaaaaccagcatgcaggtatggggaaaaccaacgagcagtcatgtggaaattccgcatccattcatacagtagattaccaggagactacacagaagattaatacagagaataaatatcttggtgcatcggctgaagccgacacaccgaaagtgaaatcttcaactgattattctcctgcatttgaagaagcctggcaggcatacccaaaacgtagcggtggaaataacaagctaagcgcattcaaagcctggaacgcacgtattaaacagggcgtaaaaccagagacgatgctggaaggggttaagcgctacgcagctttcatggcctctgagggaaagatcggtacttcgttcgtcaagcaggcggcgacgttcttcgggccggataaacatttcgatgaaccgtggctggtagagacccaggaaaacaaagtccctacccgacaagaccagtctcgctacgagtggtacgcaaagtctgatgacggctctgccgaggtgtttatcaatcagtcagcgatcgatcgcatgaaccgtggcgggtatcgcccatga

SEQ ID NO: 119847 - DNA, 1872 bp, Enterobacter cloacae
atgagcccagctgaactatcagaaaaactatgggataacgctgaacgcgtcgctaagtttctccttccgaaaggacatctggaggggaaggagtggtgtgctggcaatacgaacggtgactcaggcaaaagcctcaaggtcaatatcggcggtaaaaaatcatgggctgactttgccagcggtgacagcggtgacctgctggatctctgggtgttggttcgtaactgccagctgcatgatgcaatgcgagaggcgaaagagtttcttggcctgaaagatgacgaccaccacttcgaagcgaagaaaaaactgttctctcgtccgacgaaaaagggcgttaaatcggccagcaaatgctatgactaccttgcttcacgtggaattacccgtgaaacagccgatcgctttaaggtaacagacgcggtggtctggtatcacgacgaaagccgcgaggtaccagcagtggcattcccgtacatccggaatggtgaactgctacaggtaaaacgtattggaaccgaaaggccaaacggcaaaaaactgattatggctgaagctgattgcgaaccatgtctgtttggctggcaggctctggataaaaacacccgcctggtagttctgtgcgaaggtgagattgattgcatgacctttacgcagcttggctatgatgccctgtctgttccctttggcggtggcaaaggggccaaacagcagtggattgaatatgaataccataacctcgatcgcttccaggaaatttggctgtgcctggacaacgacaatgtaggccgtgaagctgcaaaagaaatcgccagacgtcttggggaacatcgttgccgcatggttgaacttccccacaaagatatcaacgattgcctgatgaacggcatggacagcgactccattctggaatacatggagcgcgccaaattcttcgatcccgatgagctttgctcagcaggggacttgcttcaggaaactatcgaggcattcgaacatcgggataccggtctgtttacaagcccatgggcttcgctgaacaacaactttaagttccgtgccggtgaactgaccctcgttaatggcgttaatgggcatggaaaaacagagctcgttggacatatcgcgattgatgcgatgagtcagggcgtcaggacgtgtattgcttctctggagcttaaaccaggcaaaatgcttgcccgactcacgcggcaaaccatctgcacttcctcaccgaaacgtgaagaaatcattatgaccaacgaatggttttctgaccgcctttgggtattcaaacttaccggaactgccaaagcagaccggcttcttgagatttttgcctatgcccggcgtcgctatggcattgagctgttcatcatagataacctggctaaatgtggcttagacgaagaagactacacaggtcagaaggacttcatcgatacgctgtgcgacttcaagaacgagcataactgtcacgtcctgctggttacccacgccagaaaaacaaacgactccgctccaacaggaaagatggacgtaaaaggcactggcgccttaaccgacatgcccgacaacgttatggccgtctggcgcaacattccccgtgagctggcgcagagaaaagcggatcgtatgggttatgagagcctcgacaaagacgaacaggccgcgatcaatctccccgcttcaatgattcgtttgttgaagcaacgagaaggggaagggtggatcggtgacatcggagctaatttcgactctcgctctcaccagttcctggaaggcgagaaaaaaccatttaactacctggtcggtaagccgcaaagcgagcttgatctcgagtgggaagccagcaacgtaacgagggtttga

SEQ ID NO: 119848 - DNA, 783 bp, Enterobacter cloacae
atggaacttgaagcatcactaaaacactttagccctcagggaatgcagatcagcgacgacgtgaagggaacttctccggaccgccttacaggaacagacgtaatggcggcgattggtaccaccagcagccgtgcgcgcttcggcctggcggcgttcttcggtaaagcgggaatcagcaaaacggatgaacagctcgcagttcaggcgctggcgcaggttgctatcaaaaacgctcctaaaaatgtccgcaaagccgctggcgacaagctcggagcatgcatgttgacgctggcgcagtttgcctttgctgattactcccgttcggcggctaccagcgtgacatgtcacagttgcagcggtaccggttttatctccgggaatgaggatgtggttaaacatcctggtatcttcgacgatgacggtgccgaagtggtggccccgaagattaaaaatgagctggtgaaaagggtttgcgaaacctgcggagggaaaaaggtaatccttgcgcggtgcagatgcggcggtaaaggtgaagtgctggatcgcaaagcgaccaaagaacgtggcgcaccggttttcaaaacgtgtgaacgttgctctggtaatggcttctctgctatctcctcggcgacggtacaccgtgccattctgaagcgtctcccggacctccatcagtcctcatggtcacgcaactggaaacccttttatgaaatgctggtggacaccctgcgccagtgggagcgtcacgcggcagtagaatttgagaaggcaacaacttattaa

SEQ ID NO: 119849 - DNA, 486 bp, Enterobacter cloacae
atgagcatcacccaagaacggctgaaagaggttctgaagtacgaccctttgactggtttatttgtttggatcaagcgaacaaactcacggtctacgcctggcaaaatagccgggaacgcagatacgtacggctatatccagataatgatcgataagaaattaattttcgctcatcggttggcttttttgtatatggacggtgcgctgccgccggctgataagtgtgtcgatcatatcaatggcaatcccaaagataaccgatgggacaacttacgtatcgttacccagtttgttaatcaacagaacagacacaaagttcgaaaaggggcgaagtccaagctgattggagcaaactggtgcaaagctcgcggcgtatggcgttccgctattcgcatcaacgggcaacgtaaagagctcggtagtttccaaactgcggagttggctcacgaggcttacatgaaagctaaagctgaaatgtgtcgttaa

SEQ ID NO: 119850 - DNA, 426 bp, Enterobacter cloacae
atgttcggtatctttaaaaagaaagcacgtaaagctgttgtcgaagttaagaaaatggaaaaccgcgacgcggttgaagctacggtgtggggtgcttactccattgcgtatgccgacggcacatgcgacgcgaaagaaatcgccactctggaaaaaactatttcagcattgcctgctttcgcaccgttcgctggtgagatcgcacagatgagtagcaatatccgtgctcgctatgaagcttcgccgcgctctgctaatgcacaggcgctgcgcgaactggctgacgttgccggcacaaacgatgctgttgatgttctttgcctgtgccttgatgtcgctgacaacgacggcatcggggaagaagaagagaagcagctcaagaaaattgctcaggcgctgcaacttccactggatcagtacctgtga

SEQ ID NO: 119851 - DNA, 156 bp, Enterobacter cloacae
gtgatcggaaaactgcgctgggtagccgccggggtattgatgttcctggtggttgccatcgacttcaccagcaaaatgatgtccattcttgctgatggcgtgctggtagccggggtaattgctttactctggcccctgtttaaatccagtaaataa

SEQ ID NO: 119852 - DNA, 390 bp, Enterobacter cloacae
atgtccgatccattaaccggcaccggcgctgttctcggcggcggcctgctgggttcagtcctgtacggcgtctttactcatacagattttggtgtggtgttcggggcgtttggtggtgcggtgttctacgtcgcgacagccacaaacctgtcccgcgcccgactggcagcatatttcctgacgtcgtttatcgttggggtgcttggggcgggacttattggctcactgctaaatgcagcttcgcactatgaaaaaccgctggatgcactgggtgcagtgattctgtctgccctgtgtataaaaatcctcacttatcttaacaaccaggacctgaacaacgtgttcaagtttttctcgcggctacgtgggggagggggaaatggtaattga

SEQ ID NO: 119853 - DNA, 279 bp, Enterobacter cloacae
atggtaattgacccgtcagcagtctttaatgcgtttatttgtgcggccatcgtcatcgtgctgatgttttaccagcgacatggcgcccggcatcgcccctttatttctgtcctggcgtatataaccgtgctggtttacgccgcgatccccttgcagttcatcttcggcctttatcgtgattccagctggctggtggtggtcgcaaacattcttatcttcgccgccatcctgaaggttcgtggaaatatggcgcggctggttgatcgtctgaggcactaa

SEQ ID NO: 119854 - DNA, 630 bp, Enterobacter cloacae
atgaaccaaacacaatttcagagggcggctggtatcagcgccgggttagctgcgcgctggtttccacatatcgacgccgctatgaaggaatacggcatcaccgcaccgctcgatcaggccatgtttattgcccagatggggcatgaaagcaccagatttgcccgactagtggagaacctgaattacgcggttgaaaacctggtaccgacgttcggtagccaccgcatcacgcaacagcaggcagcagctcttggcagaacagcaacgcaaccggcaaaccagaaagcgatcgccaatctggtatacggcggtgagtggggaaaagaacacctgggcaatcaggttgccggtgatggctggaaatatcgcggtcgtgggctgaaacagattaccggcctgagcaactatcgcagttgtggccaggcgttgaaactggaccttgttacccacccggagctgcttgaacaggatgaatacgccgcgcgctcagctgcatggttctttgcctcccgcggttgcctgcttcattccggcgacgtggagcgcgtgacactattaatcaatggcggccgtaacgggctggataaacgccgcgcgctgtttaacctggcgaaatcagttctgttgtga

SEQ ID NO: 119855 - DNA, 276 bp, Enterobacter cloacae
gtggggatcgaaacgataatcgggctggccgcactggttatttccgctattgccggcgcttttggcctgggccatattcgcggcaccagcaaagcggaagcgaaagccgaccagcagcgcactgaagataacgcagcggcgagcgttgcggtggcagaacgtaaagctgaagtgactaaagaggccagtaatgtccagcagactgttaatcacatgcctgatgacgatgttgatcgcgagctgcgcgaaaacttcacccgccccggtggtggttga

SEQ ID NO: 119856 - DNA, 606 bp, Enterobacter cloacae
atgtctagagaaggttcgttggacctattgcaagaagttgaagaaaatcttgatatcatgaaacaaacacagaacatcaagtctgtaaaagtcaaagccatcctggaaaacttgcgaagttccttagagtatctcgcgaatgacacctacgataaatataatgaaactagtcctgcggacaaacgcccaaatatatacttcccttacgtaaaaaaaacctttgttgataatttttttatcaaaattttaaaagtaaacccgccatattcatctccgctatacaaagtatttacttccatacaggactaccacactggtgagaaatggctggaaatgatgtgtaaccttacaaatgaagttaaacacagacaaccaattcctttaagagaagataattccgttaaagatatcagtatcagcgtggatggttttggtttaattaaagcaggaagtactgcaaacatccttctacaaaacaattacgttaatgggaagaaactagaagatttcacttttaaaaatggaaatttgcaaagaagtggcaatggaatcccattaaacatagtaattaccgaagagaaaaaaaataagatttcatggaaatga

SEQ ID NO: 119857 - DNA, 1458 bp, Enterobacter cloacae
atgcaagttactattgatggtgtcccgtatgcacccgcctgcgcaattgtatcgcggatcggcattgcgattacaacccacaaccgggcggacgttttaaagcgtgctattgagcagcaccagaagcatctgccagctggtgcgctggtggtggtggtcgatgatggttcaaaacctgcggcggtagttccccacggcgtgcagctgcttcgccatgaaacatcactcggcattgttgcttcgaagaacgccagtttaaccgcgctgatggacgccgggtgtgagcatatctttttatgggatgatgatgcttatccgatcgccgataactggcacctgccatacatcgaatcacccgaaccgcaccttgcttaccagtttctcgatctggcagggacgaataagctgaaggatatggcggtcctgtaccgggatgataagcacatcgcttacaccgggcagcgtggcgtgatgctgtattaccaccgcagcgctatcgagaaggttggtggtttcgatccggtatacggtcgcggcatgtacgaacacagtgacctcgcgctacgtatccataacgctggcctgacgacgtgggcttacggtgatgtggtcggttcagaaaagctaatccattctctcgatgagcatgaagccgtagagcgttcggtaccgcgccccgaccgacaggcgctggtggaacgtaacgtgaagatccacaacgaacggcgtgattccgggtttactggttacgttgaataccgtcagcagcgcgatgtagttatcacaacgctgcttaccagtcagcctgacccgcagcgcggcacaaaaatggcggcctcgcctgacatgctggctaactgggcctcatcacttcggaattgtggccgcatagcgctggtagatgaattactgacggccccggcaggtgttgagctttatcgcgttcctgacgtgaagatgaatgtctactttcgtcgctggttgcacatctggcagcacttgcgagatcaccctgaataccggttcgtctggtgtaccgatggtaccgatgtcgaaatgcttcgcgcgccgtgggaagaaatggaggcagggaaggtgtacgtcggttctgaaccaaagacctacgtcgattcctgggcaaagcagaatcatccggagcgcgtctatcatgagttcattgaagagcaccgcaacgatgtgatgcttaacgctgggctgctgggtggtacccgcgccgatgtaatggcgtttgctcacggcatcatccgtctttactaccggatcgagagctatcgtttctggaagaaagaacaggctggcgccgcggtgggggacatgctggcgttcggtattgtcgctcattcattcgcaggaaaggtgattaccggacctcaggtgcacaccgtttttaaaactgatgggatcggaaaagataatgcctggtggaaacataaatag

SEQ ID NO: 119858 - DNA, 210 bp, Enterobacter cloacae
gtgaaagttgaaataaaaaatggcggtgaggttatttgggctagagattcaaattcgttagagggaattgcttctctggggcacttaaaggacggcacacagcaaaaaataattaccgcccttgaggaggctcttagtcaggctaagggcgaattgctatgctctgatgacgctgattccgtggcgaacattagcacttccgccgcctaa

SEQ ID NO: 119859 - DNA, 264 bp, Enterobacter cloacae
atgtcttttttgcacaaaagaatgcatctgaatcaaggtgataccgttgttgtagattgctcacatcaatgcaacatcatgattctcactgatagtaatttcaataattacagaagtggcaatcgctttgagtaccatggcggtttttataaaatgctccctgctaggattactgcgccgcatagcggggaatggaatgttgtactggatttaggcggcggaagtgctaatgttcgccacggaatcagcgtcatcagagcatag

SEQ ID NO: 119860 - DNA, 588 bp, Enterobacter cloacae
gtggctgaagaagttaagtttgttgtggttggtcaccacacccggacgggacaagcacaacgtcttgctgcgctgctggatgctcatctgctgattgatgacggtaaccacggcgcgaactggaatcatcgccgcgtgcttgagtgggcagcagaacaaacctgccgggtagttgttgttgaagatgacgcgctgccggtacatggattcaccgaaaaggtaactgactggctggctcgttttcctgacgacatgctgagcttttatctcggtaccgggcggcctccacagtatcaaatgcagattgctgagcggctaaccgtggctgataagacacgcgctgattacatcacgctgtcgagactcattcatggcgtttgctatagcgtcccgcctgagcatgtgcatcgcgtgctatcccgttgggataacagcaaacccgccgattacgctgtgggtgatgcatggggtggctcagtgatctatccgtgttattcgctggtggatcatgcggatggtgtgcctgttgagcgtcaccctgattcagcgcaacgaacagaacgccgtcgagcgtggcgaatcgcctga

SEQ ID NO: 119861 - DNA, 291 bp, Enterobacter cloacae
atgtcatttgaatctttcgaccgctgtcttcgccctgtggcaaggcttgcagaggctttcgaggttggacaggtcatcggtccccccatttgctttggcggtaatgtggtccaccgcctcagcaggtgtataccttccatttcgcaggcattcctgacagaggtgtttatctctgtcgagaacgattgggcgcagcctgtcccacttactgccatagccgcgctgatgtcggctctgtccccgctgatgctgctgccagccttcgttaaggtgcctgggacaatagcctga

SEQ ID NO: 119862 - DNA, 474 bp, Enterobacter cloacae
atgtctggaccaccgaaaaccccgacccatctacgtttggtgaggggtaacccatctaaacgcccgatcaatgagaacgaaccaaaacccccttcaggggtacccccaacgccgaagcatttcgacaagcaggggaaatactggtttaaacggatggccgacgagcttgatgctatcggtgtgatgtctcagctggacgccagagcccttgagctgctggttgaggcctataccgaataccggcatcactgcgacacgcttgaagttgagggctacacctaccggaccgaaacgcagagcggggatgtgctgatcaaggctcaccccgccgccatgatgaaagctgatgcctggaaacgtctgcgtgccatgcttggtgagttcggcatgacgccagccagccgatcgaaagtgaatgcaaaaggtcctgaagcggttgatccgctggccgagtttatgaaagcgagggattaa

SEQ ID NO: 119863 - DNA, 1737 bp, Enterobacter cloacae
atggctaaggttgcagaaggcatccgctacgccgagagggtagtggcgggggaaattattgcctgtgagtatgtgcgccttgcctgtcagcgttttcttgacgatctggcacacggcgaagagcgcggtattttcttcagtgaaccgcgcgcgcagcacattctgaatttctataattttgtacctcacgtaaaaggcgcactggcagggcagcctattgagctgatggactggcacgttttcatcctgattaatatttttggtttcgtgatcccgctggttaacgaggaaacgggagaaaccgttttgcgtaacgacggcagcggtcgtccagtaatggttcggcgcttccgtacagcagatgttgaggtggcccgtaaaaatgccaaatcaacgctttgctccggcgtggggctttatatggctggtgccgacggcgagggcggtgcggaggtttattccgctgcaaccacccgtgaccaggcacgaattgtttttgaagatgcgaagaatatggtcaagaaggcgaaagccactcttgggcggatcttcgaattcaacaagctcgctatctaccaggagcaaacggcctccaaattcgagcctttatcatcagatgcgaacaacctcgacggcctgaacatccactgtgccatcgtcgacgagctgcatgctcacaaaacccgtgacgtctgggacgttctggagacggcaaccggcgcacgtctacaatcgctgcttttcggtatcaccaccgccggtttcaacaaagaaggcatctgctacgaattgcgtgattacgccatcaaggtgctgcgtgggctggtaaaagacgatacgttttttgccatcatctacaccttagatgaaggtgacgatccctttgatgaaaaagtctggcagaaggcgaatccggggctgggtatctgtaagcgctgggatgacctgcgccgcctggctaaaaaggcgaaagagcaggtttcggccagaattaacttttttaccaagcacatgaatatctgggttaccgctgagtcagcctggatggacatgatgaaatgggagaaatgcgagtttatcgccccgcagcacgaacttaaaacctatccctcctgggtgggcgttgacctgtcaaacaaaattgatatctgtgcggccgctaaagtctggcgcgcgccagatggccacgttcatgcggatttcaaattctggctaccggaaggacgccttgagaaatgttcacgccagatggcagagctctatcgtaagtgggccgggatggacaagctgatccttaccgacggggatgtaatcgaccatgctcagattaaggaagagctacagctgtgggtagctggcgagagcctgaaagaaattggcttcgacccgtggagtgcgacgcagttcagccttgcgctggcagaagaagggttgccgctggtggaagtgccgcagacggttcgcaatttctcagaggcgatgaaagaggtcgaagcgctggtatacggtggccgcttccatcacagcgatcacccggtgatgaactggatgatgtccaacgtaaccgtcaaaccggaccggaacgagaacatattcccgaataagtccacaccagaggccaaaattgacggccctgcggccttgttcacagcaatgagccgcgttctggttaacggtggaaacgaccagcaggatctctccggattcttcaataatcccatcatggtaggtttctga

SEQ ID NO: 119864 - DNA, 1305 bp, Enterobacter cloacae
atgaaaaaaaacaaacggccaggcagggttaaaagtgctctgcttaactggcttggtgtgcctatcagcctgactaccggcacattctgggaggaatggtttggtaccagcagcagcggaaaggtggtaacggccgataaagccatccagctatcggctgtgtgggcatgtgtaagactgttaagcgagtctatttcaacccttccgctgaaaatatacgttcgacagcctgacggttcgcgtaaagcggcaaccgatcatacggcctattcgatactgtgccgccgacccaattcagaaatgacaccatcacgctttatgttgatggtggtcgccagtatttgcctgcgcgggaacgccttcattgagaagaaattcatcgcaaaccgcctggtttcgctggtgcctttgctgccgcagaacatggtggttaaacgtctcacgaccggggcgctggaatacaaatacactgaaaacggtaacgagcgcgtcattcccgtcaaaaacatcatgcacattcgcgggttcggtcttgacggtgtttgcggcatgatgccgatgaaaacaggccgggatgtgatcggttctgcaatggcggttgaagagtccgcggcgaagatattcgaacagggcctgcaaagttcagggtttctctcttctgataaagctctggatgatactcaacgtgaaaaacttcgcggttacatggcggcgtttacaggctcaaaaaacgccgggaaaatcatggtgcttgagggaggcttgacgtaccagggcgtaaccatgaacccggaagatgctcagatgctcgaaagccgcgcctttagcattgaggagatctgccgctggtttcgcgttccgcctttcatggtcggtcacaccacgaagcaaagtagctgggcatccagtctggagggcatgaacctccagttcctgacgcacaccctgcgccccctgctggtgaacatagagcaggaaataggaaggtgcctgctggacagcgatgatgaggtgttcgcggagttctctgtagaaggactgctgcgggccgacagcgcgggccgtgctgcgtactataccagcgcgctccagaatgggtggatgtcccgcaatgacgtgcgccgtcttgagaatatgccaccgattgaagggggtgacatttacaccgttcagctcaacctgacgcaactgaaaaatctcgaaagcagcaatcctgctgtgcaggctctggccctgagagaactgcataaccacatattccctgacatttcctttgaacaatctccgctgaaacaggccgcttag

SEQ ID NO: 119865 - DNA, 849 bp, Enterobacter cloacae
atgagcaaaaaacaacttccggcagcaccggcgggtcgcccctgcgcgcgggtcacctgtgaaactttaccctccgccctggatcgctgggatggcgggatcaaagctgcggccaccgacgacaacagtatttctgtttttgatgtgatcggacaggactactggggtgaaggcgtaacagccaaacgtatcgccggtgcgctacgggcgatgaatggcgccgacgtcacggtcaatatcaactcccctggtggtgacatgttcgaaggcctggcaatctacaaccttctgcgtgaatacgaaggccgtgtgacggtgaaggtgctcggaattgccgccagtgccgcctcagtcattgcgatggccggggatgatattcagatcggtcgtggtgcatttctgatgatccacaactgctgggtctatgcgatgggtaaccgccatgactttgcggaactggcacagtctctggagccattcgataacgctatggcagacatctacgcggcgcgttccggccttgatatggcagctgttcagaaactgatggatgccgagagttatatcggtggcagtgacgctgtggcgaagggactggcagacagcctgctttctgctgatgcggtcagtgatggcgatgaatcacccgcggccgcgcttcgcaaacttgatgcgctgctggctaaaaccaacaccccgcgctctgagcgcagaaaactcattaaagccttatccggtggcatgcctggcgctgtcaccaccaacgacggtacgccgggcgctgccgaagatatcaaacctgaaaccctcaattcacttgaaagcgctcttgcggcgttagtcaaataa

SEQ ID NO: 119866 - DNA, 1212 bp, Enterobacter cloacae
atgtctgaagtaaacgaaattctgaaaaaagtcactgccagcattgaagaggcaaccggcaaattcaacgcgaaagcagaagacgcactcaaagaggcgcagaagtcaggcaggctgtcagaagaaacaaaagctgccgttgataaaatggcttctgagttcaacgcgctgcgtgaagctgaaaaaaccctgaaggccgcaatgggcgaactggagcaacatgttgcccagatgccgctggcaaacgcaaaacaggttatcgagtccgttggccaccaggtgatctccgctgaagccctgaaaacctttgcttccagcgtggaaggcggtaagcgcatcagcatcccggtcaaggccgccctgacttcggtggatgtgcctgatggtgtcgtggagccacagcgcctgccgggtattgatacggcaccgaagcagcgcctgttcatccgcgatctgattgctccaggccgtacgtcctcctcagctattttctgggtgcagcagacaggctttaccaataacgcgaaagtggttcctgaaaatacgcagaaaccatacagcgaaattgagttcacgccgaaaatcactggcgtcagcaccatcgcccacctgttcaaagcctcaaagcagatcctggatgacttcgcacagttgcagtccaccgttgatgccgaaatgcgctacggactgaagtatgcagaagagcaggaaattctcttcggtgatggtaccggcgttcatttgcacggcatcgttcctcaggcgtcagctttcaatccggcgttcactgtcgaacagcagagcgggattgacgatctgcgtctggcaatgttgcaggcacagctggcacgcttcccggcgtctggtcatgttcttcacttcattgactgggcgcggatcgagctgaccaaagacagcctgggtcgttacattctggcgaaccctgcggcgctgactggtccgactctgtggggcctgccggttgttgcaacggaagcggcagccttccagggtaaattcctgaccggtgcatttaacgctggcgcgcaaatcttcgatcgcgaagatgcgaacgtagttatctccacggagaacgccgacgacttcgagaagaacatgatcaccatccgttgcgaagaacgtcttgcgctggctgtgaaacgccctgaggcgttcgtgtacggttcattcagcaccggcgcgggtagctga

SEQ ID NO: 119867 - DNA, 327 bp, Enterobacter cloacae
atgcttgatcagaatgtggtgaaacagcattgccgcattgataccgactttacgggtgatgatgctctgctggagatttacacaggtgcggcggcccggtacgtccagacatggacacgccgaacgctctatgaaaaggaaagcagccctggctacgctgacgacccggacccgatactgctcaatgatgatgttaaggcagccatgctactgcttatcggtcactggtatgcaaacagggaatcggtagttataggtgaaaccgtgtctcaggttccattagctgtggaggctcttcttcagccttacaggatatatggcctatga

SEQ ID NO: 119868 - DNA, 390 bp, Enterobacter cloacae
atgatagaacaggcaattaaaatctcgcttgagcgtctttccgggatgactgtttatcctcttcttctaccagacagcgagcaaaacggtattacattccagcggatatcagacccggaagttgaaacgggaatggtacgaacagggcttattgctggtcgttttcaaatctcaatatacaaagtggatgattataccgggctggtgaaactggataaggctatctggtctcaatggaaaagtattgtccacggagagcttgaaggttatcccgttcagtacatccagcgtgggaatatacttcaggacaaaacaacccttaccagcaatcaggttcagtacaggcttacccgagatttcgtgctttatttttatgaggaatcatcatga

SEQ ID NO: 119869 - DNA, 405 bp, Enterobacter cloacae
atgattcgcatggaagttaaagggcttcaggaattcgaacgccaattactttcccttggtgaaaaggttggtacgcaggttttacgggaggccgggaaagctgcacttgagcccgttctggaggatatgaaagcgcatgctggttacgacgaatcagcgaaagatgagcacatgcgcgattcaattaaaatccgctcatcctcttcgaaagcaaagggcaatgcagttgtttatcttcgcgttggcccgagtaaaaaacacttcatcaaagcgttggctcaggagatgggaaccgtaaagcaagtcgcaagtcccttcattcgtccggcgctcgattatcagaaagcgaaagttctgcgcatccttgcgatagaaatacgcgaccgaattgaaaaccaccggtag

SEQ ID NO: 119870 - DNA, 423 bp, Enterobacter cloacae
atgctgcctgctggcaccgtcgttatgtggggtgctgcgggcagcgacgtagcaacaatgaaaccactcattaactgtaaagcgctgggcgctacaggacagacgggcagctttgtagactgcactacgctgatcgataccagtaaacagtttatctctgacctgcctgaaggccctgaaaaatcgctgggctttattgacgatccagccaaccaggactttgctgatttcctcaacgcagcagagaaccgggaaaccgtacagttttacgttgagctgccaaatggtcgaacggcgaacatgattctggccctttctggctggcagatgaatgaaattaccgccccggcaagtgaagtcattcaaatcactgttcagggaaaacagaacaatattacttggggtacggctgccggcagctga

SEQ ID NO: 119871 - DNA, 363 bp, Enterobacter cloacae
atgtctaccatcgatgtttctgcacttaaatccgcacttctgaagcctaaaagcgccgttgttaccgccgaaatttttggaaccaccgtttatctacgccgtatgacggcgggagaactcatcgatcatgaagaagcgctgcgagacagtcagattgcagaagatgcacgtaaagcttcagagatcagtgtgcagttgatcgtcgattgtcttgtccatcccgatggcagcctaatcgcagctaaagacaagcctaccgcagccgagctactccagactcatgacaacgtggcgctccttgatgcaatcgccactgtaaaaaaacatgcgctgggtaagcttgaagacgcggaaaaaaactaa

SEQ ID NO: 119872 - DNA, 3327 bp, Enterobacter cloacae
atggctgacgttgcttccctcgccgtcgggctgcatctcaacgcagccaattttaaatctcagctgatgggtgcatacggtgatgctgagaactcatcaaagcgtttcaaccgtaacgcacaggaagatgctaaaaggacagatgaagcctattcccggatggggaaaaccatcgcgggtgttgctggtcgcctggcgggatttgccggtgccggtttatcacttggcgccatcattactaccacgcgtgaatacggacaggctttatccgacctttcggctatcaccggcgctacaggcgcccagttaaaatcgcttgatgaagccgcccaggagatggggcgtagcactgaatacagtgcgagccaggcggtggaagccctgaagttgatggcgtccgctaaacctgaacttcttcagaccgcagacggacttactgaggcgacaaagagcgcactaacgcttgctcaggccgcaggctcaactttgccagatgcaacccgcactctggctctttcccttaaccagttcggggccggggctcaggaagcggatcgttatattaacgtgctggctgccggtgccaagttcggggcatcggaaatcgcagatacagctgcggctattaaaaatggtggggtggccgctgcacaggcaggagttggatttgaaacgcttaacgcagcgattcaggttctggctgagcgtgaaatcaaaggcggtgaagcaggaaccgcgctgagaaacgttattcttgcccttgagaaaggtacagacaaaacgctcaaaccatcggttgtggggctcagtggtgctctggataatctctcaaagaaaaacctttctacggctcaggctgtaaaactgttcggtgttgagaatatcaacgcggcatcagtgctggtggacaaccgcagcaaacttaacgcattaacccttgccctaactggaacacagactgcgcatgagcaggccgctattcgtgttaataacctgaatggcgacatcatggggctgaccagtgcttttgaaggcatgatcattaaaattggtcaaagtagtaccggaccgcttcgttcaggcattcagtcagtaactgacggtatcaacctgcttaccgataatttcaacgcggttgcaagtgtggccttatacacactgatcccggttctttcgaccaaactgacagctggtcttcgcgaaaacataagcgcatggcagcagaatcaggcagccgttaaagcagcagcagcggctcaggctgatggtgcacgtaaaacgctggaagctacttctgccacgctaaagcgaaatgatgcggaatttggttattaccgtcagctggaaaaaacggccaggcagcatggtttgaacgtaaattaccagggagagtttaaccgacttatccgtgaagaaaccgagcaaactaatctggccactcgtgcaaaaatgcagttggcagcagctaatcgtcaggtatctctgaccgctcgtgctgcctcggtagctgtggggctcgctcgcggggccctggcgcttgtcggtggaccttttggggctgcgatgctggcaggctccgcacttctgtattttcatcagcaggcgaaggatgcccgacagtcagcaattaacctcaaggatgctgtcattgaaaccactgctgcgctgatgcagatgtctgataaacagctcgccgttaagcagattgacctgcaagaccagtatgaaaatcaggtaactcagcgtaaccagctcatcaaggaaattcaggacgcagacagcagactagatagcctcggtggatttgacccattccgacagaaaaaaggggtagaggacagtaagaaacgggcagaagctgaccttgaagccgttaataaagggttagagacaacacagtctaaccttgagaatgtcagcaaggcgcgatttttggtccagacagggatcgccgatcaagcaaaatcgctcgcgaatgacatcaaaaatatcacagctcagacagctaaagccggagagggtgttaccacaccatggaccggtgaagatactcaaaaggctaggaaggaaacggtcaatcagtatcttcagttgcgcagggagatcgaagaagctcatgcaaccagtcttggaaaaattgatcttcaggagaaagccagtcaggaaaagctgatcgctgcggcgcgtaaaaatggagcaagccagcaggatctacagcgtgcgctgttaatgaatgctgaaaattatcagaagcaacgtaacgaacttgctgagcagtattccccggcacgatcggccatcaataaagagaaggaagcgagccaggagctcaagtctctccttgatgcacgtttgcttactgaaaaagagtacatggctgcgcgtgtcacactgtcacaggagacatcccgacaaatcctacaggcccaggctaatgctctatcagcaccacggcttgagcttgccggggacgttgatccgcttgcccagcaaaggaaccaacttgcacagcagcaaagtctggtagagacctattatcgcaatggtgcgctgagtaagcagcaatacgaaatgctgatgcagaagagcagtaaagattctgctgatgcacagtatcagaccgcgctggaattatatcgctcacagagtgaattcaataatctggcgatcggactggttgaggctacccgggagcgaaccactaatgtcctgacggggctgctgactaaaacgcagacctttaaagagggcgtgatcaacctcttctccacgcttactcagtcgataattcaaaacctcgtcgatatggcagcacaggcgctcgtaacaaatacaatcctgagttcaattatgggggttggttcgagtgtacttggcggtgttgggggaagtacggcaggcagctcagggacagcgattgccgattatgggagcaatttccagttcaatgccaaaggcggcgtttattcctcctcagacttaagtgcctatagcggccaggtagtcgataatcctacttttttcgcattcgcgaaaggtgccggagtaatgggtgaggcaggaccagaagcgatcatgccattgactcgggcagctgatggttcacttggggttcgcgcagtgtcaggcggtgcctctgaaggtgctgctcctcaggtattcatcactatcaatggcgatggcagtactgcatcacaatcatctggcggtctggaaaaattcggtaaaagcgtaggcaattttgtcagagatgaataccgaaagctgatacaggctgatcttcgtcccggaggggcaatctggaacagtacaaacgggaggcggtaa

SEQ ID NO: 119873 - DNA, 339 bp, Enterobacter cloacae
atggcgctggaaacttttaactggagccctagggtgaatccttctcaggacgtcaccatgcgtacgcgtgaggcgcagttcggagatggttacacccagacatccggtgacggacttaaccctcgctcacaaagctgggatctgacctttgtaggcctggaaccctatatcaagtcgatcaaagactttcttgatcgtcatgagggaacaaaagcatttgcatggaagccgccgctagaggacttgggtctctatcgatgcaaacagtacaagccctccccaatggggggaggcaactggtctttgactgcaacattcatccaggcatttaaaccatga

SEQ ID NO: 119874 - DNA, 759 bp, Enterobacter cloacae
atgagcttaaacgcagattatcagaagctggaatcagggaacgacgttcgcctgattgagttggacggttcttcttttggactgacggaagttctccgctttcacaattacaacattccccacaccgaagaggaaatagtcgccgccggcggggaagaggccaagctcccggcgaaaccaatctggtggcagggtaatgaatattccgcctggccgtatcagctggaagggctggagaaatcgaccagtggcagcaatgcgacgccatcactgacggtcgcgaacatcgaaagctctatttctgccctgtgtcttgcgtatgacgatttgctacaggctaaggtcaccattcacgacacaaaggcaaaatatctcgatgcgaaaaacttcgcaggcggtaaccctacagcagatccgactcaggagaaacttcaggtctggtatatcgacgggaaaacgaccgagcttgctggcgaaaccattgagtttgtactgtccagtcccatggatcttcagggacaaatgatccccacgcggcagcttcattccctgtgcacatggtgcattcgtaataagtaccgcaccggcgacggttgcgactatgccggtacgcgctatttcgacaaaaacaacaacccggtaagcgatccgtcactggatgaatgcaacggcacgctgacggcctgcaaacttcgattcggtgaaagcaacgaactctcgtttggtgggttccccggtacgtcgctgatcaggagctga

SEQ ID NO: 119875 - DNA, 711 bp, Enterobacter cloacae
atgcgtcagaaaacaattgatgcgattatggcgcatgccgccgctgaatatcctcgtgagtgctgtggtgtggtggcgcagaaaagccgcgttgaacgttattttccttgccggaatcttgccgcgacgccggaggacaattttgtcctttgcccggaagattacgcagctgctgaggactggggtacggtgatcgccatcgttcacagtcaccctgacgccactacgcaaccgagcgaactggataaagcgcaatgcgacgcaacgcttttaccctggcatatcgtgagctggccggagggggatttacgcaccatccagccgcgcggagagctgccgttgctggagcgtccttttgtgcttggtcacttcgactgctgggggctggtaatgagctatttccggcaaacgcatggtatcgaactccacgattaccgggttgattatccctggtgggaaaaagactatccggacaacttctatcaggattgctggtacgagtgcggattccgtgaattcgacgggccgccgaaacctggcgatatggtgatcatgcaggtccaggctgataagtggaaccacgcgggaattctgctggagggcaatatgctgctgcaccacctgtacggtcatctgagtcagcgcgtgccgtatggtggatactggcaggaacgaacgatgaagattctacggtacaaatctctgtgctaa

SEQ ID NO: 119876 - DNA, 348 bp, Enterobacter cloacae
atgaaatttgtattgagtgtattgttattgacagcatttaattcatacgcaggaactgtagacgattatctggagcgtcattctgaaataaaatcaaattctgttgctgaaacttatgtaagccattacgcctttatgattgcgatgatggaagcacaacaaaagcataatagatctgataatgaatttattactgggttgctttcaaataatggtgatgtatatgcaagattagcggttaaaaagcttgcaaatgattgtttaacgcaaaggagcattggtcaatccggagagttaaataataaagagtgtaatattgtgattagagcagataaatcagaacaatag

SEQ ID NO: 119877 - DNA, 594 bp, Enterobacter cloacae
atgcaagaggtaatgacgcgaattgaactaggtggggagccgggtaagatctttggaaagatacaccatcgccttatcaataaagtatcagaagctggaacggccctcgctaaaactattcccggatttgaaagctatatgattagcagcaaaagtcgcgggctaacatttgccatcttcaaaggtaaaaagaatattggagtagacgaccttggttttccagttacaggagaggtcatcagaattgttccagtaataattggaagtaaaaaggatggtttgctacagactattcttggtgcagtaattattgcggcatctgcaattggcagttattttgcaccgggaaacccgatttctgcgtttggatacaaatttggtgcagccatgatgttgggtggagttgttcagatgctttcgcctcagcctacagggttagccagcaaacaaagcgcagataaccgtgcatcgtatgcgtttggcggggtgacaaataccgccgcacagggttacccggttccgctcctttacggccgccggcgaatcggcggggcaattatttccgccgggatttatgtcgaagatcagcagtag

SEQ ID NO: 119878 - DNA, 3582 bp, Enterobacter cloacae
atggcgaataaaattaccggacgaaaaggggggagctccagttcccgaactcctaccgaacagcctgatgatctgcaatctgtagcgaaggcaaagattctcgttgcgcttggggaaggggagtttgctggacagctcaccgggaaggatatctacctggacggaacggcgctggagaactccgacggctcccaaaacttcagcggcgttacgtgggaatttcgcgcgggtacacaggcccagaagtacattcagggcattcccggtaccgaaaacgaaatcagcgtgggaaccgaggtaacgagcgctacagcgtggacacgaaccttcaccaatacacagctttcagcggttcgtttacgcctgaaatggccatcgcttttcaagcaggaggacgatggcgatctggttggttactcggttaattatgcgattgacttgcagacggacggcgggacatggcagacagtcctcaataccagtgtgaccgggaaaacgacctcaggttatgagcgtagccaccgtattgatttacctcaggtgggcagcacctggacaatcagactacgcaaaattaccgctgacgccaacagcgcgaaaatcggcgacacgatgacgctacagagcttcactgaggtgattgatgcgaaattgcgatatccgaacaccgcgctgctgtacattgaattcgactccagccagtttaatggttctatacctcagatctcctgtgagcctcgtggccgcgttattcgggttcctgatacttacgacccggaaacccgctcttacagcgggacatggaccggggcgtttaagtgggcatggacggataaccctgcgtggataatttacgatctggttgtttctgaccggttcggcctcggtcaccgtttgactgctgctaacatcgataaatggacgctttatcaggtcgcccagtattgcgatcagatggttccggacggtaagggtggcgatggaacagaaccacgctatacctgcaacgtgtacatccaggaccgaaacgacgcttacacagtcctgcgtgattttgcggccatattccgtggcatgacgtactggggtggcgatcagatcgttgctctggccgatatgccccgtgatgtggattacagctacacgcgcgctaacgttgttggcggtcgcttcacctattcaagcagcaccacgaaaacccgctacactacagcgctggtttcatggtccgatccgggtaacgcctatgctgacgcgatggaacccgtattcgagcaggcgctggtggctcggtacggcttcaatcagctggaaatgacagccatcggctgcaccagacagtcagaagcgaaccgaaaggggcgctggggtattctcaccaacaacaaggatcgcgttgtttcgttcgatgtcgggctggacggaaacataccgcagccaggctatatcatcgctgtggcagacgagctgctttccggaaaggttatgggcggtcgcatcagcgccgttaacggtcgcgttatcaaacttgaccgtgtagctgatgcagcagcaggtgatcgtcttatcctcaaccttccctccggagcgtcacagagcaggaccattcaggcggttaacggggaatcggtcacagtaaccaccgcgtacagtgagacgcctcaggccgaagctgtctgggtggttgagtcaaacgaactctacgcgcagcagtatcgtgttgtgagcgtcgctgataacgatgatggcactttcaccattaccggtgcatggcacgatccggataaatatgcccgaatcgataccggagccatcattgaccagcggccggtgagcgtgatcccgccgggcaaccagtcgccgcctgcgaacatcgtgatcagctcgttttctgtggtgcagcaaaatatcagcgtcgaaacgatgcgcgtgagctgggaccaggcgcagaacgctatcgcctatgaagcgcaatggcgccgcaacgacgggaactgggttaacgtgccgcgcagctctacaacgtcattcgacgtaccggggatatatgccgggcgctacctggtgcgcgtgcgcgcaatcaatgccgcagaaatctcgtccggatggggctattcagaagagaaaacgctgaccggtaaagtgggcaatccgccgaaaccggtcggcttcatcgcttccgataatgtggtatttggtatcgaactgagctggggatttccggcgaataccgacgacacgctgaagacggaaattcagtacagcctgaccggtaccgaagacgatgcgatgctgctggcagatgtaccctatccgcagcgcaagtatcagcagatgggccttaaggcagggcaaattttctggtaccgcgcgcagctggtggaccgcagcggaaacgaatcagggtatacagactttgtgcgcggacaggccagcattgatgtatccgatatcaccgatgccattctggaggacatgaaaggctccgatacgttcaaagacctgatcgagaacgcggtggacagcaatgaaaaaattgctggcatggcaaacgacatcaaacaggccaacgacgaactggagcaacaggcgcagaaaattgcccaaaatgcccaggatatcgggaaggttcagaccagcgttacaaacctgtcgagcacggtcggagatgtgtcttcttctctgaacgaacttgagcagacagtggcgactgctgataccgcgctgggtcagcgaatcgataacatcagcgtgtctgtggacggtatgacgggaggagtgaagaactctgccatcgcgattattcagggcaatctggcgcaggtagcggcgcgcaaaacgctgtcggcatcggtcgccggtaacagcgcgcagctggaccgcattgatgaggtgatcgtcagcgagaaggaggcaacggcgcgttcgctgctgagtttgcagactgacgtgaacggcaacaaggcatccatcaacagcctgaaccagacgttctccgattatcagcaggccaccgccacgcagataaacggcatcacggcgaccatcaacgggcacacttcagcgatcaccaccaacgcgcaggccattgcgaacgtcaacggcgacctgaaggcgatgtacagcattaaggtcgggttatccagcaatggtcagctttacgcggcagggatggggatcggcgttgagaatacgccgtccggcatgcagtcgcaggttatcttcctggctgaccgcttcgccgtaacgcaccaggccggagcgaccgttacgcttcctttcgttatccagaatgggcagaccataattcgggacacggttattggagacgggacgattggaaacgccaagatcggcagctatatccaatcttcaacctgggacggcacagggaacgttggctggcacatcaacaaatctggctacgcgacgtttaacaacgtgaccgttcgcggctcgatttacgccacaaacggtaatttttctttcaatggctccggcaatacaacggtgattaatggtaatggcgtaaccattaatattccgggtggcggccgcatcgtactggggacgtggacataa

SEQ ID NO: 119879 - DNA, 966 bp, Enterobacter cloacae
atgccgacaggactactgattgacctgaatgacggcggaaagcgcatggagataactgcgggcctgcgatgcccgtcgtttggggccaactttgacagtggctaccagaaagccaagtacgctgatgttgccggttatgtttccggggcgcaggtgctgtttatccctcacgcgacggcttaccttgattcagggctgcttcataaaatgaactcggtcaccatatccggtggccgcgtaacgcagaactccacgatgaaggatgtaagtatcagtgagcgtgagagtacgtacacgttccccggaagcctctggcagatatttccgtcaggccagcgtagtggggtgggactgctcataagcaacagcactgacttcacctcaataaccaatgccacgcagtcagggcagtgtatctggaaggggaccgtcaatgtccccacaggcggctgggcagttcccacgatagcggggtacgacaagtccaaatatatcgtctttgggcgctgtaatagcggtaacaccgtcgatttcgatggcaacacggtcaggttcttcagccctccatccaccaacgatgatgctccaacgaccggcacgatagatattgtcatctttgccagtggcgtggcgccgcagccgggcaccgggctcaacatcttcaatgcagccggggcctgcacgttttcaacgacaaagcggcctttcgtctacctcaaccagctctggacgccttcaaaaaatgccgtgagcatcggcagcgggtatgttccgctgggtaggttcgggctgatggctcacgaagttaatggcatgtacgtgtatcgaatgttcggaataaaaatacagaacggcagtgcttcagttcagggtgggaaatatctggggcgcgagcggtatgcaatttttggtaatgacacggtaacgccactgaaccttcccgttcttcccgatatgtacgtctga

SEQ ID NO: 119880 - DNA, 1317 bp, Enterobacter cloacae
atgctttataacactggcaccatcgccattaacggaaacaccgcaaccggcaccggcacgaactggacggcgccagccagtcagattcgggttggccagacgttgtttgttctttctaacccggtacagatgtttcagatcaccgccatcaacagtgcgacgtcactgacggttacgcctgccgcgtctccggcgttgagcggacagaaatacggcattcttgttactgatagtctctcggtcgacggcctggcgcagagcatgtctcagctcatcaacgagtatgacgaaaacatcggcgcgtgggagacgttcgccaccacctcagcaaaccagaacatcaccgttaccatcaacggcgctcgtgtaaccattccggcgatcggcaaaatggtccagaaagggagcaatggggcggtaggagtttcggacggcgggaccggggcaacgaatgccgctgacgctcgcacaaacctcagtttgggaaacagcgctacacgagacgttgatagtcagtttgccccggtgtcgtcgtacatcaatggagccgctgttatggctcaggttcatcgcgattacaggaaccttgcctcttatgatggtatttcacaatatccgctcggcatgtcttttggcatacagcttggaggaaatggatggggtggaggcagcggagttgatacttacacgggcatgttaacactccgtggctggcatgattcgtcgggtggtggctatgtatcgtggcagcttgcctcaacctctcagggactgaagtatcgtcagggcaatggaacaatccagggtaatgctaacgtcgggttctccacgacgcacaccctttattcgacgcagaacaccacgaaagccagcgacggaacgctcaaagctgcatctccggtgatcaaagtattttctgatggcgcataccagactaacgatgaatcagagggctgtaccgtaactcgcatgaaaaccggagagtatctgatcgagggctgcatgggtatgaactctgacgcagaatggggtgggattgatggcgggtttgatatccctaaagatcgcaatggacaagccctgatctggctggactatgaggttaatgccgacgggtcagtgctggtaaaaacattccaccgggaatacccgacagcgccggcatttgcgaggaactcacgggaaggttacgcggatggagacccggccgacattccggccgatcagtttgtcagtgtccgtgtagagatgccgcaaaacagtatctggaatcaacgtgcggctatggctcaagtccctgactcatcctctgattaa

SEQ ID NO: 119881 - DNA, 741 bp, Enterobacter cloacae
atgcaggtaggcgcattcaaccttggcgctatccagggggacggtccaaccctcgataatatggacgggttcacgcctaccggatttacctcacatcaaaatgatggtctgactcagttgggcctgacatcgaatacaggactaacttccatcattctcaatcggggcaacaggccaaccagaatacatcaggcatactctctacgtcgtacctggttttcatattacagcgggatcgcatgggcctatcacgaagcttacacgactggtaatacgacaaaatcaagcgatggtactttgaaggcggcgtcccctgtcgcccgtattgtaaaatcccgtgaggactgccagcgtgaggacattgattctgacggtttcagctggtgtggaggtggaactgccaatgaagaagctgaagggatcaagatttcaagactggatgttggtgtttatgtcctgactggttcagcgggactggcctctgagggctggcagttattgccaccaatggaccctggcggcatgggggaactgggtgtagttgaagctgagcagacagaaggcggtgggctgacgattcggctttttaagcggaaatacatactcaacgaagaaggcgaaattgttaaaacgaaaggggctcctatagatgttcctgccaacagctggatcgacgttcgcctcgatatgcctgatgattctgcctttaatcagaggatgagtcagggacttgagccatag

SEQ ID NO: 119882 - DNA, 576 bp, Enterobacter cloacae
atgcaaattggctatgtaagggtgtcaacaaatgaccaaaatacggatcttcagcagcaagcactcgaacgcgcaggatgtgaacagattttcgaagaaaaaatgagcggtactgtggcaaaccgaccagcgcttaaaaagcttctgagaacgctgaatgagggcgatacgcttgtggtctggaagctggatcgtcttggtcgtagcatgcgtaatttggtgctgctggtggatgaactacgtcagcgtggcatccacttcaagagcctcacggacagcattgatacatcaagcccgatgggccgcttcatctttcatatcatgtcagctctggctgaaatggagagggagttgatagtggagcgcactcgggctgggttggccgcagcccgtgagaaagggcgaatcggtgggaggcggccaaaattgacacctgagcaatgggctcaggctggcaggttgatcgcaaacggagtggatcggaagcaggtggcgatcatttacgatgtggccgtttgtactctatataaaaaattcccagtaaataaagacgttacacgaacttcaacacattaa

SEQ ID NO: 119883 - DNA, 240 bp, Enterobacter cloacae
atgttcgttgagctggtctatgacaagcgtaatgttgatggtttggttggcgccagagagattattctggcagagctgacgaagcgagtgcaccagatcttccctgatgccgaagtgagggtgaagccgatgcaggcgaacggcttgaatagcgatgccagcaaaagcgatcgggaaaagctgaaccgcatgctggaggaaatgtttgaagacgcaaatatgtggctggtgaatgattag

SEQ ID NO: 119884 - DNA, 4425 bp, Enterobacter cloacae
atgagcgataacaacgcggcccgtaagggcgacgagattattcactccagcatttttgctgatattaccagcattgtggcggaaggcgctgcctatgcggtgattggcgcggcggtgggcgcggcagcgaccgttgcggccccactgctgggagccggggcagcagcagcaggcgtggcggcaattggctccagctgtctgttgagcggcattattggtggggttctggcgaacgtcgccgggatcaccgacgatatcagcaacgccgctgaagggctgggtaacgcgcttttcccgccgtcgcccgcgggcaaaatcaccaccggttcgagcaatgttctgacaaataaacttcccgctgcgcgcgccgccgggacgttaacgcctgccgataccccgtcccctgagccgcagtcgccgggcagctttgccgactacgcgggcatgctgctctccgctgccggacagttcggcagcgagatgtggcagcccagcgtcgcctctgccgccgcagggacctcgccactggaagaagacaaggtggcgtgtgataagcactccgggccgcagtatctggcggaaggctcgaaaagcgtcttcatcaacggacagcctgcggtgcgcgcaaaagatcgcaccacctgcgagggcaccgtttccgacgacgtctccccgaacgtgatcatcggcggcgacacgctcacggtccgcaatatcaaaagcggtaaaacgccgggtctggcgttggggatgattgcgctctccctgctgcgcgggcgtccgggcaagatcctgaaaaacatgccctgcgcgctggctgctgccggtggcgggatgctggcggatatggccgtcaacgccgtgttcggctcctcgcacccggttcatgccgctaccggcgtgaaggtgctgaatgacgacgacgaactcgatttctcgctgccggggcgctttccactgcgctggcagcgcagctacaacagcctgaccacccgcgaagggctgtttggtctgggctgggctaccacctttgacagctatctgacgctggaagaaaacaacgccacctggttcgatgaaaccgggcgcgagctgagcttcgagctgccgccggtcgaccgcgcgttttacagcatcagcgaaggcattatcatccgccgcaatgagagcggcgacgtggcgatagccgacgatgacggcgcggtgtggcgtctgtataaaccgacccgcgctaacccctccatcctgcgcctggtctccctcagcgacgaatacggcaacgcgctgctgactgaatgggatgagcacgggcggctggtcggactgcacgatgagccgcgggcgatcgatgtcaccctgcgctatgacgatgaacgtttcccgcagcgcgttacctcggcgagccattttgacggcaaccagacatggccgctgatgcagtggggctacgatgcgcgcggccagctggccagcgcaacggatgcctccggcgtggttacccgtgaataccgttataacgatgatggcctgatggtctggcaccgtctgccgggcgggctggagagcgaataccgctggcaaaaattcgaccactggcgcgtggtggaaaaccgcaccagcaccggcgacggctgtcgctttagctacgatttagccgccgggctgacgaccgtcgatcactacgacggtcagacgcgaaagcattactggaacgcgcaaaacctgattgttcgctacgttgacgagcgcggtgagaactggcgctacgagtgggatgacaacgaactcctcacgcgtcgcatcgatccgctgggtaatgccgttaccttcgtctatgacgagatgggcaaccgggtgcaggagatcgacgccgacggcaatacccgcaccaccacctggctggagcaccgtgcgcttccggcgtccatcatcgaagccgacggtagcgccacccggttccggtatgacgaacatcacgggctgaaacgcgtggtggatccgatggggcagacctcgctgctgcgtcgggacgagtttggtcaggttgtggaagaagtcgatgccgccgggaacagccgttaccaggagtacaacgaggccgggcagatggtgcgtgcgacggactgttcgggccgtgtgacacaataccgttatcatccgctgggctggctggtggctgagataagcgccgacggcgaagagacgcgttaccgctacgacgccgcggggcgtccggtgcagctcgaccgaccagaaggctggaccgagtcgctcaaatggaacgaacgtggcctgccggtgaagcatgcgggcgccgacgggaaagagagcgagttcagatacgacgaggcagggcgcttaaccgccacccgtaatacgcagggtgaagaggtgcgccgccgctgggacagccgcgggcgtctgattgccctggaaaacgaaaacggcgaagcgtatcagttccgctggggcgcagactcgctgctgctggaagaggtggggctggatggcgtggcctcgcagtatcgctacgatgcctgcgggcgtacgatagcgcgcacctttgccgccggacatccggaggccattacccattccttcgcctggagcgcgagcggccagctggtcgcccgcaccacgccggaggggcagacccgctaccactacaccccgtccggccttctgagccggattgggctgcatcccgcgctttcagccgatgcctggagcgccgaggccgagcaggagcttgtgtttgagtatgacgcgctcgggcgcgtcacgcgcgaaacgggcgaacacggggagctggcgtgggagtatgacgcgctgggtaaccgcacctccgtcacgctgcccgatggccgggagctgaaacagttctactacggtagcgggcatctgctcagcattgcccttgataagctgtcggtctccgactttacccgcgacgaactccaccgtgaaaccagccgtacgcaggggctgctgaccacccgcagcgaatacgaccgccttggccgactgcatcgccgggacgtctttaccggcaatgcccagcgcccgtcgccgcgccgctggtcccgccgctgggattacgactatcgcaataacctggtgcgggaagagcgggacgataacccgttcagctggtaccgctggcagtacgacagcgccggacgtctgctggttcaggacggcacgctgcccggccaggagcagtggcgctgggatgctgccggtaacccgctcgaaggctctgctgagaaggtcacgcacaaccgtctgacgcacctcaacggcattcgctggcgctatgacatccacggccgcaccgtggagaaggataacggccagacccgctggcactaccgctacgacggcgagcaccgcctgacggaggtcatcagccagccgcgggaccgcaacaggccgcagacgcaggtcagcttccgctacgatccgctcgggcgacgcatcagcaaaacgcgacgccagatgctgtttgggcagccaaccggtaagccagtcaccacccggtttgtctgggaagggttccggctgttgcaggaggtgcacggggatgtgccgctcacctacgtctacagcgatcaggacagctacgatccgctggcgcgtattgacggcgttgatgccccggagatcttctggttccactgccagcccaacggcacgccggagcggatgacggatatcgaagggcaggtacgctgggaaggggtgagcagcgcctggggcaagctgctgcgggaaagcgagacgcaggtatcaggatattcccagaacctgcgtatgcaggggcaatacctggaccgtgagacagggctgcactacaatctgttccggtattatgacccggactgcggacgatttacgcagcaggacccgatagggctggcgggagggattaacctttaccagtatgcgccgaatgcgctggggtgggtagatccgtgggggttgactcctgacgatctcattcgttaccggccacatgattctctttctgctcaaggtggagctagaagctctgctatttctagggcatgggtgcaagaaaaagccttattgcaggatggtggggctggcacaagaaattggacagcgcaagagagggatttaattttgaagactcccaacaagagcctaacctctgtgatgtcccgggcaggctataccgggcatcatatcaattcggtagaaggcaatggtacacttggttccaaatggcaaggtgatccgaggaacattgtattcttgaaaaatcataaccatcccgacaagttcaatgagcatgtccatggtgatcaaggacatagagggaatactaagaactcgacgcgtgggcgcttaatcgatagagaaagaacattaaaatctagacaacgatgtaagcaattatag

SEQ ID NO: 119885 - DNA, 564 bp, Enterobacter cloacae
atgaacataaaaaatgcagtccaagatcttgtgaacaaatttaaaatgaatgaattgaatatgggagagatagactatacagacgatgaaaatgagacttcttttcccgtgaatttaaatggggaggttgattttttttatcgtcatttgattttaaatgacagtccaacatttgatggtactttttatttacagattattgaacctcaagatctcaacgaaatattatccggttggcgagttcaaaatgatacggcttggcgcgatgaatatataatctttgctgaaagaaatggtgacgttcttttttgtgacacccaaaatctaacatctcctgtttatggtagcattcaaaaacgaaactttataatttctggttccttagctgactttttgaatgctttttgttctgctattgagatggaacaaaataattatgatggtgatgctacagatgatgaatttaatttaagagaagattttctggaagatatcgatgtgatgcttaaaactaaactaaaagatgttgaggttgaagggtttaagaaattcttttttggttag

SEQ ID NO: 119886 - DNA, 519 bp, Enterobacter cloacae
atgaatattaataaagatgatgatctccttgtgatagtaaagaaagaaggaatatattattggttcgtggcgttcaaagaaatgtggattttagatagaattaaatggatagagggttttgtgaaaagtggggtggaaataaatctacaggatgtccataaggaaagatatgacatacccgtagtaaatgaagaaaacgcgcagatatttattgatgggttaattaaagatggctattcattcgataaggatgacatagctgatgagttttttagtaggctttcgcaaaaaacaacttggtgggatatatatgatcttatgccggatttgcttatagattttgataataaaagactatattctgagtatgttgaaagtatgcattatcaaaaatatgttcctgatggttggcaaggtgagcttgttgatttctgcggtaatggaacgttacctcaagatgaaatgttctggataaagaatggaacaaatcatagaaacgttatcattgctgaagggtaa

SEQ ID NO: 119887 - DNA, 483 bp, Enterobacter cloacae
atgaaccatttcagtaactgtgaaaaaaagattggacgtgcagatattactaaaacggaagagaaattatctattactcttccggatgatttcgtttcacattatctgcaatttaatggtggcactcctgagaaaagttggtgggacggtgatgaagattttgagccagtagaggtggcagggtttaaaccgtttgtttataatagtcagacaaataatgaccctagatctttaatcgacggttgttatatcagcatgttggatagggaagtgattcctaaaaacctgcttcctttcgcaaatgattggggagggaatttcttctgtctagatttagacaattactcaatagtatattttgctacagattcttttgatgaggatttgactatgcaagagaatcacataaaacttcaaagatatctgacaaattcatttgccaattttgttaatggattagtagcagaagaagatctttcttaa

SEQ ID NO: 119888 - DNA, 474 bp, Enterobacter cloacae
atgaagatatcccagttagcaatacataggttaaataatattaattggtttgttaatcttggtgtagcaacgacactccctggtgttatccaggctcagtcccttagcttatttataaaaggcttgaatagcgatgaatgggaaagtgccaccttggaggctggttatgaaataacgggctatctcgcaaaaaaacacactaacaaatatcaatattggaactctttggtcaaagaagctaagaaagttgtggagaatgatattatcccaaaaataatcttcccagagtctgagaaaggatcaatgactgagaacttaaaatgggaccttgtgaattacttgcttgaagatgcgtatagttctttactacatgagccattcgcttttgaaggcttaattaatgtttatgaagctgggcatatgccctgtggatggtcaggtacttggccagcgggcaaactagttatctattga

SEQ ID NO: 119889 - DNA, 1785 bp, Enterobacter cloacae
atgttcagatccattcgcgcccgcatcattgccgcgacgacaggctgtctggtcgtcgcccttcttcttaataccattattaactttcaggtcacgcgccaggataatcagcagtcgcagcgcgatattctgaccagcaccagcgccagccacaacatggcgattgccgactgggtgaacagcaaaatgaccgtcatcacctcggcgcaaccagtcgcgctcagcgacgatccggttccggtgtttaaacagcttgctctggcgggtggattcaccaacgtctacgtgggttatgccagcaaaacggctaaattttctgacccaaccggggtacccgctgattacgatcccacccttcgcccgtggtatcagcaggccgtcagcgctgatggtccggtagtgactgcaccttatgtagacgcgggcaccgggaaactggtggtgacgttcgcggtaccggttaaagagcaaggcgccctgaaagcagtggtggcgggcgatgtggcgatggacagcgtggtggctaacgtgcgcggtattcacccgactccggccagcagcggactgcttctggacagcaacggcaccgttattgccggcagcgatcctgcgctgacgcttaagccttttacggagacgatcaaagggaccgattttgccaccctgaaaagcggcaacctggttgacggaacgtttaacggacgcgaaaaaacgttcctggccaccgccgtaccggggacgcactggctgctggttgtggcgctcgataacggcgatgccaccgccgggatgcggtcattgctaaaagcatctgcactgtctctggcgatcctcgccctgctgagcggagccctcatgcacctcctgattgcccgcctgcttaagcggctgtccggtatccgtgacgcgatgaacagcattgccaacggtactaacgatctgtcgcagcgtctgccggataaggggggcgatgaagtggcgcaaattgcgcaggcgtttaacgccttcagcgataagctttctgtggtgatggtccagctgcgtgatgccagcgcctcagtgaaaaacgccgcgcatgagattgcggcaggtaatcaggatctttccgggcgtaccgagcaggcggcatcaagccttcgcgaaaccgccagcgccgtggaagagatcacggcctccgttacgcagtcaaacgagtcggcagcagaagcgaatgaacaggcgagcaaggcctctgccgccgcatcccgcggaggtgacgtcgtcgctcaggccatcagcaccatgcagtccatcgaactggcttccgcgaaaatcggcgatatcaccagcgtcattgacggcatcgccttccagaccaatattctggcgcttaacgcctcggtggaagcggcgcgtgccggggagcaaggccgtgggttcgcggtcgttgcgggggaagtacgtaacctggccagccgcagcgctcaggcggcgaaagagatcaaatcccttattgactccaccaccgaaagcgttgcaaccggctcccggtttgtgcaccttgcgggcgacagcatggatgagatccgcgccagcgtcgggagcgtgtctggcattatgcgtgaaatatccattgccacccgcgagcagatgaaagggatccatgagattaaccacgcggtgactcacctggatcgcatggtacagcagaacgccgagcttgttgtacagtctgctgcggcggccagcgcgctgcaaagccaggcgggcgaccttgctgagaccgctggccatttccgcatataa

SEQ ID NO: 119890 - DNA, 165 bp, Enterobacter cloacae
atgctggagatcctgaccgcgcaaaacgttccggtcaaactgtgcaaaacctgtaccgacgggcgcggcattacggggctgccgctgattgatggcgtggaaattggtacgctggtggagctggctgaatggacgctttccgccgataaagtattaactttttaa

SEQ ID NO: 119891 - DNA, 1248 bp, Enterobacter cloacae
atggcggatttgtcgagacggcggttattgcaggccagcatgctggcgagtggtgcgatgctgttgccgggtgtcatgcaggccgcatgggcggcggggtcagataagccggagcaggataccgtgcgtatcgggtttatccccctgaccgactgcgcgcccgtggttatcgcggccctgaaagggttcgataaaaaacacggcattaccattgtaccgaccaaagaggcgagctgggcggcggtgcgcgacaagctggtggcgggcgagctggacgctgcgcacattctttacggcctgctgtacggtctggagctgggtatcgcgggcaagccgcagcagatggcgaacctgatgaccctcaaccagaacggacaagccattacgctctccagcgatctggcggagaagggcgttcgtgacctcgacgggctgaaaaagctgattgcgcagcaggcgccgggaacctacaccttcgcgcataccttcccgacgggaacgcacgccatgtggctctactactggctggccagcgcggggattaacccgtttgacgacgtgcgcaccgtggtggtgccgccgccgcagatggtgatgaacatgcgcattggcaacatggtcgggttttgcgttggcgagccgtggaacgcgcgggcgattaacgaccgcatcgggtttaccgccgccacgtcgcagtccatctgggccgatcacccggaaaagatcctcggcacccgacgtgactgggtggcgaaaaacccgcacaccgcgagggcgctggtgagcgctgtgatggaagccgcgcgctggatcgaggcgtcagcggaaaacaaacgcgaaaccgcgcagatcctttcgcgccgcgcctggctcaactgcaaggaacagtatctcaccggacgcatgctcggcgagtacgacaacggggtcggtcagcgctggcaggatgcacacccgatccgtttcttcaacgagggtgccgtgagctacccgtatctctccgacgggatgtggttcttaacccagttccgccgctggggcttgctcaacgccgcgccggattacgcgggcattgcacagcgcattaaccagaccgcggtctggcaggatgccgcgaccgccgtgggcggcatgtccacaccgtcatcaccgtatcgcagcagcaccctgatggacggcaccgtctgggacggcaccgatccggaagggtacgccaaccgcttcgccattcaccgtaaaggggcctga

SEQ ID NO: 119892 - DNA, 1212 bp, Enterobacter cloacae
atgtcatggcattccttcaaacagacttacctggttaagttctggtcacctgttccggccgttatcgcggcaggcattctctctacttattatttcggtattaccggcaccttctgggctgttacgggcgagtttacccgctggggtgggcagctattacagctggcaggcgtccatgccgaagagtggggctacttcaaactgatccatcttgagggcacaccgctgacccgcatcgacgggatgatgatcattggcatgttcggcggctgttttgcggccgcgctgtgggccaacaacgttaagttgcgcatgccgaaaagccgcatccgcattatgcaggccgtggtcggcggcatcattgccgggtttggcgcccgcctggcgatgggctgtaatctggccgcgttctttaccggtattccgcagttctcgctgcatgcctggttctttgccgccgccaccgccatcggctcctacttcggtgctaaattcaccctgctgccgctgttccgcattccggtgaaaatgacgaaagttagcgctgcctctccgttaacgcaaaaacccgatcaggcgcgtcgtcgcttccgcctcggtatgctggtcttttttgccatggttgcctgggcgatttgcacggcaatgaatcagcccaaactcggcctggccatgctgttcggcgtcggctttggtttgctgattgaacgtgcacagatctgctttacctccgcatttcgcgatatgtggatcaccggacgcaccatgatggcgaaggcgatcattgctggtatggccgtgagcgcaattggcatcttcagctatgttcagctcggcgtggagccgaaaatcatgtgggcgggcccaaatgccgtcattggcggactgctgtttggttttggcattgtgctggcgggcgggtgtgaaaccggctggatgtatcgcgccgtggaaggccaggtgcattactggtgggtgggtctgggtaacgtgattggctctacaattctggcctactactgggatgacgtctcgccggtactggcaacaaactgggacaaggtcaacctgctgaaaacctttggtccactcgggggactcctggtgacctacgccctgctgctcatcgccttcttactggttgttgcacaagagaagcgctttttccgacgcgccaccgccaaaactgaaactcaggagaatgccgcatga

SEQ ID NO: 119893 - DNA, 2373 bp, Enterobacter cloacae
atgagcagcaatcccccgctgagattcagccacagccatcacctgctgtcggtgaagggctgcgatgcagagcttgatgtactggcgtttgagggtgatgaagccctgagcacaccgttcagctaccgtactgaattcaccagcgcggaccatgccatcagcaaagagatgatgctgatgaaagcggcttccctgacgcttcaggccccggttgaccagggttacggcatcaaaatacagcagccggtgcgggtgattcagggcgtggtcacgggttttgaacgtctgggtacctcaaaggatgaaacccgttacgcagtgacgcttgagccgcgtctggccctgctcagccgttcgcaccagaacgccgtctaccaggatatgtccgtcccgcagattgtggagaaaatcctgcgcgagcgccacggcatgcgcggccaggacttcctgttctcactgagtaaagagtatccgcgccgtgagcaggtgatgcagtacgctgaggacgacctgcactttatcacccgcctgctgggcgaggtcggtatctggttccgcttcaccaccgacacgcgactgaacatcgacgtggtggagttttacgacagccagcaggggtatgagaaaggcctgactctgccgtcggtgccgccgtcagggcagcacgcacagggggtggactcggtgtgggatatggagtgccaccataacgtggtacagaaggaggtcagcacctgcgactacaactaccgtcaggcctcggaggatatgaacacccgggttgacgcaaccggcggggataccaccacctacggtgaggcctatcactgggccgataactacctgacacccggcagcgcgtatgaccgcaacccggccccggagtccggggcgttttatgcccgcattcgtcacgaacgctacctgaatggccagacgcaaaccgttgccttcaccagctgcccggccctttcaccgggtatgctgctgaaagtcaccggcgggtacgaagtggcagaagtgtttgcgcagggcgtggttgtcacggcgatgcacagccatgcgcagcgtgatgcggacttttgcgtcaggtttgacggtatcccggacagtccggatttcagtttccgcccggaacctggttcacgtccggtgatggccggtaccttaccggcccgcgtcaccagtaccactgaaaatgacatctacgggcatatcgataaagacggccgctaccgcgtcaacatgctgtttgaccgtgagaactgggagacagggttcgagagcctgtgggtccgtcagtcccggccgtacgccgggaatacctacggcctgcacctgccgctgctggcgggtaccgaggtggcgattggctttgaggacggcaacccggaccggccgtacattgccggtgtgctgcacgactcggcgcacggcgaccacgtcaccatccgcaactacagacgcaacgtgctgcgcacgccggcgaacaacaaaatccgcctcgacgacgagcgcgggaaagagcatatcaaggtcagcacggagtacggcggcaagagccagctgaatctaggccacctggtcgacagcgagaaacagcagcgcggtgaggggtttgagctcaggacggacagctggggggccatccgggcgcagaaaggactattcatctcggcggacgggcaggcgaaagcgaagggactgcagcgtgaaatgcaagctgcgctcaaagaacttgacgctgccagagaggtgacttctggattacgtcacgctgctcaagcagcccaggcggaattagccgatcttgagaaacaaacaacattaatgaatcagacgcttagcgatcttaagcagcaagcgttacttctgtctgccccttcaggaattgcgcaggtcacccccgcgagcatacaagtctcggcaggggagaatctaattgttaccgcaggtcaaaatgcagacattagcattgccaaaaaattaaccctggcggtgggcgatattctgagcttatttgcacacaaactgggaataaaaatgtatgcctcggagggcaaagtagatattcaggcacagtcggacgcgctgaatttatttgctaaagaaaagctttctgttgccagttctgacaacagcgttgtcatatcagccaaaaaagaaatccttttggtttgtgggggggcatttatacggttaagtgacgcgggggttgaagttggtactggcaaaaacgtcacgttgaaatgtattgcggttcaacagcagtctgcggcgacgttaaattcaacgctttcgctaccttctggttgcaaacctggagtaatttctgcagcccaacagcaaggggctgtggtgatgcttagctaa

SEQ ID NO: 119894 - DNA, 2769 bp, Enterobacter cloacae
atggcatgccaggggttatgcacaacgaaaggcctgacagtactgcccgtgcgctatgctgttgtgccggaaaatattaatgctagtttaccgggatgggcgaatgatccgtgcatcaccggggtaacgctcgccagtaatgaaaagtacacactccgcgcgcttcgccagggctacctttacgttttttatgaaaaaggaaagcagggcaccaattactggcagtgctacagcgttgcgccggacggctcactgtggctgcaacaggtggcgtctaatcctgtaccggtggataaagcgctgtgcgaaacgggcgagcatatcgctcaaaacgtcgagttcatgagcattgaatccccggataagtgcggcaatgtgtggtttgcgttcagtcagtatccgtgggagcaggaaacgctcgatcggtatcgcaccaggccagaagagcgcactgagagaatgcagaaagtgatgccttcggtggcgggatctcagcgcacaaaaacagggaccgacgttaccggggcaagcctgaatcaggtactggactatcaggttccttctgtttctggtctgcttcctggtccggatgatgcgaaagtggtaaacgtcagccgggcatcgtcactctgggatccgacggtggatgatccctggcgggttaataatgatgtggtgaaactgcagtccagtctgtatccgtgggcaaaaaaccgcagtggcatggcagacgcgacggtcacggccatggaaaaccgaagtgaggggatgacgccgctgctgcttccactctgggatccggtggggattgttcatgaacttaacggatggagccaggatgtgctggggcgccaggcgcagtttctgcaggaacgtgagcttgagttcgccaccaaaacaaatctcgatgccgtcagaacgctgctggaaagcaatgccgaatctcgggaggacgcaatgcggagacgaagaactgatggtcccatgctgacagacgaatatctggattcgcgtctgcaggcgcttgagaaaaggtatcagggtaagcctgatgtgctggcacaaatcagggcagatgacaggttagtgagaaactggcatgcgcagaacgtgacggcatcatacccggagagtgtgctgatgagtccacccgaaccgctggctgctcaccagcgacgggttgccgcgatacaggcgcaggtcgatgaggagctggcgttaaatctgcctaaaccctcgcaggatttcagtggagtccgggcccggagctgggcaccctatcagaaaaagctcaacgcaacccgacaggcgaactttgatacatgctacacgaacctggttgattcggttaacgctatcttccagaagcgtatcgtcagcgtggtgaactggctcagtgcaccggtactgctggcaacgctggatgatttccactgcgaggcacagcgggcagggctgttctaccagtcagcggtggggatggtcatgcacgggatcaacagttgtccggcaggggcggcaaagatagacggctggtggaatgagtacagcactaaaaatcgcgggaatctgctgtggcggcatgtggcggccaataacccgcagctaatcagtgagctggagccgtatctggcgacggtgaaagggaaaaaggacgaggacgtgacgcctctgacggcgaccgccatgacggcagccctgatgcagcaggtcagcaatatgaaaaagctggaggggtattaccagaaatcgatgaacagtgtcgtgaaggggctgagggaaaatgccagcaaactggaagtacagctcttcaacacggatgcgtttatcgtcacggtgggagacagggtaagccgcattctgcgggtggataaggcaggcgagaagctggcgaccacggcgttcaggctgatatttatgataagggcgggaataccttcagaagaagttcactcgttagtgaatgcgtatctgaaagatgccccggcgttacgtcagacggtgctggaaggtatacggcgcagtggacgttttatggcgagcgggaatgaagtcgccgagattaaacagagaatgagcagcaggctggaagagcactttgcatcagaaaagggcaaggccgaataccggctggcgggaataaacagtctgttgctggtgctgaatgcgatggattttatctacctgtgcggacaggtaagggatgaaaagaagccgctggcgagcctgctggccagcgggctggcgatggtgagtcaggggacgtcggttattttgcaggcaatagaaaaaggtctggaagcgcgtgagcttacagtggcctgggtcaagggggttggggcggcagcgggtggaactgcgtctttaatttcggtgtttgctgatggtgcaagtacttacgaagagttgcaaagcaatcgttttttactttcctctgtattgcttattaaaacaacagttgatgtcctggcagtcacaaaatcagtcggtcttctgctggaacagtttagtcaaccgatagctaaaaaagtagctgggaaaattacaggttttttggcttgggaaattttagggatccgaatacttgcagtactgatgacctgggaagtgatggttgcgataactttgttacaggtggttgtgacctggatatcggacgatgagcttcagatatggtgtagaaaatgcgtgttcggtacagcacctttcaaccgcagtctgacagaccagaataaagccctggaaggggcgataaaggatatttcatga

SEQ ID NO: 119895 - DNA, 3417 bp, Enterobacter cloacae
ttgaacacctcggcaaaatggagagtgattggccttgtatcctgtctcattatttttggtgtactgacttttataggatgttactactatggggatatctttggatgggtatcctcaaaagaaaaagtgagcctttggttcttatgcatgtttttaatttctgtgttcctgatgttgatgaacttcggtgtatggttccatcaaaaagagtatcgcttacagcatatcgcgggagggaagtccgtcacagctaatgttcttaataactataaaaagtccagtaaaaaggatcctgtaaaagctcatttttgccgacgctatagcttcttctggcaaaacaagatccgcctgctgctgatcaccggcgatgaagccgcgattgagcaactgctacccggcctgcaaaagcagcagtggcttgaaggcaaccgcaccgtgctgatttacggcggcagcctggcatcggagcctgaccgcgaaaaatacacagcgctgcgtaaactacgccgcgggcgcccgctggacgggattatccgtttactgcccgagtcgcttaagctgaccccacatatcagcgacagcgatttacgcggcctggaaaaaatcagcgaactgctgcgttattccgctccggtctggctgtggcaactgtgcagcagtcactggtcgcagagtacgcgtcctgagcaggcggtaggtgcaagctttccaccacgcgcaaaagaagacgatgtaatccgccagctggaactgatgctgccagccctgcgggcgcaggggatgagtcaggtcgcggaaaacagcagccacgacttcctgctgcgcctgagccagcacctgaacgacggtgctattgcccgctgggctcagcagttgcagccatggctctttgtttctcagcagcgcgtcccgctgcgtggtctgatgttcagcctgtcggagaagaaacctgccggaatgtcagcgggaacagccgacgctgagaattatggatcacagcgtcatgccctgactctgccagcaacctggcaggggattgtcgacgactgcacccgcgtacatggccgtcgtgtcggtatgccgtgggaacgggcgatggcctggacactgatggccatcatcagtgtctgggggggagggacgctgctgtcgtttgcggtcaaccggtcacaaatagtttctgttgcacagcaggctcatgctctggtggagcacccttctgtatcggattaccagctgacggccctgcatgctttgcgtaatgatgccggtcgcctgctgcaccatattcaggacggcgcgccatggtatcagcgctttggtctggaccatgatcagcagttgcttgacgcaatgctgccctggtacggggtggcgaacaaccgtctgatacgtgacccggcaaatgaagcgcttaagcagaagctcattgcgctggtcaattcggcacccaacagcgaccagcggacacagatggcgaaaccgggttatgatcagctgaaagcctggctgatgatgtcccgtccggataaagctgatggtgcattctacgcgcaaaccatgaaaaccgtgcagccgacgcgtttaggcatctcagctggcctgtggcaaagcctgtcaccggatttatgggctttctacatcaccgaactgccagcgcagccacagtggaaaaccacaccggatgcgcaactggccagccagagccgccaggtgctgttgcagcaaattggacggcgcaacgcggaaagtacgctttacgagaacatgctcaaatccgtgcgtcgcaacttcgccgatgtgtctctggaggacatgaccggcggtaccgatgcccgtcgcctgtttaccaccgatgaggtggtgccgggcatgttcacccgtcaggcctgggagggtggtattcagcaggccattgagaaagcggcaaactcccgccgcgatgaaattgactgggtgctgagcgacagtcggaaagccgtctcctcagacctgtcgccggaagcactgaaagcacgtctgacggaacgctacttcaccgactttgccggtagctggctgagcttcctcaacagcctgcaacttaatccggcaaacaatattgcagacgtcaccgaccagctgacgctgatgagtgatgttcgccagtcaccgctgattgccctgatgaacaccctcgcctggcaggggcagaccggccagaagagtgaaggcctgtcggactccatcatcaaatcggctaaagacctggtaggcgggaaggacaaaccggtaattgaccagtcagcctcaggcccgcagggcccactggatgaaacctttggaccgttgctggcacttatgggtaaaaacaaaggcagcaacgttatgtcggctgacaactcactgagcctgcaaacgtatcttacccgtatcacccgtgtgcgtctgcgtctgcaacaggtcgccagcgcctctgaccctcaggaaatgatgcagagcctggcgcagaccgtgttccagggtaaaagtgtggatctgaccgacacccagcagtacggcagcctgattgctgcaagcctgggcgaagagtggagtggttttggcagcaccatgtttgtgcagccactgacccaggcctgggaaactgtgcttcagccatcggcagcgagcctgaatgacaaatggagtcgctccgtggtggcgaactggcatacggcatttgacggacgtttcccattcgcgatcagcaagagtgattcctctctgccaatgctggctgagtttgtgcgtaaggacagcggacgcattgagcgcttcctgaccgcggaactcggcggtgtgctgcataaggagggcagccagtgggtgccggataaggttaatagccaggggctgagctttaatccagccttcctgcgggcgattaatcagctcagccagctatcggatatcttatttaccgacggcagtcagggcatcagttttgagctacaggcgcgtccggtaccgcaggtggtagaaacgcaactgactattgatggacaaaagctgcactacttcaaccagatggcagactggcagagcttccgttggcctggtgacacctacaagcccggaaccatgctgacatggaccaccgtcaatgcgggcgcacgtctgtttggtgattacagcggaacctggggctttattcgttggctggatgaaagtaagagagagcagctagaccgcagtcagtggatgatgagttttaccgccccggatggtcggaccctacagtgggtactgcgttcacaactgggcagtgggccgctggcgttactggcactgcggggttttacgctgccagatcaaatattcagcgtcgacagcgcggctatggcgcaggcgctgatgaccaacacagaaaacagtgacatggacggagtcgaataa

SEQ ID NO: 119896 - DNA, 1755 bp, Enterobacter cloacae
atggacgacttaaccctgcgttattacgacgctgaaatgcgctacctgctggaagccggcgaagaatttgcccgcgctcacccggagcaggcagcaatgctcaatctcgataaagcgggcgcgcgcgacccatacgtggagcgcctgttcgagggctttgccttcctgatgggccgcctgcgtgagaagcttgatgacgacctgcctgaactaactgaagggctggtcagtctgctgtggccgcattacctgcgcactattccctcgatgtcggtggtggagttcactcctgtctggcgtgagatgaaagaaccgatgcgtattgccagaggtttcgaggtcaattcgcggccgatcggtgaaaaaggcacgcgttgtcgctacaccacaactaaagagataacccttcagccactggcgttggagcatgcccgcctgtcgactgatcctgacgggcgctctgtcatcagcctgcgcttcagttgtagccatcttgctgactggagccgtgtcgatctcagccagatcccgttctatttcaacgctgacgcaccgctggcctgcgctatgcatgaagcttttaccatgaatactgtgcgtctgtggctgcgcatgccgggcgacatggacagaaggccgatggacgggtatttcaccgcactggggtttggtgatgatgataggctgtggccgaagggggacagcagtttcagcggttaccagttgctgctggagtacttcacctttcgcgagaaattcatgtttacggggctgcgcgggctggagagcgtggtctttccggctgagatcccgtggtttgaaatcgacgtggtgctggcggaacgctgggagcatgacttcagctttaccgaaaagcacctgcgcctgaattgcgtgccggtcattaacctgttcccgctggaatccgatccgctgacgctcaattctctgcaaaccgaatacatgctgcgcccgatgcgcgtgcaggatggccataccgagatatataccgtggattcggtgatgtcatcgagccagcacacctacgtgccgttttcgagcttccgtcataagggaggaatgatgcgtcatgaagcatcggaatattactaccacacccgcgtgcgccgcggtccgtccggcctgcataacacctggctcatccttggcggcgaagcatttgataatcataccgtcccggaagacgaaagcctgtcgctgacgctaactggcaccaatggtcaacttccacgacgtgcgctgcaaagcaccgtgcttgatacggtgatgaaaaccacttcggtcagcattgccgtgcgcaacctgtgtgcgccgacgctgccttgttacccacctgcgcaggaccgttttcactggcgcgtactgagtcaccttggcagcggatttctgtcgatgatggataatgccgacgtgctgcgcggtaccctggcgctgtatgaatggaccgacagcgagatgaaccgtcgccgtctggaagccatcctcgaggtgaagcacagtgaaacggagcgctttgaacagggctacctggtccgtggcgtgcagattgaagtcacgctggacagcaatggctttgccggacgcggcgacatctgcttatttggcgagatgatgagccgattctttgcgctatacactgacatctacttgtttaaccgcctgattatcattctgcaaccgaccggagaacgcctggaatgggaagagaagcacaaccgccgcattcccggctga

SEQ ID NO: 119897 - DNA, 1545 bp, Enterobacter cloacae
atgaaaatacgctcacaggttggcatggttctgaatctcgataaatgcattggctgccacacctgctcggtcacctgtaagaacgtctggaccgggcgcgaagggatggagtacgcgtggtttaataacgtcgaaaccaaaccgggtatcggctatccgaaaaactgggaagatcaggatgagtggcaaggcggctggatccgcggtattcacggcaagctgaccccgcgcctcggcggcaaaatgggcgtgctgtcgaagattttcgctaaccccgtcctgccgcagattgacgattactatgaacccttcaccttcgattaccaggatctgcaccgcgcgccagagagcgatcacctccctaccgcccgcccgcgctcgctgattgacggcaagcgaatggataaaatcgaatgggggcccaactgggaagagctgctgggcggcgagttcgaaaaacgcgcccgcgaccgcaatttccagaagatccagaaggagatgtacggccagtttgaaaacaccttcatgatgtacctgccgcgcctgtgcgagcactgtctgaaccccagttgcgttgccacctgcccgagcggtgcgatttacaagcgcgaagaggacggcattgtgctgattgaccaggacaaatgccgcggctggcgtctgtgcatcagcggctgcccgtacaagaaaatctacttcaactggaagagcggcaagtcagagaaatgcatcttctgctacccgcgcattgagtccggccagccgaccgtctgctcggaaacctgcgttgggcgcatccgctatctcggcgtgctgctgtatgacgcggaccgcattgaagaggcggccagcaccgagcatgaaaccgatctgtacgagcgccagtgcgacgtgttccttaacccgaacgatccggcggtgattgaggaagcgctgaaacagggtattccgcagaacgtcatcgacgcggcacagcgttccccggtttacaaaatggcgatggactggaagcttgccctgccgctgcatccggaataccgcaccctgccgatggtctggtatgtgccgccgctgtcaccgattcagtcctacgccgacgcgggtggtttgccgcagagcgacggcgtgctgcctgcggtcgaaagcctgcgcatcccggtccagtacctggcaaacatgctcagcgcgggcgataccggtccggtgctgcgcgccctgaagcgcatgatggcgatgcgccactacaaacgctcccagaccgtggaaggcgtgaccgacacccgcgccattgaagaagtgggcctgaccgaagcgcaggttgaggagatgtaccgctatctggctatcgccaactacgaagaccgcttcgtgatcccgaccagccaccgcgaaatggcgcgcgacgccttcccggagaaaaacggctgcggcttcaccttcggcgacggctgccacggctccgacaccaaattcaacctcttcaacagcagccgcatcgacgcgatcaacatcaccgaagtgcgcgaacacggggagggagaataa

SEQ ID NO: 119898 - DNA, 750 bp, Enterobacter cloacae
atgaatacaacgcttgcaggaaaaatcgctctggtgaccggcggcagcaccggtattggtctcgcaacggcacaggagctggcggcgcagggagcgaaggtctatatcaccggacgtcgtcaggccgaactggatgctgcgcgggcagacattggcgccgcggcggtagctatccgcgcggacgtctccagaatggccgatctggatgcggtttacgcgcagattgctaaagaagagggacaactcgatattctgttcgccaacgccgggggcggcgacatgctgccgctgggcgccatcaccgaggagcagtttgaccggatttttgccaccaacgtgcgcggcgtgctgtttaccgtccagaaagcgctgccgctgctctcctctggttcatccattatcctcaccggatcgacggtttcaattaaggggacggcgaattttagcgtctacagcgccagtaaagccgccgtgcgtaactttgcccgctcctgggcgctggacttacagggccgcgggatacgcgtcaacgtcgtcagccctggccccgtgaaaacgcccggtcttggcgatctggttcccgaagaacagcgtcagggattatacgatgcgctggcggcccaggtgccgctgggtcgcctgggcgcgccgggcgaagtcggaaaagccgtggcgtttctggcgtccgatgccgccagctttataaacgccacggagctgtttgtcgatggcgggatggcgcaaatctag

SEQ ID NO: 119899 - DNA, 1482 bp, Enterobacter cloacae
atgaaaaaccacatcaacgatctcagaagtgctatcgaactgctcaaacgccatgaaggtcaataccttgaaaccagccatccggtcgatcctgacgcggagctggcgggtgtgtaccggcatattggtgctggcggcacggtaaaacgtccgacgcgcattggcccggcgatgatgttcaacgctattaagggatatcccgactcgcgtattctggtcggaatgcacgccagccgcgagcgggcggcgctcctgttgggctgcgagccctctgaactggcaaaacatgtcggccaggccgtgaaaaacccgattgctcccgttgtggttccggcggcacaggcgccgtgtcaggaacaggtgttttatgccgacgatccggacttcgatctgcgtaaattgcttccggcaccgaccaacacgccgatagatgccggtccgttcttctgtctggggctggtgctggcaagcgatccggaagatgcctcactgaccgatgtcactattcaccgtctctgcgtgcaggagcgcgatgagctctccatgtttcttgccgcgggccgccatattgaagtgttccgtaagaaagccgaggaggcgggcaaaccgttgccggtcacgatcaatatgggtctcgatcccgctatctatattggcgcctgtttcgaagcccctaccacgcccttcggctacaacgagctgggtgtcgccggcgcgttacgtcagacccccgtcgagctggtgcagggtgtggccgtaaatgaaaaagcgatagcgcgtgcggaaattatcatcgaaggcgaactgctgccgggcgtgcgtgtagaagaagatcagcatacccacaccgggcacgcgatgccggaatttcccggctactgcggggaggctaacccctccttaccggtaatcaaagtgaaggccgtcacgatgcgtcatcaggcgatcctgcaaaccctggtaggaccgggcgaggagcacaccacgctggccggtttgccaacggaggccagcatccgtaatgcggtcgaagaagccatccccggttttctgcaaaacgtctatgcgcataccgctggcggcggcaagtttcttggcgtattgcaggtgaaaaaacgccagccctctgacgaagggcgtcagggtcaggcggcactcatcgcgttagccacctattccgagcttaaaaacattattctcgtcgacgaagatgtggatattttcgacagcgacgacatcctgtgggcgatgaccacccgtatgcagggcgatgtcagcatcacccatctgccggggatccgcggacaccagctcgatccgtctcaggccccggactacagcccctccattcgtggcaacgggatcacctgcaaaacgattttcgactgtacggtgccctgggcgcttaagtcccgctttgagcgtgcgccctttatggaggtagacccgacgccatgggcgcctgaactgtttaaaaaatag

SEQ ID NO: 119900 - DNA, 885 bp, Enterobacter cloacae
atgcagtttcgactgatgcgcaatttcatcgtggtggcagaagagcttcacatgcatcgggcggcggagcgccttaacatggcgcagccagcgctgagccagcagataaaaacgcttgaagatcgtcttggggtcttgctctttagccgggcgaatcgtcgcctgacgctgacgccagccggtgaggcatttctcagtaaagccagagtcgcgattttaatgaccgatcaggcgattctggatgccagacagacggccagaggggaacagggcgtgctgaatctcggatgtgtttcaagtgcgatattcgacagtaagctgcccgccgcgctgcggcttttacatgagaaatggcccgccatcagcctttccatgatgacgggtaacgtgcaaaccctttataccggcgtgcaaagcaaccagctggatgtggccattattcgtgccccgttaccgctattgcctgacgatctgcaaagccgtccatttacaacggaaaaggccgtgctggccttacctcgtcaacatagcctggcgggctccgccgcgctgacgcttgcgtcggtgaaagaggagaagtggatcgccctgcgcgacccggaggggatggggctggagcaatatttctatgatgcctgccacagcgcgggcatacagcctgacgttgtgcaaaatgccaccgatgtccccacggtgataagtctcgtctcggcagggtttggcatcgccatgctgccggcttcagcgaaggcgatatgcgtacaaaacgtcgtctttgtggatattcttgaccgactccgggagagcgagctgacgctggtttgccaccggattattcgctctgaggtcctgaaaaaattgatgagcatcctcgatcatacctga

SEQ ID NO: 119901 - DNA, 312 bp, Enterobacter cloacae
ttgaaatgctcggtcctgtacgacgcgcatgacgccaatgaaaatctgactgtgctgctggcgcagcagctcggggatggtttttgcgtggcacatcgttcaaacagtacgctaagcgttctggcatttgccgcagccgggctcggtctggcgctggttcccgcccccctgcaacaggtgcaaatacccggactgatttaccgcaacctgaatgctcaggcgctgaccgcaaatctggtcatgatcagccgcatgcaggagccaggtaatgcagtgactgcttttctggcaatggctaaccttcccttttga

SEQ ID NO: 119902 - DNA, 645 bp, Enterobacter cloacae
atgccctcatccgggctggtaaaaatcactcctcaatatgctggctacgtaaccaaattgaccgcctcagaaggtcaacacattattgccggtgagactctttatcatatcagcggtgaacatttcaacgaacagggggcaggtacactcgctgctataagactttccctacaaactcagtttacaatgctgacttctcaacagaccctggaattgcgtgacaacagtcagcagcagcatgccatacaacagcgaatagtttccctgaaacctcaggttaaaagtgcagaaaagcgtctgtcacttgccgtgcatcaggctgcgctggccgtgtctgttatggagcgctataagaaacttgctgatacgcattacgtatcagatatcgaataccagcagaagcagattgacgtttcaacgtcacagcaaaacgttgaggatcagcgtcaggggcttctgcaactgcacaccgcgatggaggctgctaaagacgaccttgaccatctcatcgttcagggtgaaagccggaaggctgaaatggacaggcagttgcaggtgatcaggcaacagcaggacgaactggcaggtaaggaaaatttcacgctgacttcaccgggcgagtattacactgtccgtcaattttaa

SEQ ID NO: 119903 - DNA, 1425 bp, Enterobacter cloacae
atggtgaatatccatacggtcgccgtcattggcagcggcaccatgggcgccgggattgccgaagtggcagccagccacggtcatccggttctggtgtacgacattgatgcagcggcgatttcccgcgccatcgacggcattcgtcagcggctctcctctcgcgttgcgcgcggaaaactctctgccgacgccggggaacagatcctcgcccgcctgacgccggtgacgaatatcagtgctctggcgaaagccgatctggtgatcgaggcggcctccgagcggcttgaggtaaaaaaagcgctgtttacccagctggctgagatctgcccgccgcagacgctgcttgccagcaatacctcgtccatttccgttaccgcgattgcagcggagataaaccaccctgaacgcgtcgccgggctgcacttcttcaatcctgccccggtgatgaagctggtggaagtggtcagcgggctggcgacctctcccgaagtggccgatgcactgtgcgagctggcgttgagctggggaaagcagccggtacgctgccagtccacgccggggtttatcgtcaaccgcgtggcgcgcccgttctactcggaagcctggcgcgcgctggaggagcaggtggcaacgcccgaggtgatcgacgccgccctgcgagacggcgggggcttcccgatggggccgcttgagctgacggacatgattggtcaggacgtcaactttgccgtgacctgctccgtgtttaacgccttctggcaggagcgtcgttttctgccgtcgctggtgcagcaggagctggtgctggccgggcgtctgggcaagaaaagcgggcagggcgtttaccgctggctggaggagaaacccgccgtcagctggctcgccccggtcagcgacagcttcagcccgatgcgcgtacagcgaagaagtgacggtgtcacggaaattgacgatctgttgctgatcgaaacgcagggtgaaaccgcgcagtcgctggcgctgcgccacggctgcccggtggtggtggtcgaccgcatcgagcgggatgtggccgtgatagccgccgcacccggcaacccgcacgccgccacgcagaaagccatttactggttgcagcaccaggagaaacgggtggtacagattgccgattaccccggcctgctggtctggcgcacggtagcgatgattgccaacgaagcgctggacgccctgcaaaaaggggtcgccagcgagcaagacatcgataccgccatgcgcttaggggttaactatccctgcgggcccatcgcctggggcgaacgccttggctggcagcgtctgttaacgctgctggaaaacctgcaacgtcactacggcgaggaacgctatcgcccctgttcactgctgcgccagcgtgcgcttctggagagtagctatgagtcataa

SEQ ID NO: 119904 - DNA, 909 bp, Enterobacter cloacae
atggcgtgtgcaagcgaacaggacatttttcagcagtggctggcgcaaattaaccaggtttgtgggcgctttgcggcacgtccgttagagggggcgtttctcggcgagctggaaaccagctacacccaaagtctgaagctgagcacggtgaccgccgcaggcgttaacctgtttcgcacccgtcaggagatcaaaaacggcaacgacgcctggttctacaccgtgtttcagctggaaggcagcgccggaatcgaacaggacgaccagcgcgcgatgctgaaagccggggatatcacgctgattgacgcctcccgcccgtgctccatttactggcaggagcgttcccgccagatttcgctcctgctcccgcgacaaatcattgagcaacacgcgcgttttcaggaagtgaggtgcgcgctgcccctctcccgcaatctgcctaccgtacagctgagctaccgactgctacaggagagcatgggcaatgccgatctcagcgccagtgaaagcgaagcggcgcttgaggcgatggtgtgtctgctgcgtccggccttccagcagcgtgacgaggtgctgccgcgcaaggagcgtcagttccgccacgttctgtccctgattgatgatcatattcagtcggaggcgttaagaccggagtggatagcttcagagagcggcatgtccgtgcgtagcttgtaccgcatgtttgccgggaaagggctggtggtagcgcagtatattaagaaccgtcgcctcgatttatgcgctcaggcgctgcgttccataagcgatgacgaaaagctggcggggattggctacagctggggtttcaccgaccatagccatttttccaccgcctttaagcagcgtttcggggtttcgccgggcgaataccgcaggcgttatcgctag

SEQ ID NO: 119905 - DNA, 1266 bp, Enterobacter cloacae
atgatgaataaagccacaactctctcagctaatattacaacacgctctaactggcactggcaggataatatctggacgctgggcctttatggtacagccgtcggagcgggaacactgttccttcccgtggaaatcggcacccgtggtccggttatttttctggttatgctcctgctggggctgccgttatccctgatcccccatttactcctttgtcgtgtatatatgcgtgaagagaagactgaaaacggcacgttgccgatcttcggctccttcttcagcggaaggggtgaaaagctgatcaccctgttctattgtgtgaccttcttcccggtaaccctggtttacggggtggcgctgattaatgcgctgagtaatttactggtggagcatctgcatattaccgccctcagccgtgggccattgtcgtttatcgtggttgctgcgctgtatgtggtgcttagcaagggccgggacagagtcgtggccattatgagcgcactggcgctgccgttcgcggcatctgtactgctgatcgccgtatcacttatcccgggatggcatctgtctaacctgaccgatacggccgctgaaatgaacgccacgccgctgccggtaacgctgaaaaatatctggctgacgctgccgcttattaccttctcgttttgctgtgcgcctatggtctccccgctgagctcttactaccgggagaggaaagcggagggtgagaaaaaggcactgttcgtgatccgtatcgcctacttagctatcttcgccagtatcctctttttcgtgctgagctgcgtgctggggatcccccatgacaactttgtgcgagcgaaggcggaaaacctgaatgtgctgtcggtgatgaagggaaacggtgatttcagcctgatttaccacattgccccgctcatcgctatcatcggtatgacgaaatccttcctcggcgtaggtctgtcggtcgcacaaacgtttggtcagttggctgccagcgtatccggcaaaaaggccaacgccagcaagcggctggcctctctggcgctgttcctgctgacctatggcattgtttatgccaatccggatgtgctcagcctgattgaaatgttctgcggaccactgatcgcggtgatcctgttccttatcccggcgtacctcatatacacccgcccctcgctggcagagcttcgcggcgtgacggtgtttttggtcgtattgggggggctggcaacgctttctgcattgctctggacaatgctttag

SEQ ID NO: 119906 - DNA, 504 bp, Enterobacter cloacae
atgaatttgtatatgttttatgtcggcggaaatgccggtaaatccaatattgaggtccacgacatccagtttgtggcggcacgtaagcccaatgatgcctggcctgcactgcgtgaagcatggtttggtgatagtgataaaattcatatagacggctatagccgtatcacgtgggccgacggatactctgtcacgctttccccggagccgccccagactacgaagagattatttttcgtcaatgcgggtggttacaggccggatacgcttgcagaactgcacgaatatgatctgttcgtcgccgaaaatgcccggcaggctaaggagaaagcattactaactctactttgcggtgtcgatcaacaacataaggataatttaaaagaggttgatgattgcctgttgcttgaaaaggttggagggttgtttattcatctgacaccctgcgatacagggcatcgcgatcttccagagtggcagggatatttaccgataggcgcatga

SEQ ID NO: 119907 - DNA, 1254 bp, Enterobacter cloacae
atggaaaaccgtttattacaggcgaaggcaacgcgtcctcagtacgatcgcgacagcctcaaggcacgcattgttcatttagggtttggcgcgtttcaccgtgcgcaccaggcggtgtacaccgatatactcgccgcagaacagggcagcgactggggttactgcgaagttaacctgattggcggcgaacagcagatcgccgatctgaaggcacaggataatctttataccgtagcagagatgtctgccgatgcgtggacggcgcgcgtggtcggcgtcgtcaaaaatgcgctgcatgcgcaggtcgacggccttgaaaccgtgctggcggcgctgtgcgatccgcaggtcgccattgtttccctgaccatcaccgagaaagggtattgccactccccggcaaccggacaactgatgttcgatcatccgttaatcgttgccgacctgcaaaacccccatcagccgaaatctgcgccaggcgtagtggttgaagcgctggcgcggcgtaaggcggcggggctgccagcattcagcgtgatgtcatgcgataacatgccggaaaacggccacgtgatgcgcaatgtcacctgcgcctacgcgcgcgctgttgacggcgaactggccgactggattgaagcgaacgtcaccttcccgtcaaccatggtggaccgtattgtgcccgccgtcacggctgaaacgctggataaaattgaacagctgaccggcgtacgcgatccggcaggtgtcgcctgcgagccgttccgccagtgggtggttgaagataatttcgtcgccggacgtccacagtgggaaaaggccggtgcggaactggtttctgatgtcattccgtttgaagagatgaagctgcgtatgcttaacggcagccactcgttcctggcctatctcggctacctggccggttatcagcacattaacgactgcatggaagatgaacattatcgcgcagccgcgcatgcgctgatgctgaaagagcaggcgccgacgctgaaagtgaagggggtggatttagctcactatgccgacctgctgatcgcacgttacagcaatccggccctgcgccaccgcacctggcaaatcgccatggacggtagccagaaattgccgcagcgatgctcgattccgtgcgctggcaccttgtccaccagaaacccttcccgctgctggccctcggtgttgcgggctggatgcgttatgtcggcggtgtggatgagcagggtaacgcgattgaggtga

SEQ ID NO: 119908 - DNA, 1386 bp, Enterobacter cloacae
atgactcaagcacaacctcaaagaagtacgtcagatctggtgaaagccgccgtatctggctggctgggcaccgccctggagtttatggatttccagctctactcccttggcgccgcgctggtgtttcatgaaattttcttccctgagcagtccgcggccatggcgctgatcctggcgatgggcacctacggcgcaggctacatcgcgcgtattgtcggggcatttatcttcggcagaatgggcgacagaattggccgtaaaaaagtgctgtttatcaccatcaccatgatggggatctgcaccaccttaatcggcgtcctgccaacctacgcgcagatcgggattttcgcaccggtgctgctggtgacgctgcgtattattcaggggctgggcgcgggggctgaaatctccggcgcaggcaccatgctggccgaatacgccccgaagggtaaacgcggcatcatctcctcgctggtggccatgggcaccaactgcgggacgctgagcgccacggcgatctgggccgtgatgttctttgccctcgatcgtgaagaacttattgcctggggctggcgcgtgccgttcctcgccagcgtggtggtgatgatcttcgccatctggctgcgtatgaaccttaaagagagcccggtgtttgagaaggtaaacgatgccgaagccgttgcgccggttgctgcgcaggatacctcggtcggcgcgatgtttaagagcaaatcgttctggctggcgacggggctgcgctttggtcaggccggtaactctgggcttatccagaccttccttgccgggtacttggtacagacgctgttatttgataaggcgatcccaaccgatgcgctgatgatcagctcgattcttggcttcgtctccatcccgctgctgggctggctgtccgataaagtggggcgccgtctgccatatatcatccttaacatttcagccattattctggcttacccgatgctgtcgattatcgtcgataagagttacgcgccgggcgtgattatgctctctatcatcgttattcataactttgcggtgctcgggctgtttgcgctggaaaacatcaccatggcggagatgtttggttcgcgaaaccgctttacccgcatggcgatctccaaagaggcgggcggtctcgtggcggtaggctttggtccggtgctggcggggatcttctgcaatatgaccgggtcctggtggccgattgtggcgatgctggtggcgtactcgctgattgggctggtctccgctttgctgatgccagaagtgcgcgaccgcgatttgagcctggtggaagatgcagctgaacccctgcgccagagcgataccgcagtgaagcagcggaaatatggagccctgtcatga

SEQ ID NO: 119909 - DNA, 618 bp, Enterobacter cloacae
atgactacccagtatggattttttattgattccagccgctgcaccgggtgtaaaacctgcgagctggcctgcaaggattacaaagacctgaccccggacgtcagcttccggcgtatttatgaatatgcaggcggcgactggcaggaggacaacggcgtctggcatcagaatgtcttcgcctattacctgtcgattgcctgcaaccactgcgaagatccggcctgcaccaaggtctgcccgagcggggcaatgcacaagcgcgacgacggttttgtggtggtggacgaggatgtctgcatcggctgtcgctactgccacatggcctgcccgtacggcgcgccgcagtacaatgccgccaaaggccacatgaccaagtgcgacggctgccacagccgcgtggcggacggtaaaaagcccatctgcgtcgaatcctgcccgctgcgcgcgctggactttggcccgattgaggagctgcgcaaaaaacacggtcagcttgctgccgtcgcgccgctgccgtctgcgcacttcacaaagccgagtattgtgattaaacctaacgccaacagccgtccgacgggtgacaccactggctacctggcaaacccgaaggaggtgtga

SEQ ID NO: 119910 - DNA, 855 bp, Enterobacter cloacae
atgggaagtggatggcatgaatggccgctggtgatcttcaccgttttcgggcagtgcgtggccggcgcgttaatcgtgatgggcttcgtctggcttaaggaaaatgatgacaaggccagaatgcgtatcgtgcgcagcctgttttgtctctggctggtaatgggtattgggtttatggcctcggtactgcatcttggctccccgctgcgtgccttcaactcgcttaaccgcgtgggcgcgtcagcgctgagtaatgagatcgcggcgggttcgatcttctttgccgtgggcggtttctggtggctggtgtcggttatcggtaaaatgcccccagctttgggcaaaatctggctggttgtcagccagatcctgggcatcgtttttgtctgggcgatgacccgggtctatcagattgagactgtcccgacctggtatacgggttacaccacgctgagcttcttcctgacgatggttctggctggtcctctgctggccgcgctgctgctgcgcgttgcaaacgtgacattcaaaagtactcttgctgcgtcagtcagcgcactggcacttatcgtctgcgtggcggtcgtcgtgttgcaaagcaatacgctggggacaatacagagttccatccagcaggctaacgccctgcttccggattatggttcgcttcaggtatggcgcatcgcgttgctggcggcgggtttaggctgctggatctgcccgctgattcgtcgtcaggagccaaaaacgctcggcctgtttgcaggtgtcgtgctggtggcgctgggtgaactgattggccgtgggctattttatggtctgcatatgaccgcagggttagcaattgcaggttaa

SEQ ID NO: 119911 - DNA, 366 bp, Enterobacter cloacae
atgaatgacgtctcacaccgcgaatcgttcgcgttcagcgcccgggtactgggcgcgctgttttatttcgctccagacagcgagcagaccgcgcctctggtgagtgccctgaccgcaggtgactgggttcaggactggccgctggcggagggaaatctgctgcctgtcgccagtatgtttaagaccccatcggatgaagcgttgaaagacgcctggcagcgtctgtttattggcccgtatgccctgatcgcgagtccgtgctgtttggcgattcgaccctcgcgttgcgtcagtggatgcgtgaaaaccatatcgcctttgagatgcagcagaatgagcctgaagatcatttcggaacgttgctga

SEQ ID NO: 119912 - DNA, 885 bp, Enterobacter cloacae
atggcgaagcgggaaaactacaatgagctgtatctgtttatccaggtggtgcgggagggaagcttcacggcagccgcgcaacggctcgggctggcacaatccgggatcagtcgatcggttcgcgagctggaagagcggctgggcgttcggcttctggtgcgtacaacgcgcaaactgtcgctgacccacgccggggagcaactttaccagaccgctggttcagcctttgatgcgctcgataccgggctgaccagactggcgcattaccgccagacgccatccggcacggtgcgtattaatgccagccagcacgccatcgaaaaatgcctgctgccaaagctcgctatcttcaaacagcgttacccggatatccgtctggaattgatgaatgagagccggttcgtggatatcattgccgagcgattcgacgcgggcgtccggcttgggccggaggtgggacaaggaatgattgccgtgcgcatcacgcccgatatggagatggctgtggttgccgctccggcgcattttcggcgctatggtttcccgcagacgcccgccgatctggatgctcatccctgcattgcctaccagtttgccgacggtaaccactatcaatgggagcttgttcaggacgggaagcatgttactcaccgcccggaggggcaatgggccttttccgacagctacatggaggccgaagcggcccggctgggactcgggctggcctatgtcccggttgagctggtggctgacgatctggagcgtggcacgcttatacgcgtcttacagcgctacagcctgcggatggacggactgtacctctattatccacaccgcaacgtgtccccggcgctgagagcggtgattgatacgctgaaaatttag

SEQ ID NO: 119913 - DNA, 351 bp, Enterobacter cloacae
atgtctgcaaccgcgaattggtcatacacggcaacagcgaccatctggcgaaagctggaaggcaatgacgaatacggcgacccgctgggctatgccgaacctgagcaaatcctctgtgattacgaaggtgggctcagcaagaagttagccagcctgggatttgaaatcgtcgttaagaacaccgtctggacagagttcgcgctggcggccacgggtgattacctgctgattggcgtatcgacggaagccgacccggttgtggccggtgccgacgaggtgcggcaggttattcgctatgccgacacgtttgagcgagtggcggatgattacgccatcctgacgggagtgtag

SEQ ID NO: 119914 - DNA, 174 bp, Enterobacter cloacae
atgacatacaaatcagttaagcacggtctaccgcgctcgttcacccgcgtctgggtgatgaccgacaccgggcgggagactaccggctacgtgaaaccggacggggagtggttcatcaactgcccgcgtatccgggcgactggcgcgaaggtgctgcgatggagggatgactga

SEQ ID NO: 119915 - DNA, 381 bp, Enterobacter cloacae
atggcaaccccgcttacgccagaagaaattaaaggcttcctcgctgagttggggtacgccatacctgatgccttgcttacgccgatcctctgcgtggtgaacaagattatcccgtgtctcgatggcgcgggttatgacgagtgcaccgcgaagctgatcctgatgtacgccgccgcgcttatggctacttcgtccggcgcgcgccgcatcaaatcgcagggggcgccgtctggcgcgtcccgctcgtttgaatatggtgacgacagcattacctggctgcgcgactcgttggcccggcttgataccagcggttgcaccggtgagttgcctatcagcgcaggtaatggcgtcggcctgttcatggtggtccggggctgctga

SEQ ID NO: 119916 - DNA, 216 bp, Enterobacter cloacae
atggcactggttaaagtgattagcgataaccttttctccggtgccaatctccagaagttggaggttggtgcaaaggtggaggtcagtgaagagactgcgatcaagtggaaaaccgctgggctggtagaagtcttgtcaggcggtgaccgcaaactggaagtggctacgccaggcaacgatgaagacacctccgctaaatcgaaaaaggcgaaataa

SEQ ID NO: 119917 - DNA, 1095 bp, Enterobacter cloacae
atgcttgtttattctaaatcgctgggcgaaaagaccggcaacctggccgtgaaccagtaccagtttggtatgctgacgcaggagcgtaatgccgctttgaaccatcagggcattaacgtaatgcaggaaatggctgatcgcctgaatgcagttaatcagctgaatggcatcaacgccgttcgctcacctgctgatctgtataaggcatttgaccagaccgtgctgcgtcaattccagccgaacactgagttcacactgttcaacgacctgatgccactgtctcgctcggtgcgcatcaaccagaccgtgtacgaatacgctaagtccggcggccgcatgtgggctcacacctctatgtcaggccagatcggcgcggcgttggatgcggtgcagtaccagtacgacggcacgatggttccggtgcacgatactggcttcaaattccactggcgtgagcctcgcctgaacaacccggatgcgttcgacatcatctctgatgctcaattcgagtccaccaacgaagtccgtcgccagtatgtggattacatctacaacggctatcgtgacgcggaaggaaactacatcaagtttgatgagaagacctggaagggcctgaagaacgatgagcgcgttgcgatggttgatctgggcgcatctggcctgaatatcgacttcaccagcgcctccgccacggcagagcagatccgtaacgcggcgattaagctgcgcgacactctcaagctgaccaacaatcagtacgcagagcagacctggtatgtttccagcgccatcatctccaacctggagcgctacttcagtgacaactaccagtcagacacgatcctgcaagagcttctgaaactgtccggtattgccgcgattaaagaagatgctcagctgacaggtaaccagatcctgatcgttccgctgaccgctggcgtgattgctccaattgtaggccaggcgttcggcactgttgccgacccgcgtccgttctacaacagcgattacatctggcgcacctggggcgctgctggcctgatggttaagaccgacatcaacagcaagaaatctgtcatctacgcacacagctaa

SEQ ID NO: 119918 - DNA, 429 bp, Enterobacter cloacae
atggctaaagacggaaaacacgtaattcacgccggtggcgtattccctaatccgctgctcaaccgtgaaggccgagccaccgcggtcaagcccggcaccctgggcttcttcgatgctggcgtcttcaaggtgtcggtagatggtagcgaaacagcgattatctatgtcgctgacttcgactatctgcgctgcaagacggtagatgacacgtttgctgtcgacgatctgctggtggggatccatccactgcctggcatgttcctgaacgtccgcgctgccgccggtacctacaaaaaaggcgacgctctctcaatcgtcaacggccaggtgaagaaatgggccactggcgaatcagatcgctgctattgcgacgaagagcgctcaatcaccgccgctgctggcgacctcattcgcgtagtgattaagtaa

SEQ ID NO: 119919 - DNA, 1389 bp, Enterobacter cloacae
atgaaacgcaaccgcgttaacgtgctgaccgtcgtcaactccgcttcaaacatcacaactgaaaccatagacggcaagccacatatcgtggttcgcggcatcacgcctgtcgtggacgatatcgtgatgaaccggaagttgtacccggcagcagaaatcgaaaaggcctacaacacgctcgagcgtaacccgatgccgctgggccacccgaaagtggacggcaagcatgtgtcggcgcgtgatgtccgggcggtgaacgagtaccacgtcggggcctggctacagaacgtcagccacaaagacgggaaggtgatgggcgacatgtacgttaaccgccagtacgccgagtcgagcgacaagggcaagcgcctgatcaaccgcctggatgagatgctagccggcaccaactctgacccgattcacatctccacaggactgctctattccggtatcgccgccaacggcgaatcgaagggcaagaagtacaacgagatcgccacaaacatgatgtttgaccatgtggctgtgctgcttgatgagccaggcgccggtacgccggaggagggcgttggcatcttcgttaactcagaaggtgatgagcagcagatcgaagttgcccgcctggctgacggaatcgactgcacccgcgatggcctgatcaacaaaaccaaattcttctttaccaatgcctccaacttttccttcgacgacatccagcgcgcaatcagtgaaaagctgcgagagggtcgatctgatgacaactggctttggccagagtcggtatggcctgacaccttcgtataccgggatgattcccgttatttcaaacagaagtacatcatcgacgatgacggcaaggcccaattcgtcggcgaacctgtagaagtcgtgcgcaaacaacctgagtacgagattaaaaccaacggagagaacgatccgatgaaagagctgattatcaatgcgctgcaagccgctggtaagccgaccgaaggcaagtccgacgccgagctgatggacgcatacaaccagatgaaggccgacgaagccgccgccaagaaaaatggcgacgaagaaatcgacccggcaaccggcaagcccaagaaaaaagagcaggctacaaataacgaagagatgccagcgtgggcgaaaacactagccgatcgcgtggacgtcgttttcaacagtctgaacgcgaacgccgacaaagagaaaggcgaaaagcgcgcggctgtgaaactggcgatgaacatgagcgatgaagaagtcgcagatctggacggcaaggcgctcgacgctatgtacgccaagtgccagacctctttcggcctgaacggtgcattccgcaaccaggctaccaacacccaatcagtcagcgaaatgccggagtaa

SEQ ID NO: 119920 - DNA, 987 bp, Enterobacter cloacae
atgatgatgacagcgcaaaccagaatcgggacgccaatcgtaccgcgtaataaagctgacccgacgcaatcatcgcggcaggtcagtcggatgttcaatgatatcgaagatcggtatctgaacatcaagcgcaggcttaaggctctgtttgagctgcggctgactgggcagcaacgtgaggcgaacgcacagcagtcctggatgatgtgcaacaacgagggcgcagaaccttcgctgtatcaagtcaatgccggtaagttcgtctatgacatgacagctgctgaattggccgatctgctccaggtggtgcagtcgattcttgatgatgagcttcttgaaggcggcagccagaacctatgggcgatggactacgtcattgcggaatatgaccgcggcacgctaaacgccttcaccaacctgtcggtgcagtcgcaggcgtacgccagtcagacgacgctccagcagcttttaagcagcctcggctacctgaaccagatagcggcggcaagactgacaacgttcagtgactggaaggtcatcagcgacaccgcccgcggcgacctgacaaacatcatcaccgatgcggtagcgcgcggcgtgaatcctcgcgagacagccagcgtaatcagtaagcgcctcgatgtgtccacgtcgaaagcgaaaaacatcgctcagaccgagcaggtcggcgcgctgaggcaggcacagtggaacgaaaccgactgggctgctgacaggctggggctaaatactggcctgctgtggctttcagcactcaagccaacgacgcgtacctggcacgccagccgacacggtaaggtctacaccaccgaagaggtgcgggacttctacgctcagaacggcaatcggtacaactgctattgcagccagatacctgtgctgctcaacgacgacggcagcatattcaacgaagggctggcggataagctggcgaaagaacgccagctctggaataaagctaaataa

SEQ ID NO: 119921 - DNA, 1449 bp, Enterobacter cloacae
gtgagtgaaataagcaccggggaacagttcctcgttaatgcccttgctgatgctttagggcggcagcgcatgctgtacgcgggccagccgggaaataccaaacgcacaaagttgtgggatgagttcggttatccaaatagtctcgagttcgaccgctactaccgggcctatgagcgcaacgcggtggcgtttgccgccgttcataagcttcttgattcgtgctgggttgataacccgacgatcatcgacggcgacgatggaaaggagtcaaccgagacaacggaatgggagaagtcagctactaaattgctgaagaaacactggccgaaaattaaggatgcggatcgccgtaacttggttggccggtactcggcattgctgattcagtttcgggacggaagagagtggagtgagccggtagacaggtcggtggtgtcacggctgaaagacaaggccattgttaagctgatccccgcgtgggaatcccagatcaagccaggtaatttcgataccgacacgctttcagaaacgtatggccagccagtttcgtacagcttcaacgaacagccagttggtgatgatggtacgtacggcccggtgcgaggcgttaccgtacaccccgagcgaattatcatcctttgcgaaggttcagaagacgagaacatgctctctggcgtgcctttcctgcgcgcgggctacaacaaacttctcgaccttgaaaaggtatcgggtggtagtgccgaagggttcctgaagaatgccagtcgccagctcgggattgcgttcgacaaagaaaccaacattgcgaacctgtcaaagcaagccacagacgctggctacaaagacctgggcgaagcgctcaacgacaaagtcgccaagatgaaccgtggcactgattctgccctggtaatgcaggccggcacgccgtcggtgctttctgttgcagctgccgatccatccccgacttggacagtagctgccaacgagtttgcatcttcgattcagtgcccgttcaccatactgtttggtcagcagacggggcgccttgcctcagatgaggacaaaacagactgggcgaagcgctgtaacggccgccgctggggattccagtcgacggttattgagagtgtgcttgagcgcttctggacagtaggtgtcattgacccgcctacatccggagaggttacgctggcatggtctgatctgctcgcgccgagtgagaaagagaagattgccaacatgcaggcaatggctgtcgtggcgaaagatacccaacaggcatacggcactccggcagtggatgaaaacgaaatccgcgcagttggtgagcttgagcctcgcaaggtcgtgcagccacctaaccctgatgtaaagcaaaccgataaggatccgctgacagatgatgatgacagcgcaaaccagaatcgggacgccaatcgtaccgcgtaa

SEQ ID NO: 119922 - DNA, 1473 bp, Enterobacter cloacae
atgaaacctgagcacatcaagctgctttccaataaagactggcggcttaacaatctttactggatcaccgacaaagagggtaagcccacacgcttcaggatgacacctgagcagcgggagtactttgaggggatccacacccgcaacatcatccttaaggctcgtcagctcggtttcacgactgaagtgtgcatcatccagctcgacgcggccctgttcgagtcagctaaatgcgcgctgatcgcccatacgctgaatgacgcaaagcgcctgttccgcgaaaaggtgaagtacgcatacgacaagctgccagcagagataaaggcggccaacccggcgagcaatgactcgtctggtgaactggtctttaagaagggcggctcgctatacgtcagcacgtcgtttcgtggtggtacgctgcgctaccttcacgtttccgagtttggaaagatatgcgccaagtatccggacaaagcccgtgagatcgtcactggtgcgtttgaggcggtatcgacgggatgcttcgctactatcgagagcacggcagagggacgggcgggttacttctttgattactgccagacggcagagaaagcgttgctacagggcaagcccttatccgcgctggactggaagtttttcttcttctcctggtggaagaacccgcagtacgcaatcgacacggtagagtctctgccggtgcgcctgcttgagtacttcgctgaaatggagtcgaagcacggcgtagtcgtcaatgatcgccagaaagcctggtactacgctaaagagaaaacgctcggcgatgacatgaagcgcgaatacccgaccattccggccgaggcgttccagcagtcggtcgagggcgcgtactacgccaagcagttccgctggctctataccaacaagcggatagggcaaatcccggataactcacatctgccagttcatacattctgggatatcggtgtgggcgactccacggctatctggttcgttcgtgaggttggcgaagagttccacatcatcgactactacgaaaactctggtgaaggcctgcggcactacatgaaggtgctgaaggataggggttatgagtacggtgagcactgggggccgcacgacatcgataaccgtgaattcggtgctgacgccaaatcccgcagagaacttgcccgtgaagggtatgaaatcgacgggcaggtttacagcatgacgtttcaggtggttccgaaagtgggaatagataccggcattgagtcggtgcgcgaaatcctcccgtcctgtgtattcgatgaggagaagtgtgccgagggcatatctcacctcgagggctaccgcaaggagtgggacgacaagcgcggctgctggaaagataagccgcttcatgacttcacatcacacggcgctgacagtttccgctactttgccgtagcgaagaacaaccacaaacaggtcggcgcagtattcttctaa

SEQ ID NO: 119923 - DNA, 603 bp, Enterobacter cloacae
atgagcaaaccggactgggaggccatcgagacggcgtaccgggccggagtgatgtccctccgagaaatagcatcacagcacggtatcagcgaaggcgctatccgtaagcgtgccaagcgtgatgactggtcgcgtgacctgaatgcgaaggtgaaagaacgagccgacgatctggtacgcaaagctgaggtacgcaaacaggtacgcagtgaagtcacttttaatgaacgcgtactcatcgaagcgacggctgaggtaatcgccaatgtccgtatggaacatcgcggtgacattaagcgtgcccggcagataactaatgccctgtttgatgagttgggtgcagagtgcgcagacgtgtccgcactggagaagctcggagagctgatgttcgaccccgacgacaaaggccaagacaaactcaatgagatttaccacaaggtcatcagcatgccggagcgcgttaagtcggttaaggcactgagcgacgcgctgaagaatctgatcgggcttgagcgacaggcctacgacatagatgggcctgaaggcgacaactctgttaagcaactttctgacctgatggatttactgtctcagggggcgtaa

SEQ ID NO: 119924 - DNA, 219 bp, Enterobacter cloacae
atgtccgacatctaccaaatcacgttaaccacccaaacaggcgaaaccttcacgggcaagatgtcacgacgtcagcctgagctggtaaacggttttgtgccgctggcgaccgagacgggcgagtggttgtatttcgctccggccgatgtgaagcgcgtgcagttcacgccagtaccggcagagcaaaccgaacagccagaagaacaaataacggagtaa

SEQ ID NO: 119925 - DNA, 432 bp, Enterobacter cloacae
atgaagaagttgatgactgctgcttttgtattcgtgctggtctgggggctgtttggcctgctggtttacgcaacactacagggcgaccattcactgatgagcatcgtcgtggcggcttactgggcgattatagctcttgcttgcttcatctcgcctctgttccttgtggctgtgttcatggccgggaaggagagtgaccccatggagcgtgccaagctgttaatccctctaaaggactattacaaacgcaagggcgcgatcagaaggctcattggacttgtgactatggcggccatcttcgtcatgctgtcttactccggatgggtattcacatcgctgttttacatcctggcatgtggctttgtaacgctgcttaattcggtcggcagagacaagttcgaagaactgacagggcacatcgttaagttgtga

SEQ ID NO: 119926 - DNA, 231 bp, Enterobacter cloacae
atgtacagcagaatgttaaccgcatgcctgatgacgatgttgatcgcgagctgcgtgacacgtggaagcgtcccggtggtggttgatacagcctgtgactgggtaaagccaatctaccttactgatcacgacattgattttcttgaccgccagacgaagcgcgacatcctggcgcataacaaagcgtggcaggcgaactgccagaaaacaaaagaatcgggggcaaagtga

SEQ ID NO: 119927 - DNA, 543 bp, Enterobacter cloacae
atgaccaaagacgatatctttaacaccatcctcggcaaagagggcggttatgttgatcacccgaatgataagggcggaccaacgaactggggaattactcaggcaactgcccgcgcgcatggttataccggtgatatgcgaaaccttacacgtgagcaggctctggcgatccttgagtctgattactggtatggccctcgctttgaccaggtggcagaagtatccccttccattgccgccgaactttgcgataccggtgtgaacatggggccatcggtgcaggttaaatggttccagcgctggctgaacgttttcaataaccagcagcagttctatccggatctgatcgccgacgggcaaatcggcccacgtagcatcagcgcgctaaagtccttcctggagaaacgaggcggcgaaggggaaatcgtattgcttcgcgcactgaactgtagccagggccagcgttatcttgagttggcagaacagcggccggctaacgaatcattcgtttatggctggatgcgcgagcgggtgagcctatga

SEQ ID NO: 119928 - DNA, 276 bp, Enterobacter cloacae
atgacatggcagcttcttttgatggatgcaaacgccatagtttgcctgttaatcatggtcaggctgatgttttttcgaaaagagggaaagcgtcatcgcctgagtgtcgcggtgctggcctatctggtcatccttgccgccggattcaatgccttcaacattctgctcggccactacgtacaggttaacctcggcgacctgctgcttaactccgtcatctgcatggcggtgtggctggctcgcgggaacctggcgaaggtcgtcattacggaatag

SEQ ID NO: 119929 - DNA, 402 bp, Enterobacter cloacae
atgtctgagaccttcactatcgtaggcgttggtcttacatcgtcatcagtcggtgtaacctttgccacgctgtttccggaggcgactccagcagtgatgctcgggtcacttgcaggaacggcgttatacgttctgacctcagacccccatcaactctggaagcaggctatctttgcgctgatatcgtttatcagtggcgtgttcttctccgtacccatggcgaaaatcatggccggaatcattaacacgccgttaagcctgatgaagccaccggccagcattgaagtatcgccagctgtcggtgcaattgttactgcttccatttccgtggcagtcctgctgcgcattctccgcaaatccaaaagcgggaagatgccggggctgggggaggaagataaatga

SEQ ID NO: 119930 - DNA, 477 bp, Enterobacter cloacae
atggaccaagaaactcttaaatctattcttaagtacgacgccttttctggtttgttttcatgggcagtgaaaaggcagaaggtggttgtaggaagcgttgctggaagcaaaaattctcttggctatgtgcaaataaaaatttctgggaaactttatcatgctcatcgccttgcatggctctacgtgtacggatatatgccagaaaaagagatcgatcacataaacagaataagagacgacaacaggattgccaatcttagagaagcaaccagccaacttaactctcttaacactggtatctataaaaataacacatcaggtagcaagggtatttattataacaaaagagcaaaaaagtggcaggcacagattctcatcgatggaaaacgggagtatttaggtctctatgatgatttaaaaagagccgatatagcatttagacttgctaatcacttcagacttgcaaaaccgaactga

SEQ ID NO: 119931 - DNA, 684 bp, Enterobacter cloacae
atgaacagtcagcaactggaatacgtacgtcagcagctcattgtggcgaccgcagatctgagcggtgcgacgaaagggcagctggtagctttcgccgagaacgcgcagttcaccgcgacggcgcgcagccgggggcgtaagaaaatcaccgacccggtcaccggccgaaaagttaaccctgacggcccggcgatgagcggcagccagtcccgcgcgaagggatcatccatcgcgctggtgggcccggttgagttcgtgaccgcatcctggcgccgcgccgtgctatcgctggaagagcatcaaaaagcctggctgctgtggaactacagcgagaatatccggttcgagtaccaggtggcgatcactcagtgggcgtgggcagagttccgggagcagctcggcgcgaagaaggtggctggcaagacgatggagcgcctgaagaagcttatctggctggcggcgcaggacgttaaagcggagctggcagggcgtgagacgtacgaatatcaggcgctggcagagctggctggcgtggcgaaatcgacctggacggaaacgtatctgcctcactggctggcaatgcgtaacagctttaagcgactcgatagcggtgcgcttatctcagtaacgcgatcgcgttcacaacaaaagacgacaaatttagatttgagaggatataagtaa

SEQ ID NO: 119932 - DNA, 642 bp, Enterobacter cloacae
atgcgtaaaccatcccgccgtaagtgcaaagtatgcggtgaatacttcgtgccgaaattccacgacatccggatccgctggtgcagcccggagcacggcgcaatcctcgcgatggaagagcgcgaaaaggagaaggtcaaggccgcggctaagcgcatcaaagagcagaaggaagccgagaaagcagggcgcaaacgccgcaaggagcgactggcagagctacggcctgccggttactacaaggcgcaggctcagcaggcattcaacgcctacatccgcgcgcgtgatgctggtttgccatgcatcagctgcggcgagaccaatcctcccgatctgcacggcggccagtgggactgtggccacttcaagacggtcggtgctaaccctgagctgcgatttgaagaacgcaacgcgcataagcagtgcaaatcctgcaatgccggggccggcaagtacaccgccaaagaggcgacggtcgcgcagcaatacgaagctggtttggtcgcacgttacggccaggaatacgtcgactggctcaatggtccccacgaaatgaccaactaccgccgtgaagacttcatccggatccgggatgagtaccgcgccaagctcaaagcactgaaacagcgggaggcagcatga

SEQ ID NO: 119933 - DNA, 171 bp, Enterobacter cloacae
atgggtaatcctctcgcacgcgtcatcacaaacgaaatcttccgcgttccgactcgccgtcagcgcaagccagcggttaagccgtccgacatcccgaccctgaaggactacaccgcccgtctggtcgataagaaatggctgcgtctagcggctcggaggaatcatgcgtaa

SEQ ID NO: 119934 - DNA, 456 bp, Enterobacter cloacae
atgaagcagaacttttgcatcgttaacgacactgttaaacacaacctcattgaatacattcgaaatcttccggtaaatcctcgcgcgccgatggttgtcgagatcagggaagagacacgcacagacaaacagaaccgtctgatgtggccgcttctgaaagatctctctgtccaagtcgtctggcacggagaaaggcttgaaccgaaggaatggaaggacttgatcactgttctggttagccagatacaggacccggagagcgagcagaaatccgcgccgggcatcaacggcggccgcgtttatttcggcgtccgcacatccaaatccagcaagcgctacatggtcgacgtgatcgaggcgatttactggttcggcaccgaccgcggtgtgaggttctccgaagcatccagtaagcgcatcgcctgggcgcaagagtggaggacttcccatgggtaa

SEQ ID NO: 119935 - DNA, 714 bp, Enterobacter cloacae
atgagcgaactaaccaaagaatggctttcgcagaaaatcgcagcaatggaagctgcccgcaatgaaatcccgttcggcctggacgaagacgacagcaacacgctggctgctctgcgtatcgcgctggcatcgctcgaagcggagcctgttgaagtcacctttgctatggcgatggattttcatcatgccctcaacgatggcggtataggtaacgatgatatcgaagacatcatgattggacttcgggcagcattcgctaatatcaccgccccatcagcgccggtatctgtgcctgatgcgatggatgaccagggaggtgtttgctgcgaggtttcgtacgcggatggatggaacgcctgccgcgccgccatgcttcagggtgccgaaaacgccgagtcgccaaccactatgcagaccgcgccagaactggattattcaccaaaaaacgccgagtcgcccaccggcataaatcagggtaaatccgaacctgtaacgacggcttacaagttgccagaagggtgggtggcggttccggttgagccgacagaagacatgatcgtcaatgggttagaatcagagcctaatgagagctttagtgacgagaaggtatgggaagcgtacgacgctatgagtgggtgccagcaggcggcgcaccgcgcgaagctgtgctgggcggcgatgatttcggcagcaccaaagccagatgtacggtaa

SEQ ID NO: 119936 - DNA, 174 bp, Enterobacter cloacae
atgaaacagggtgacattatcgagagcatccacaccggaaacagattcatcatcgaatacatctctaacgatggtaaaagttttgtgctggtctatcaaaacgatgcagttcagccgtctcggagctattcggaccatgatatcagacgcagtttcaggaaggtgaacctatga

SEQ ID NO: 119937 - DNA, 456 bp, Enterobacter cloacae
atgagcaacatcgacaaacaggcgctgcgttggaaagcagagaaagcgacgcagggagagtggtggtcagactcgtgcggtaatgaaggagcatatggttcgggcgaagactgcgtggaaggtttcacatcttatgctgtctacgacgaaaataatcaaatcctgctggatacactcaactctacgtcggcatgcattcaggaagaatacgacggggaatgccatattgcctgggatgaagttgggcagcgcaatactgagttcatcgccgcagctaacccaaaaaccgtgctggcgctgctggatgatctggaagccgcagaaaatataaccgtcgaaatgccaaccttcgacggctatgtgccagacgttgcgcgggaacttcaagcagcattccgtattgcctgcgttgacgctggtatcaaaatcgccgccagcagccctaaaggagagtga

SEQ ID NO: 119938 - DNA, 297 bp, Enterobacter cloacae
atgaaaatttacatcgcaggaccaatgacgggttacgaaaattacaaccgtccgatgtttaacgcagtagcacagcagatgttatcaggtggtcatgtggcattaaatccggccacgctcccggatggtttatctcagcgtgagtatatggacatctgcctggcgatgcttcgctgcgccgacgccattcacatgctgcatgggtggcaagagtcggaaggtgctgtcgctgagcatgccatggctaaaaagctgggaattaaaatttcttaccaatttgaaggagccgcccaatga

SEQ ID NO: 119939 - DNA, 249 bp, Enterobacter cloacae
atgagcgaatggagtgattatcgcttgatggttaggaccatggcgaagggtaacggtgtaacgctcatcagcatcgccaggcactgcggcgtatcgaacaggaaacttaatcagattctccaggcggggccatccaaagaacaggaagaactcatagccgaagctctggggtgcgcagggtgtgaccttgcggaaatccacaggcaaatgggcgagttatcagacaagtacgggagggcaggggtatga

SEQ ID NO: 119940 - DNA, 1374 bp, Enterobacter cloacae
atgagccgttttattgatttatacgttgagcaggccgtcattggcggaataatgcttgcagcaggtcgcgcagatggcgccgacatggctaccgatgcgattgagggcctgactgaggaccacttcacagcaacgccccataaagtggctctgcggtcctataagcgactcaacgaatccggttcgaagatagacctgcttacgctgaccagcgatcttgagcagctcggggtgcttgagagtgcgggtggtttcgcttacctggctgaatgcagcaaaaacactccgtctttcgccaaccttgcagcctactgcgaaaagcttcgtgaaatgtaccttggtcgccgtatgaccatggcgttacaggttgggatccagaagctgtccgaaccaacgaccgagggtattgctgacatcattggcaacattcaggccgacatctctggaattgagcacagcgctgactacggaactgaacacatcaccactggcatcgacatgtcgctggaaacaatccaggcgatcatcaatggcgacatctggaaatataaaacagagctcggcatgtcgaccatcgatagcgctttcggaggattcaacaatacggattttatcgtcgttggcgggcgccctggcatggggaaaaccatgtttagcaccacagtgacagaaaccgtaggcctgaaaaacaaaaagccggtgctgttcttcagtctcgagatgccagtggaacaaatctctgagcgagtcgctttccaccgggcgcgggtaagcaaagaagacctgctgagcaaggttagcggaaaaatggacgaggcatggggaaaggttagtcactgcatgaaggagttcatcgactctccgatctacatcaatgacaagccatccctgagcgttcaccaggtgcgtgcggaagcgcggcgtatgagtaagaagttgggcggactgggcgtggtaatcgtcgattatctccagaagatgcggatgtcagacccggagaacatgaaccgcagcgtaggggagatcgccactggcctgaagaacctggcgaaagaattgcgttgcccggtcatcgctctggcccagttgaaccgaaacctggagcagcgcgctaataagcgtcccgttgcggcagacctgcgagagtctggcgttattgagcaggaggcagatgtgatcttcatggtttaccgggatgagaagtacaacgaaaacaccgaactgaaaggcattaccgaaatcatctgtgtgaagtcccgccatgcgccgggggcagaaaagacctaccacttcagcagccgctactccggcctggacccggtagatttcacctacagcggccagatgcaacaggaggctgactatgagtgctaa

SEQ ID NO: 119941 - DNA, 147 bp, Enterobacter cloacae
atggcaaaaaatccacgctattaccataccgctgtacataaaaacataacccgcgacctcttcatccgctcggttaatccgattgtggcagagaagatgcgcgccatcctggaagaactgaaacgtaaggagagtggccgtgggtaa

SEQ ID NO: 119942 - DNA, 546 bp, Enterobacter cloacae
atgcattcacttgcgtatcaacaaggtaacaaattttcgccaactgcgatgatttaccagaatcgccgggaacctgattccagggcgttaaacatcgatgggattcgtgcagctgttcgcgcctgggcagctgattgccgcagccgtgaatttgtcgcggcgctgattgttgaagagtggcgggcaaccggcggcaccggtctggatatcccgactgactcgcaccgccagatgcagaaggtattccgctggattgatggcgacaccgaatacgccgccaacaacattcgccagctggccccggcaatcatggccgtcctgccgctggagtaccgccatcgacttctcccagaggacagcttcatgtcccgcttagcacgacttgagaaggaaacgagtgaggcgaaagtggccgttgcgatgaacgccccgcgtcaccagaagctcaaggaactcagtgaggggatcgtagagatgttccgtgtcgacccggacctgaccgcgccgctgatggccatggtcacttcaatgctggggggtatgtga

SEQ ID NO: 119943 - DNA, 693 bp, Enterobacter cloacae
atgggattctcggagcgcttagcgcaggcaatggaaaacgctggatatacacagggtcgattagctaaagaggtcgacatggctcagtccagcgtaaataagttactaaagaatgctaaaggctctcgaaaaaccgttgagattgcctctgtacttggtgttcgccctgaatggctttctactggtgagggggaaatggctgccggtggcgccagagagccaactgcgctataccaggttaagccgtcactgaatgggatttatcgcgtggatgtactcgacgttaaagccagtgctgggccaggcacactggtaaccagcgatttcattgaaactatccgggccatcgaatacacaactgaacaggcgcgcgctttatttggcaaccggccagctacgcacgttaaagtcattaccgtgaatggcgacagtatggatgggactatttcgcctggtgatcagatcttcgttgataccggcgttacgcattttgatggtgacggggtgtatgtctttgtcttcggaaaaaccctccatgttaagcgtcttcagatgcagcgtgaccgcctggcagtaatatccgataacccgatttacgaaaaatggtacgtcgaacctgaggatgaggacgcgttctacgtgatggcgaaggtgttgctcagacagtccatcgactataagcgcttcgcatag

SEQ ID NO: 119944 - DNA, 375 bp, Enterobacter cloacae
atggaccataaagaatgggttgataagctccgctggctaagcccagagcagatcgttcaggttcactttggacttcaggaggatatcaagaaatattacaagctgaggggagagggcgataacctcgcaagggccgagcatttatgcgaacaaatgattgcgctatctgaattggcgtttccggctttgcgtcatgctcatgacaaaagggtggaagagtacgaatcgttaactggaaataagtatcccagtgaattttatcctccgtcacattatgggtactctcagttgtcagtcatcctgaaaaaaagaaaggagtttcagcgtatagaggatatacgtgaaaagttgattaaagagggttggagatgctag

SEQ ID NO: 119945 - DNA, 348 bp, Enterobacter cloacae
gtgagagtggcgactcagtgccagtccaccacaccgaccaaagcatttctcccgcatcagcgggtaacgacagagggtaaagcgatggcaaaagttgttctggtctggaatccacagaagacagagtgtgtcggttttttagagcgagaacctgatggttccacttgggattgtggatcagatggtgacgcggagcatgcagctggcggtatgagatggaatccagtttccactctcgccgatagcttcagggagcaatacgaagacgttgatgacgaatgtttcatgcagaccattgaagttgatcagtcattagccgacgcggttgaaagagaaaaagaagattaa

SEQ ID NO: 119946 - DNA, 249 bp, Enterobacter cloacae
atgagcaacccaatcacagtaggttttacaggcctgacgaagcgaattttcgcgggtcgttcaaagccgagcaaattggcgcccggtgttcgcgagttcaccggtgagaaatttgatgtcacagacgaggcgctatttgcagtggcccatcttctcgcggttcgcgatgacatcctgatattcccgacagctgatgggaaagagattcacctccgcgccgacatcaaagaaaagcgggaggcatcatga

SEQ ID NO: 119947 - DNA, 159 bp, Enterobacter cloacae
atgacagtcacccataacggaaagaagtacaccgccaaaaagctcaacgataacgagtggcagctgacgtccgtatcggcaccgcgtgaaaagctgacgcttaaccgctggcagatgcatatggctggcctcctggtacaggtagaggtgaaggtatga

SEQ ID NO: 119948 - DNA, 207 bp, Enterobacter cloacae
atgattggaatgcactacggcaccgcatcagtgccacgtagcgaggttttaccgggcacaatgctgcaacaccacggcaaaacttatcgcgcctctgcgaacgttgagaaaggcctgtacgccttcaacatcttcgaaaaaaccatcatcaaaagtgattccgtcgttgtgctgctgaatgagcgcggcgagccaatggttcactga

SEQ ID NO: 119949 - DNA, 279 bp, Enterobacter cloacae
atgaacacatacctcacttacgaccgaatcgaagatcggcgctgggttgaacagcaactcgacgacgagaaagagaagtggatcgacgaccgggctaaagaactgatcgccatgttccctgcgaaacctctggaaatgagcagcttgttcctgccccaggaagcccagtttgcgcttatcggagaaagggccgaagaggcatacaacaaatacatatcggcctgcgcgcatgcccgcgccgaagaagaatggcagcgccaagcgccctgcccgttttaa

SEQ ID NO: 119950 - DNA, 915 bp, Enterobacter cloacae
atgagcttcgatctgattcagttcgttaaggagcaggagccgctgtttgtcggtgcccttaccgaccagtctctgacgtgggcaaaggaatgccagttcgctatccagttattccagcgtaatcaaaaattggcagaaacggcgattgccaaccccaccagcgcccagaacgcgattatcaacgttgcagctgtcggcattagcctgaaccctgcaagcaaactggcttatctggttccgcgcgacggtatggtctgcctcgatatcagctatatgggccttcttcacatcgcccagtcagttggcgtcatcaagtggggtcagtgcaagctagttcatgcaagcgacgactacgagacactaggtctcgataaggcgccagctcataaatacaacccgtttgccacgcctgacgctcgcggcgccgttatcggtggctactgcacagttaaaaccgctgatggcgactatctgactgaagagatgagtctcgctgagatagaagaaatcaggaaagtgagcaaagcgggaacatcaccaaaaggcccatgggtcaacttctggtctgagatggcaaggaagacgatcgtcaaaagagcctataaatactggccgcgtgctgaccgtctggataatgccgtcgatgtgctcaacgaaagcgaaggcatatacaccgagccagttatgccatacaccccagaaagcgaaatcatccagtcagaagaaaacgcaaaacaggaacttaccaacaccatccagtcactatgtgaggacatgaagcaggcgaaaaatatgcatgctctcaaaacccacttccaggcagcttacaaaatgacggtcggaatgcagcttcaacaagaggtgcaggccgtctacgccaagtgcaaagcaaaattcgaagaggttacgcaatga

SEQ ID NO: 119951 - DNA, 483 bp, Enterobacter cloacae
atgacagctctttaccagatcgccaatgatttcgcaaagctgactgattcaggcatggagcctgaaatgatagccgacacccttgatggcattgagtgggaactggaagcaaaggtcgagcagattcttgctgtttgcaaaaacgaatctgcttatgccgaggcgctgaaagaagaaagcaagcgtcttgcagagcgcgcaaaagccgcagaaaaccgagtgtcgagcatgaaagattatgtggctacctccctcgaaacagcgggaaagaaatcactgaaggcaggcattcatcaggtaacggttcgcgcgccgtctaagtccgttgaaattacggatgccagcgcgcttcctcctgaattcgtcgaatacgagacgagcatcaagccagacaaattggctatcaaacaccaaatcgaagctggcgtggatgtacctggtgcgcaaataaaactcggcaaaccttcactcattattaagtag

SEQ ID NO: 119952 - DNA, 153 bp, Enterobacter cloacae
atgactcacgctcacgacgacatcagtgttggcacgctgtgccttcccttcattggtaacggctggctaatgccatggggtgaagtggtcagcaatccattaaaggcgcagcggctcgctgaggaatatcgggaaaggcaggaggcggcatga

SEQ ID NO: 119953 - DNA, 192 bp, Enterobacter cloacae
atgaacagagcctcacccgttgatttgagaaaaagcctcgaaatcgccaaccacctcgcacatattgggattcgtttcgtgccgattccggtggcgaccgaggaagaattccagacgctggccgccgagctatctcgacggcttgaaaatatggcggtcgaagccgagaagaatgaaggcggtgcagcatga

SEQ ID NO: 119954 - DNA, 216 bp, Enterobacter cloacae
atggacatcatcgacacagcaacagagattgaagagcttcagcgtaacgctgccctttccgctcaccgcatcgaccgcaacgccgtatcagctgagcgttgtgcggaatgcggggaggatatcccggagccgcggcgcgctgccgtgcccggctgccaaacgtgcgcggagtgccagagcgttatagagctgaagaataagcagagggggttgtaa

SEQ ID NO: 119955 - DNA, 240 bp, Enterobacter cloacae
atgttcaggataatccagcctaatacctggtacgccgatccccacggcgcaccctgcaaaatcctccgcgcaacccatgaagtaatccactacatccgcaacggccgcacctgcattgccagcatgggccgctttcagcacgaattcgagccactgaccaaagcacaggctgagcggatcgccgaagaaatcgaaacagcagaacacctgaagaagctgcgcgcccagcgtgcggcatga

SEQ ID NO: 119956 - DNA, 618 bp, Enterobacter cloacae
atgtcagaccaaagcaaattttatgattattacatggttgagggcgatgaagtgaagtcgcttattgcaggttatgacgatatcggagagcagcgtaactctattctgcccgaagcggccggcaaggtcggtgctattgcgtggacaacttccagtggatggggtggcggaggcggcttgcttaatgggtttgtgtgggataagggatatcaattcccctgccctatgaccattaagcgtgaagaaatgtttgatggtaagcgggtagtgctggggagagggaaagggaatacgaaagagggccgggctttcaacaaagagctcgatgcggtaatggaagaggccaacaaaaaactgaaatctttgcctgagtggaaagactacatcgttaaccactacggcattatgcgaactggtatcggaggacagtctggccgtggcttcggtttcgcgatgctatccacgtatggcggtaagcacccgggtcgtgatgactgcctggtattcgctatcccgaacaacaaagaagagcgccacggtgaagtagagataccgggaaacttccagaaaataacctacgggcagttttacgacatcgttaaccatccgaatgaatga

SEQ ID NO: 119957 - DNA, 447 bp, Enterobacter cloacae
atgatgccgcgtccgtctctgtatgacatgctgtacggtaacttcgccggcgggcttgacctgcacagcgtcagtgaggagaaccagctgattttatcagtactcgataacatgcagcgcatcctcaactgccgcgccggtacgctggcccacctgccggactacggcctgccggatatgacaaaaatcctccagggaatgcccgggacagcccaccagctgattaccacactgtcggccgtgttgctgaaatacgagccgcgcctgagccggattaacgtggtgatgcaggaacagattcagcccggtgaactccgctacgccattgacgcggagctgaagggggtggggctggtgcgctacggcacagaatttatgcccgagggcagggtattaatccgtcatctgaaacaacagcaatacctcgatgcacgagccgccatctag

SEQ ID NO: 119958 - DNA, 531 bp, Enterobacter cloacae
atgaagatggcgattaccgctggtaaagcgctggcactctctctggcgaccctgttaaccggctgcggcctgacgcagaaagtgacggacggcaccgtcgccgtcacgaagtccattttttacagagaggtgaaaacccttcacctggatattcaggcgcgcgaaggggtgaacaacaacgcgaagggggcatcgctggcaacggtggtgcgaatttaccagcttaaagagcgtaaggcgtttgacagtactgactatccgtcgctgttcgccagtgacagtcaggccattaaagccgatcttgtggcggaaaaggatatccgcctgcgccctggcgaatcggtgaccctggatatgccgatggaagagagcgcgcaggttgtggcggtggcggggatgtttatggcaccggaccaggtaaacgatacctggcgtattaccctgacccgtgacgaccttgacccggataaggcgcgggttatcgaagtcagtaataatcgtctgacgctgaaaccgctggagggggaatga

SEQ ID NO: 119959 - DNA, 1050 bp, Enterobacter cloacae
atggcgcaggtacggcaccagttgccgtacatgaatttttaccgcttctgccagttgctggaacagagccagccggagatgccggtgcccggcagcgactggcgggtgcggcaggagccggtgcgttttcgcccgcatccggggatggggtttccggccggtgaaatccacagtacagaagacccggaacatccgcatctgccgccgtcggtgcgtgtcacctttatggggctgtacggcgtggagtcgccgctgccgacccactacaccgacgatatcgctcagcgacgggaagggcacgacgcgacgcaggattttctggatattttcagtcaccggctgattacccagtattaccgcatctggcgtaagtattcgtacccggccacctttcaggccggcggcgctgacaacacatcacaatacctgctgggcctggcggggctggggataaccggctgcgcgaagaccgctggtacgccgctgtcgcgttttctggcgctgctgccggtgatgatgctgccgggacggacggcggagggaatgggggcgctggtgcggatgctggcgccggatacccgcgcaacggtgtatcaccacgaccgctgccgtatcccgctgaagcagccggttgcgatgagtacatgccagccggtcagcctgaagcaccgtccggtgatgggcacgcatgccacggatgtgaacggccaggtgctgttgcgcctgagcacggacaacccggaagaggtccggggctggctgccgggcggcgacctgcacgccgacctgatggcgctgctgcacgtgtggctgggcgcgcacctggatgtacgtatgcagttatgcgttgcccggcatttactgccggatgcgcggctgtcctgcaatgcggaacagaccgcgcaggtcgggcgcacggcggtgctgcgtcccctaaatgcgcaacagaacagaaacgacattatcaccattcaccttggacgctttcagagcgtccgggaaaacattcagcgaaggaagaacgatgaagatggcgattaccgctggtaa

SEQ ID NO: 119960 - DNA, 1764 bp, Enterobacter cloacae
atggaagatttaaccctgcgttattttgacgctgaaatgcgttacctgcgcgaggcggcgaaagagttcgcgcagacccaccccgaccgggcggcaatgctcgatctcgacaaagccggcacacctgacccgtatgttgaacggctgtttgagggcttcgccttctccatgggacgtctgcgcgaaaagatagatgatgatctgccggagttgaccgaaagtctggtgagcatgctgtggccgcactacctgcgtaccatcccgtccctgtcggtggtggtgctgtcgccggatgtgccggcgatgaaaatggcggaaacgttgtccgccgggctggaaattagctcgcgcccggtcggtcctaaaaacactgtctgccgctaccgcaccacccgggatctgacgctgaatccgctcgcggtggaaaaggtcattatgaccacggagcctgacgggcgttcgctcctgcgggtgcgttttgcctgtagtacgcaggcggactggccgcagactgacctccggcatctgccgctgtacctgggtgaagatagggtgacgggcagcagcctgcacctctggctgacaaaacgtcaggcggcgctgtacattcgcctgcccgggcagacggagcggatcgcactggacggttatttctccccgggcggttttgctgaggaagatcggctgtggccaaagggcgacagcgccttcagcggttatcagttgctgctggagtatttcaccttccgcgaaaagtttatgttcgtccatcttaacgggctggaaaatatcacgctcccggcgggtacggcgtacttcgatatcgaggtggtgttcagccaggtatggcagagcgatttaccggtaacagacagcagcctgcgcctgcactgcgtgccggtaattaacctgttcaccctggaagctgacccgctgaccattagcgggctggagagtgaatacctgctgcgcccgaaacgtcttcaggacgggcataccgagatttactcggtggacagcgtcaacggctccgggcgcaccggcgaagcgcactatgtgccgttcacaagttttcgccatcagggcggcatgatgcgtcgtcacgcgccggaacggtattaccacacccgcgtgaagcggggcgtcaccgggatgcacgatacctggctgatactgggcggccagcagtgggaagctgaccggatgctggagcgggaaacggtctcgctgcgcatcactggcaccaacggccagttaccgcgccgggcgttgcagagcacgctgctggaccgctgtgaacaggtctatgacacgcccctcaccgtgcgtaatctctgcaagccgacgctgcccgcatacccgcctgcggaggatcgtttccactggcgggtgatgagccatctgggctcccggtttctcaatatgatgagcagcgctgaggtgctgcgcggcacgctctcgctctataactggcgggacgacgaactgaacaaccgtcgcctcgatgccatcctggatgtcaggcaccaccgcattcagcgctttgaggacggttttttgctgcgcgggctggacgtggaggtgacgctcgacagcaatggatttaccggagaaggcgatatccacctgtttggcgaactgctcaaccgctttttcgccctgtatgccgatatgaaccagtttaaccagctcacgctcattgttcagccagaaggaaaatatatccggtggaaagagaatcacagtccgcgcctgcccggctga

SEQ ID NO: 119961 - DNA, 1578 bp, Enterobacter cloacae
atggcatccgttcacacactgattacagcctgccaggccgcgccggaagcgctggcggaacaggcgcagcagcgcctttccctgtgggactactggctgcggccagtacaggcggacaaccccaccggcgctgaccccggctacgacgatgattttcagctgatgcgcgaggaggtcaataaactttccggggcagatgccgacctgatttgtacccttgcggaaaaactgctgaccaccaccacaaaagatattcgtgtcgccacgtattacgcctgggcgcgactgcaccgggagggtgaagcgggactggcagacggactggatctgctggcgggtttaatgcagcgctttaacatacagttgcacccacaacgcgaacgcagccgacagggggcgctggagtggctcgccagcaccagaatgctcgacagcctgtctctgtacccggaggccaataatactgacaccctgcgcattgccggtgccctgtggcttacggagcaggtggcggaaggcgccatccccggcgcgctgtatcaggcgctggaaacccggttacagaaatccggtggcccggatgcggtggtgccgcagaatgtcagcgacacgggtcacgcagccacatcacacgtcagcgtaccgtcgctgacaggcatcgcctcaggccaggagttactctcacaggcgcggatcctggcggactacctgagaaatcagccggacggctggttatccgcccaccggctgataaagaacctgcgtcacgacaccctgcgtcagctaccgccgcttctggccgacggcaaaacccgcatcgagccgccaaaaccggatcagcgcgcactgctgaaacggctctacctgcaacagagctggcgtgagctgatggaagaggcggacagcctgctgtcgcgcggcgcaaaccacctgtggctggatgtgcagtggtatctgcaccaggcgctgctgaaatccgggcgggagcacgaagcggcgattatccaggccgacctgaaaggcctgctctcgcgcctgaccgggctggagacgctggcctttaacgacggtacgcctttcgccgatgaagtgaccctgaactggatccagcagcaggtgatggacagcggcgggggctggcaggaggactcagccgtgacagcggcgaccgcttccggcgataacgatatcctgcaactggagagcgaagcgctcacacttgccgacagcgacggccccgatgtggcgctgtcctggctgcaaaatcgtcctggtatcatcacggtacgcagctgctggctgctgcgcctgttaatggcgagagtggccgaacagaccggtaaaaacgagctggcgctgcacctgctgggcgagctggatggttgtgctgctgccatcacgctcacgcagtgggagccggacctgctgttcgagataaaagcccggcgcctgaagctgctgcggatgaaggccggacgtaatgatacggataaaacacgcctgaatccggagatggagcatctgctggcggggctgattgccatcgacccggcaagagccgccgtactgtgcgcctga

SEQ ID NO: 119962 - DNA, 3411 bp, Enterobacter cloacae
atgaacacatcgggtagtatgtttggccgcctcggccgagtcgggatcgtatttgcaggcgtggtggcgctgtggtggatgataacccactacgccaaagcgctggatattgatacgcggggtgaacaggttctggcgtttgtcctggtgtgcctggtgctggtgcttattcgttatgcgccagcactttcccgttatgttaaggaagtttattatcgtcgccaggctcagaagattaatgccttacctgacgaagaaggtcgcattacactgacgccgccacgtcatatcacggtagaggaaattcgccaggagttgtgccatctgtacggtcgttgctggccccgcaaactccgaatcctgctgataaccggcagcgcttcagatgtcgaacaactcatcccaaaactcacccaggaattctggcaggaagaccaggggacgctgctgctgtggggcggtgacccggcagcaccggcggacactgcctggcttaccgcgctgcgtaaactgcgccgccgcccagtggatggcgtggtgtgggtgacctctgcgtttgatcgcctcgcaggctcagatactgaactggcagcgccgctgactcctgaatccatggacgccctggctcacgccctgaaggggcgctatgacgcgctgggctggaaactgccgctttacgtctggtcgctgcatccgcgagctggagagcaactggggcggattacccagccggtggggtaccagctgtcagcggcctctaaacctgaagcactggcccgccagctaagcgacctgataccggccctcaccgcgcagggcgttcagcagatttgcgacaaaccacagcagagttttttgctcgccctggccgaccagctgacgcgcgagccggaaacgctgaccggccccttatcggtattgctcaaaccgtaccgcccgctgccgctggccggtgtggtgttcagtccgtccacgttcggcggcgtgcgcagcgttgctcatcactggggcaaagacaaccgctgggatgccatcccggcctcggcacaggccttaccggcaggtctgcgcccgcgtaaacccggaatcagctggacgcagatggcgggcgtgagcgtggcggcgctgatggtgctctggggtgtatccatggctgtctcctttgtcgccaaccgtcacctggtggcgacggcgcaggagcaggttcagcagtctgtggcagagaaacagccgctgagcacgcgtctgcacgccctgtctgaactccagaaaacccttgtccgtttacagtaccgtggacaacacggcgtgccctggtatgcacgcggcggcttaagccagaacgatgccctgctggcggcgctgtttccgcgttatggcgaaagcgccttgcccctgctgcgcgatgcggcggcggaacatcttacgcaacagctacacgcctttgtacagctgccgccggacagcccgttacgtgagcgcatggcaaaaccggtttacgaccggctcaggttgtacctgatgctctcgcggccggagaaaatggatgcggcctggttttccgccacgctgatgcgttactggtcgcagcgtgcgggtgtggcaaacggcctctggcagggcagcggcccggcactgtacgctttttatgccacgagcctggcgtcacacccgcagtggcgcttacatgctgacgttatgctggtcagccagacgcgtacgctgctggttcgccagatgggggtgcgaaacagtgaatccaccctctatcagaaaatgctcgcgcaggtggcgaaccagtatgccgatatgcgcctgacggacatgaccggcgacaccgacgccgcaagcctgttccgcaccgatgaggtggtgccggggatgttcacccgtcaggcgtgggaggaggcggtacagcctgccattgacaaggtggtgaatgaacgtcgcgaggagatggactgggtgctgagcgacagcagacagcccgccacgcagcagacctcgccggaagccctgaagcagcggctcaccgcacgttattttgccgacttcagtaccgcctggctcgattttctcaacagtctgcgctggcaacgggcagtgaccctgtccgacgccattgaccagctcaccctgatggcggatgtgcgtcagtcgcctttggtggcgctgatgaacaccctgaatgttcagggccgcaccgggcagacaggcgaagccatttcggattcgctggtgaaatctgcgaagaatctgctcggtggcgataaacagccggccattgaccagagcggcggctcgcgcggccccctggaggcgaccttcggcccggtactggcgttgattaacagccagcagaaaggcggtggcaatactgacctgagcctgcagacgtttctgacccgcgtcacccaggtgcgcctgcggctacagcaggtgaccaacgccgctgatccacaggcgatgacccaggcactggcacagacggtgtttcagggcaaggcggtggatttaaccgagacccgcgattacggcagtctggtggcagcggggctcgggcaggaatggagtggtttcgggcagacgatgtttgtgcggcccatggagcaggcctggcaacaggtactgactccggcggctgaaagtctgaatgcacagtggcagaccgctgtggtggatgactggaacagcgcctttggcgggcggtatccgtttaaagatgtcagcagcgaggtctcactgccgttgctggccagatacctcaacgctgattccggacgtatcacccgttttctccagacccgtcttaacggcgtgctgcacagggaggggagtcactgggtgccggacagcatcaacgcccaggggctgaccttcaatccggccttcctcagggcggttgataccctgagccatatttccgatgtggtgttcacccgcggggaggcggggttgtcctttgaactgcgcccgggaacggcggatggcatcatggagacgcggttggttatcgacagccagaagctgacttatatgaaccagatgcccgcctggaagcgttttacctggcctgcggacaccgaagcgcctggtgcggcattaagctggataagcacccaggccggcacccggcagtatgcggatatgtccggggcgtggggctggatccggctgctggacaaggcgtcagtcagcgcgtatcccggcacgggcagcagttacagtctcacgtggcaggcgcaggatggcagaccgctaaactacaccctgcgtaccgaggcgggagagggcccgctggccctgctgaagctgcgaaacttcagcctgccgttgcagatattcaccgtcagcgagcctgccgctgaccccctggctgatgacaccgaccccacagaggaaacgtactga

SEQ ID NO: 119963 - DNA, 1158 bp, Enterobacter cloacae
atgggctggaacagagcgaaatcattgacaacagagttacccccaaaaccatcctttatgtggtggtttctggctggcgtcctgacactaatcaccgggattgtattattcatgatccacgcctccggtatgatgaatgcgatttcagggatcaatatctggctggtttccctcgcaccgtcaggtagctggctgtttcttctctgtttgagaggctggctgtggggtaaaaaagttgatgaacataactttttgaaaaatgaggctgaacatgcccagaaactgtgggaagcctgggctgaacggtatcttgcgattgtgggcaactgtatttttttacccgacaaaatcactgtgggatgccttcgaagcgaattaccgcagcagtacggtcttgtcagaaaaataaattatctgcctgacagtaatcatctggtcgatgagtccttcctcgtactacttaaaggtacaatggatgcgctttgcctgttgccttctgaccttcaggttaacgtgactctggtaaccgatctgccctgttctggattacagaagtcctttgccacagtctggacctccctatttcctcagcgcgctgcgcctgacagcatcacgataatgcctgccttcacgatgggatgggtcgaagagcgtttgaaacagccctttctgacggttgaccttattctggtgatacaactgtgtggtcgtgacgcgtattcagacggtctggccgcgttgctgatgacgagtgacgatgtggcgcaaaaataccgcctgccacatccggcccgtctgttgcggccgatgccgctgcaactggacgggtttgaggatgaactcaggctgtttctcgggacccagacggctgcctgccgtaccgatcgcattctgggcgacagttgcagttgggaaaatgtcgccgcaccactaatgatcgttgggaacgaacagggtgccacctgggatcccgctgatcgactgctgcttgaaaaatggtgcggcattccggggcctgcggcaccgtggttgttgactgcctttgcggcagatctggtctgtctggataacgcctctcttcttacgttgttctcctctggcgaggaacgttttatcagtaccgtcacagcaggaagtgaagatgaacacatcgggtag

SEQ ID NO: 119964 - DNA, 267 bp, Enterobacter cloacae
atgtctaaaggttttgttttgctcggtgataaaactacacatggcggaaaagttatttcagcatcatcaaccatgattgttaacggcaaaaaagttgctctgattggcgacatgattagttgtccaataccattccatggtcccaatcctatagtggaaggctctctggaatggtcctctgacggcaaggctattgtggttgacggatgcaaatgccagtgcgggtgtcaggttatcccaagcgcaccggattgcgcaataggataa

SEQ ID NO: 119965 - DNA, 696 bp, Enterobacter cloacae
ttgaagaaatgcctgttaagtgttgttgcgttatttatatcaggctttactctggctgctaataacactgaaaaatcaaccgagctctcgagtctgctggcaccttatgatgagtggtattttgattttgtttaccctaaagcgttaccagccgttgtaacttatgcagagttgctggatacagatggcgttttttatcgcttcagaacgctggatggaactaaacccagtaaaagtagtataggtaagtggggagataaacttggctttgggcttacagcatttaacaaagctaaaaatcctccacaatttattcacttttgctgggattcagttatcgataaaaaagtttacgaaaccagaataaccttcagcagtgacgtctggaaactgatgctgacgccttattttgctccttatgatgaagcagagtcagcttatcataatggtgctaaaggagagcaacgataccatcaatttatggttatcggactggcaccggaaggaaaggtcagggtatggttacagaacagtcgcaagccgaatatagagctcactgatatactggttgagaccgtttccggtaataaattagaaatgtgcaagaatataacaagacatcccgatggttacatttactatggagaaataccggaattcattaaaggaaaaaaatatccttacgggaaatggtga

SEQ ID NO: 119966 - DNA, 696 bp, Enterobacter cloacae
atgaataaaaagtctgttttattggcagccttgcttgtatccggatgtgcttttgcaactgataaggctgataaatcaaccgaactctcgagtctgctggcaccttatgatgagtggtattttgattttgcatacccgaaagcactacctgccgttgtaacttatgcggagttattggatacagactcaattttatatcgctacagaacgctggatggtactaactccagtgacagcagtgtaggttcgtggggagacagtattggttatggaataccttcatttaataaagctaaaaaccctccgcgatttatccatttttgctgggactccgttattgacaaaagagtttatgaaaccactataaccttcggcagtaaagtttgggagatgatgttaataccttattttgctccatatgatgaaatacagaccgcttatcataatggtgctaaaggagagcaacgataccatcgatttatggttatcggactggcaccggaaggaaaggtcagggtatggttacagaacagtcgcaagccgaatatagaactcactgatatactggttgagaccgtttccggtgataagttagatatgtgtaaaaacatcactgattttagtcgcgggtacaaatactcgaaagggacagaagattttattaaaggtaaaaaatatccgtatggagagtggtga

SEQ ID NO: 119967 - DNA, 1566 bp, Enterobacter cloacae
atgacagaatattactgttacgatgcccctgacggacatcataaaaccagcattcgtaatactgcaaaaaaaattgtacttcagcggatacctgcccgaggggtgacgttaaccattggcgtgttttttgatgggacggggaataatgttgaaaacataaacagtcgcattgagcaatgtgactctaagttatatgggcttgatgccagtgaattagctaaattcaatgaaaaatgcatggctgaaaaaggttatagggattccgctgcaactagttatctagggtatttcaccaacattcactggctgaatagcttatataaacaagatgaaaaaataccagataatgccatggaggctcagagaaaggtctatattgaaggtatagggactaaaaacaaagaaaaagactcaaagtatggccttggtttcggtaataatgagacaggtgttgtagccaaaactgaccgggcgatagaactgataaaagaacaaatttcattatttatcaataagaatgatatgaacactatcgccattgcaaaaatccagtttgatgtatttgggtttagtcggggagcggcagcggcaaggcattttgcaaatcgagtcaatgatgaagaccctgcattagtcgaagcgattaaagcgggtctcagtggctatacacagcacggaaaaccagctggagaaattcgatttattggtcctttcgataccgttgcagctgtcgccgcgctttcagatgggcttgatccccatgacagtaacaaccatgatgtcaaactggagttgcctccgggtattgcaaaacacgttttccatataatagcaatgcatgaatgccggtacaatttttgccttaacagtattaaagaagtatggcctgaactgagcctgcctggtgtgcattctgatattgggggtggatacaatcctgaagagcctgaatattactttctgacgcgtccggaaattgaaacagtaccggaaaatacgcctgaacaggcaacccaggtctaccgtaatgcttccgtgcagagtgaatcactttttggctttccatcacttgcccctctgctaccatcaggggtgataaaagtagagtgtaattccgatgacagaatgtctccggatcgctataacaatttcaacaaaaaagtcggcgctgctgtcacgtttgaacgaacagtatcaaatgactggtcgaaagttgttctgagagttatgtatgagatttccaaagatgtgggtgtgctatttgaagaaatacaagagagcgacaagttttcaatatgcgatgaactacgtcctttttgcgaaaaggccatatctcagggaaaagcgatctttacaggctcacagtttattccatttacatctgaagaaattaatatcattgggaaatatatccactgctcagctaactggaatgctgtagattacgattcagctagaaaagttaccagtggtgcgcgtgcatctgcggtattaagttttgtcaaccggcccgacacgaactggcgtcgtacagtttataatatgaagggagaggtcatagtatga

SEQ ID NO: 119968 - DNA, 2520 bp, Enterobacter cloacae
atgagtctgacagatacgcttaagaacaccctgtctgcgctaactgaaggcgggctgaaccgctatcgtctggatattccgtcctgcacagccttactggatgtggaaactttcagcggtaaggagtttatgagtgagctttattactaccaggttatctttaccagcagcgatcaaaatatcagttcagcgcaattactgactaagcctgccacgctgaccatggggacagggccgctgatggggctgaccgggcagaaagtggtacatggtgtggtgacgcattttaagcgtatcagtggttcacgcgaccaggcgacataccagattattattgagccattcctgtccctgttgcgcaaacaattccgtacccaccgctttttcgtcaataagtcggtcccggaagttgtcaccgaagtattgcaggagcatggcctgaaaggctgggagtatgagtttaccctcaaagcagactatccgaagcgtgagcagataaatcagtaccaggaaagtgacctggcgtttatccagcgtctgttggcggaggtggggatattttactggtttaccctccaggaagatgcacagagcgaagtggtacattttgcggatgcgcaacgggcgctgatgtttggcaaaacgctgccggtgaacagtccgtccgggatgagcgacagcggggcggaatcgatatgggggctgaacgtcacgcacagcgtggtggaagcgagcgtcaccacaaaggattacaaccaccgtgacgcgcagagcatccttcagtccgcgccggcagatatgacacggggcgatggtgaggggaacacttatggtgaggtgtaccactaccgactacgccatctggagcggggcgacaaaatagatcccgcggcagaaacggctaacttttacgcccgccttgaccatgaacgttttctggcaaacaagatacagataaccggcgtcagtacagatgcgacactagctccagcacaggtgctgactgtcaccgatagcctaccatcctccttgccgacaccattacaggaaccgatattaattaccggaacaggtcttatcgccagccgcaaaagcgccctgcgggtaaccttactggcggtgccatacagcgaaacggtgtgctggcgtccgccgctgctgccacgtccaaaagtgaccggcaccatgactgcccgtatcaccagcgcgaaggctaatgatatctacgcctggcaggatgcgtccggtctgtaccgggtgaaattcgacgctgaccgggacggcaagtcaccgggtcaagagagcatgccggtacgcctcgccaaaccttatggtggcgacgtatacggctttcacttcccgctgatccagggcacggaggtggcgatagcattccacgaaggcgatcctgaccgcccgtatatcgcccatgcgctgcacgactcgcggcatgtcgaccatgtaacggagaagaacagtacacgcaacgtaatccgcacgccgacgaacaacaagctgcgaatggaagataaacggggtgagcagcatatcaagatcagcaccgagtatggcggtaagactcaacttaaccttggtcataacgtcgatgccgaacggaccttacggggtgaaggtgccgaactcagaacagatgactgggtgagtatccggggtggcaaagggatattactgagcgcagatagacagcctggtgcgcagggcgaaatgcttgacatggaagcagctatcctgcaactgaaacaggcattgtcactggctgaaagcctgagtgcagcggcgggtagtgctaaagcaacaccgtctgaaaaagacagtcagtcacagctaaataccgcactgaatgagcttcaggaagcggggatactggcttatgcgcctcatggtgttggcatcgtcagcccggaagctattcgtgttgcttcaggtgagcagagcgtgggtattgtgtcaggtaaaaacacggatattagtgcggcaaaatcattcactgttgctgcaaaagaaaccgtcagcctgtttgcacaaggtgaaggaatgcagctgttctctggaaatggggtagtggacattcaggcacagggtgatgccatgaatatccaggctcttaaagacgtttctgttgtgagtaataccggaaaaattactatcaatgccagccaggaattactgatgacctgcggtggggcctatatccggatgagtggaggggatatagaatgtggttgtcccggtaacatcttactgaaagccgcgaacgtgcagaaaatgggcgctgccaatattaatgttcctgccaaagaacttcccatgggattcggaggaagttatgttctgactgatgataaggatattccgttcagcaaaacgatgtaccgtattaccacatccgaaggtgcagtattcagcggcgaaactgacgaacaggggaatacgctaccagtgtttaccgcattcccttctgacatgaaaatcgaaattttgcgcagtggcagcaaataa

SEQ ID NO: 119969 - DNA, 228 bp, Enterobacter cloacae
gtgctccggtttaacgtcatgaagctttttatctttttagctttagtggtggcgggagtactgtttcatccggatacgtatttttacacaatcgttaagcgctttatccccatcactggtgacggcgaatacggcatgaacaattttgaaatgaccgttttgctgatgaaaatcctcgcctgcgccctcggggctggaaccgtaatcaccctttttcgtactcgctga

SEQ ID NO: 119970 - DNA, 471 bp, Enterobacter cloacae
atgcttactttcgccgtagaaactaccacgcacaccacgtgtacgtgccggggttcacctgcgagctcttttcatttggcccgcgaaggaacctttagaaactgtctaaataatcttcgtcgttccggctgcgactgcgttgcggctttcactcaccccagtcacatagtcaactatgctccaggggattcgttcaaccgcgccttgtctcgcgctgaacgtctcgattatttacttatctggcagtttttaaaggtttctgcaatttgcccggtggcgctacgcttaccgggcctactgttacgtaggccggataagcgcagcgccatccggcgttgttacttacgcactgcgctgcaacaacatcgacttaatatggccgatggcgcgcgtcgggttcagccccttaggacacacactgacgcagttcatgatgctatggcagcggaatacgctgaaagcgtcacttag

SEQ ID NO: 119971 - DNA, 780 bp, Enterobacter cloacae
atgaaaagaaaaagcgtaattatattcgctgcaataacgttttcttcactgggtgtgtgtgcagaaaataataatactattactgctgcgcaggtaaaagcgacaccgtatactacggtgttctttgccccgcgtacgcaataccgcaccgccagtgaaagttttttacaacggttgatgttaacaggcgttgttcaggatcctgacagcatcctgaaaagcatgtactggagttttgaaaccgatgccgatttaggtaagcacatggatcagtggaaaagcagttaccaggaagcggagttcaataagcccttctcgctaggtgccagccagttctggctggaaccaggaaccgtttttcattgggaatcggcagggtcacgcatcgatccctacattggcattggttaccattttgatccaacgttgggggcggtactgcgctatcgctacaatcatcagaatcatgacagtgaaacacgtcagggtgagtgggatgattcgtcggagcatcgcgtggatatttatctgacaaaatattttactccagacttttgggtgcaatataacccaacgtattacagtaaaacgcactctgataaattcgtgtatgccaatggtaaaaaccacaccttacagcacaacgttgtttttaatttccatactacgccacggttttatcccttctttgaacttggctatcttgatgaatataaagatggcgatgatacaaaaagtgaatatcagctgcgagtggggttcaaatacaatttaaaataa

SEQ ID NO: 119972 - DNA, 1194 bp, Enterobacter cloacae
atgatgtctgagaatatacgtaaggaaccgattgtccctgttatgcttcgccatggtgagcgcgcggcgattgcaacgaaaatccgtgatgccatgccgcttatcgccagcgcggttgaacggaacatgacctggttcggacagcgctttcccgatgcggcctgccgtaacggtcagtatccggtgattgataatcaggaatggacgaccggtttctggaccgggcagctgtggctcgcctgggagtggaccggggaagcgagctatcgcacattagccgaacagcacgtccgctcatttggcgagcggattgccaaacgagattgtactaaccaccacgatctggggttcttatacagtctttcctgtatcgcaggcagcaaactaacgggcgatagagaggcaaaatacatcgccctacaggctgctgaattgttaatggagcgctaccatcaccgctgcggcattattcaggcgtggggagagctggataaccctgagcagcagggaagaatgatcatcgactgcaatatgaatttgccgctgttatatcaggccagccttgccaccggggagccacgctatgctgaagcggcgaaaaggcatattgaacaggcccgacgctatatcgttcgtgaagatggttctacattccatacgtactatatggatgtcagaaccggtgagccacggtttggcaatacccatcaggggttctctgatgattcctgctggtcgcgcgggcaggcctggggcgtgtatggttttctgcttaattatctctacaccggtgataaaaagctgctggcgctgagccagaccctggcaaactactttatcaaccggctgccggacgatcttatttgctattgggatttggcgttaaccgacccgaatagtgagcgagacagttctgccagcgccattctcgcttgtgcactgctggagctggtgaaacagctaccggtgacccatcctgatcgtgaaagctatgaggcgctagggttaaaaatcattgaaagcatgatcgatcgctatttcaatctgacgcatcagcagggggaaggacttctcaaccattctgtttatcattttaaaggtaacgttggcgtaaatgaatgctgtgcctggggagattatttcctgatggaagccatcgcgcgggcaacgtcgtcatggaatagttactggtaa

SEQ ID NO: 119973 - DNA, 1263 bp, Enterobacter cloacae
atgaaccctgttcaatcaacacgttcggcttatatcaaactaagcctcttcgtttttctgtttacctttacctgggctgcaagttttgggctttatgccatctggctgggggataaagccggacttgatggcatagaaattggcaccgtgttcgccgttaacggcgtttttgctgtcatttttaagcctatttatggctatatcatggacaaaatgggcatgaaaaaacatctgctttactttgtctgcgccgtttcagcattgatggctcccttttttatctggtgctatctgccgctgctggagactcattttgtcagcggcatgatcgtcggcgccttgtttttcagtcttggatggtacgcaggcgttgcggccgaagagtcttatgtcgatcgtttcagccgtttatacgatatggagtttggccgtatccgcatgtgggccgcactgggatgggcgtcggcctcctcattttccggttacctctataacatctcgccaaaaattaactttgttatcagtagcgcttccgcactgtgcatgcttgcggtgctgctgacgctcaaagtcgatcatttcggtcaggaagagaataacgttctgtcgaaagaaaaaattgtgattggcgatgtatataacctgctacgtaacaaaaaattctggacctttgcgctctacatcgccggcgtggcatggatgatgtttatcgctgaacaacagttttcacgctacttcgtcaccttcttcagcacaaaagaagaggggaatgccatgtttggttatatgagtacaacgcaatctgcgacggagtttttcggcatgatgttagtgcctgccctcataaatcgcattggagcaaaacaggggttattgctcaccggactggtgatcagcctgcgattaattgtttccgggctgacaaacgatccggtcattatctgccttatcaaacccctgtacgggatcgaaatcgccctgattctggtctcggtctttaagtacattgccgaacattttgataagcgtgtcaacgccacgatgtatctgctggggtatcaggcgatgatctatgtgggatcaatcgttgttgcgcctccggccggctatgcctaccagacaattgggtttgaacacacctatctggttatggggctgatagcactggtgtttacggggatttctgcttttaccctctccgcgtgttaccagcataaaaaggtcccggaccttccgtcaccgggtcaggaagcccttcactga

SEQ ID NO: 119974 - DNA, 1782 bp, Enterobacter cloacae
atgcaggtaaggaacgattattgccaactcgcagagggttggattgccgctgctgtgccccatctgacccgggaaaatacccgtttgcacattggggaaacggcagctcactatacagacgatatcgcgggtattgagggctttgcacgcctgatgtgggcgcttgcgccgctgttgagcggcggcgaagcggaagggtatagggaaatatttttacagggcatccgtagtggttgcgaccctcagcatccagactactggggcgatctgtctgacaacgaccaacgctgtgtcgaaatggcggcgtttggcctggcgctggcgctacctgacaccgggatctggcaggcgctttcggctactgaacaggacaatctggaacgctggctgcgccagagtgccgaaataaccatccccgataataactggcattttttcccggtcctggttcaggttggactgaaacgggtagggcgccattacgatatgatggtgattgataagcatctgaacgcggttgaacccttctggctgggtaacggatggtattccgacggcgccggaaagccacgcgattactacatttccagcggttttcatttttacagcctgttgtatagccactttatgcaggatgtcgatccgtcgcgttgtctctgttatcgccagcgggcgcatcagttcgcgggcgactacctccactatttcacctgcgacggcaatgccatcccctttggccgtagcttgacctaccgctttgtgcaggccgcattctggagcgcagtggcctataccgggctggatgttttctcgccaggggtcgtcaaaggcctgatccttcgccatcttgactggtggatggcgcagccctttatggataatgacggcttatttaccctgggttatacctatccgaacctggtgatgacggaagattacaatagcccgtgctcaccctggtgggcatgcaaaacattattgattcttgcattaccggatgatagcccgttctggcaggctgaggccgcaccgctgccagcgcgggaaaatattcatcagataaaagaggccgggcaaatcatcgtacatgccgacgaaaaccggcacgcatggatgctgatgtcgggtcagtacgatcgtaataacttcgtcaatttcgaggcgaaatacagcaagtttgcctattccagccattttggattcacgcttacgcggggaaatgacgccctgaatcatgcggcatgcgattcgatgctgatattcagtgagcaggacaactactggcgcggacgtcgcgagtgcacctctgtcgacatgactgacgcctggctccgcagcacctggcaaccctggccggatgtatttgtcacgacctggcttatcccgcatcaacaggggcacatccgactccaccgggttgaaacccagcgcgcgctcgacagcgtcgagggtggattcgccatcaatcgtcatttactcgcggaaacaagtaaagcttctcatgaggtagccctgaacaccttgtccgggtgtagccagattgtggatctgctctgcgagcgtcacgcgctgaccgtcacgacggctcccaacagccacattctccatgctgcaccgggcgagatcccctgcctgggcgccgtgcttgaacccggtacgcactggctggcgtgtgccgtaacggccacgatggcctctgtcctgccgccaccgatgacgctggccttcgatcgcctgagccaggttctcacgctgaacacgaaaaccctacacatacaatag

SEQ ID NO: 119975 - DNA, 849 bp, Enterobacter cloacae
atgcagcgttccgaagacaacagttatctggaacatatcaatctcacagacaggtcgatctactttaaccgcatgaaagatatgccagcgaattactatcattggcatcaatgtgtggaaattttatcggtgtcccagggggttgggatcgcgttgatggagcatcagcaatataccgttaaacccgggcggatctttattttcccaccggggaaacttcacaaagtttacgtcgagcaggacgcacgcaatatctaccaccgcacgacgctgcactttaacggctcagtgattgaccactatctgcgtgatttcccccgtcagcgaaaactgcttcgccagttgtgtggtcgcggagaaaaagcccgggtctttgatgtgcacgatgtacaacccgtcattgagaacgtactggatcgctttgaagccctgatgaaaagtgaaacattcagcatcagtgacagcgcatttctggtgatgcagttgatcagcctgttaccctggcaggagcaggccaccgggcagaataccttttcggcgaatattatccgctggctcgaaacccgctttcatcagcgctgtacgctggaagagatcgccagagccatgggttgttcccgaggacatgcatcccgccggttccacgatgaaaccggcgggacgattcaggaatatttgacgatgaggcgcatccgccaggcgtgcgaattattactgcacagcaacgctacggtacgggagattgccgcacaggttggcttctccgaatacgcctggtttattacctgctttcgtaaaaatatggggaaaacgcccctacagtatcgcaaaacctacgctacaccatga

SEQ ID NO: 119976 - DNA, 792 bp, Enterobacter cloacae
atgccagaaggtccggagatccgccgcgcggcggatagcctggaggcggcaataaagggcaaacctctgacacacgtctggtttgcctttcctcaactcaagccgtttgaatcgcagctggtggggcagacggtgacccacattgaaacgcgcggcaaggcgttactcacccacttttcccataacctgacgttatacagccataatcagctttacggtgtctggcgggtggtggaggcggacgagcagccgcaaacgacccgcgtgctgcgcgtgcggctacaaacggcggataaggcgatcctgctttacagcgcctctgatatcgaaatgttaacgccggagcagctgctgacgcatccgttcttacagcgggtcgggccggacgtgctcgacatgcgtctgacggcaagcgatgtgaaagcccggttgttatcccccacattccgcaaccggcagttttccgggctattgctcgatcaggcatttctggcggggctgggaaactacctgcgggtggagatcctctgggaagtggggctggcgccgcgtcacaaagcgtcgcagctgagcgatgaacagctggaggcgctgtcgcacgcgttactggatattccacggctgtcgtacaacacgcgcggcgtggtggatgagaacaagcatcacggggcgctgttccgcttcaaggtgtttcatcgggcaggtaaaaagtgtgagcggtgcggcggggtgattgagaaggcgacgatctcttccaggccgttttactggtgtccgaactgtcagagatga

SEQ ID NO: 119977 - DNA, 138 bp, Enterobacter cloacae
atgcaccgcgcgacctcagcgattgcgcgtcatccgacgaaggagatccgcgagcagcatgagcagatgggcttccatgaagggtggggcgtggtgctggatcatctggtggggtatgttaaggggcttaacgcgtag

SEQ ID NO: 119978 - DNA, 1065 bp, Enterobacter cloacae
atgaaaaagattgcgctctctttggtagctcttggattactcacttctttgccgggcctggcggctacccccgcgccggttccggccgccattgccagccatgacggccccattcgcattgcggtgatccgcaacctgggctcggacgacaacaccacgcagtttgttgccggggcgattcaggaagggaaaaagctcggctttaaggtcagcacgtttttaagtaacggggacgacgccagattccaggatttcgtgaaccaggccatcagccagaaatacgacgggattattctctctcaggggcgcgatccgtactccaccgcgctggtaaagaaggcggtggatgccgggattaaagtttcggtgtttgataccgccgtgaacggcgagatcccgggcgtaaccgttacccagcaggacgatgcctccctgaccaacctctcttttggtcaactggcgaaagatttcaacggcaaggccaatatcgtcaagctgtgggtcgcgggcttcccgccgatggagcgccgtcaggcggcgtataaagaactgcaaaagcagtatccggagattaaagagctggagtccatcggcgcggtctcctctgacgtgcagggcgacaccgccaacaaggtgggggcgatcctcgcgaaatacccgaaaggtaaaatcgacgccatctgggggacctgggatgccttcagtcagggcgcgtataaggcgctgaaagagaacggccgcaccgagatcaagctctacagcatcgacatctccaaccaggatctccagctgatgcgcgagccgggtagcccgtggaaggtgagcgtggcggtagatccgaagctgattggcgcgaccaacgtacgcctgatcgccaataagattgccggagaagcgacgcctgccacctacgatttcaaggcggcggctattccgcaggcgctgctgaccgcccagccgggtgcggtgaacgtggcgtctctggggaaaatcattccgggctggggccagacggaagattttatcgcgccgtggtttgcgacgctggaagccaggtcaaaataa

SEQ ID NO: 119979 - DNA, 357 bp, Enterobacter cloacae
atgaaaactataacgctcatctcaccattatgtattctcctgacggggtgccctggttgcccgccgttgtctcatcccagagctacttttattgagggtaaccatgtttgctttagtattaataaaaaagatgtcgtgaactattacaccattgattccagcaaaggccccgacattactaccatcacaagttcgggaaggaataaaatcagttggtcttatcctaacagttgcatagatgttaattgggagtatggctatacatatgttattagctatggtttaaataataaaaattatcatcacgaattctttattgataatgacggacagcttactaatttaggagaattataa

SEQ ID NO: 119980 - DNA, 462 bp, Enterobacter cloacae
atggcaatcagtgaatcaacccagcccgtccagggcgctccggcgtcgccgccgaaatcgcgcacttcctttaaagtattaggcgcaatcagtctctctcatctgctcaacgacatgatccagtcgctgattctggcgatctacccgctgttgcaatctgagttctcattaaccttcgtgcagatcgggatgatcaccctgaccttccagctggcctcttcgctgctacagccggtagtgggctactggacggacaaatacccgatgccatggtcgctgcccattggcatgtgcttcaccctgagcgggctggtgctgctggccatggcgggcagctttgaggcggtactggttgccgcggcgctggtgggaaccggttcatcggtgttccatccggaatcgtcccgcgtggcacgtatggcctcaggcggacgtcacgggctggcgcagtctctgttctag

SEQ ID NO: 119981 - DNA, 612 bp, Enterobacter cloacae
atggtacgtcgtctggtacaactttatgtcggtttaggcctgtacgggctttcaaccgcgatgtttattcgttcggatctgggtgtcgacccgtgggatgtctttcaccttggcgtcgccatccagaccgggatgagcatcggcacggtgattattttaaccggggccgcggtgctgctgctgtggatcccgctgcgtcagctgccgggactgggtactatcagtaatgtgatttgtattggtctggcggccgatgcgtcaatggcgctgatccctgagctcacctcgctgcccgtgcgcatcaccctgctggtttccggcattgtggttaacgcccttgccaccgggatgtatatcggcgcgggttttggcgcaggcccgcgcgacggtctgatgaccggcatacatgcccggctgggctggtcgatccgcagcgtgcgtaccgcgatcgaggtgaccgtgttgatcgtcggctacctcctcgggggagcgtttggcgttggaaccgtactgtatgcattaaccatcggcccgctgatccagctctgtttgccgtggtttcgtcagggaccgcgcattcagaaagccgcgcggccggagcggattgtttaa

SEQ ID NO: 119982 - DNA, 1422 bp, Enterobacter cloacae
atgtcatcacgtcgttttggaagccagtctctggtacgcctgttagggcactggcagcaagcctcttcccgcaccccgctgtggcgccagctggctgacgcgttacgcctgttaattctggatggcaggctggcgttaaacacgcgcctgcccggagagcgggaactggccgccgctctgagcgtaagccgcaccaccatcagcagcgcgctggcgcatctgcgggaagagggttatctggagagccgtcacggcagcggttcgcgggcgatcctgccagaccgccgcgccgtgcccacgctttctactgccagcgcggcgctggatctctcaaccgccgcactcaacgcggaaccagagatccaccaggcctacgcccacgcgctgacggccatcacgccgaatctggcgctgaccgggtacgatcagcttgggcttccggcgctgcgtgaagctatcgccgcccgctacaccgcacgcggtctgcccacccgggcagacgaagtgatggtggtgaacggcgccgtcagcggcttcgccctgatcttaagaatgatgaccggtcccggggatcgcgtggtggtggatcatcccacctacccgctggcgatagccgctattcagggggcgctatgccggcccgtgggcgtctcgctgcctgaaacgggctgggataccgacggttttgccgcaacgcttgcccagacagccccgcgtctggcctatctgatgccggattttcataatccgaccggacgttgcatggatgccgtgacgcgccagaccataaccgacatcgccgcgcagacccgcaccacgctggtggtggatgaaaccatggtcgatctctggttcgatgttcccccgccgccgccgctggccgcctttaacccggaggccacggtgatgacgctgggttccgcaggtaaaagcttctggggtgggctgcgtctcggctggatccgcgcctcgtcacgcactatcgccaccctcgcgcaaacgcgcgacacgctggatctgggctcgccggtgctggaacagctggccacgctgtggcttatcgaaaacagtgcaaccttcctgcctgcccggcggcaaatgctggcagaacggcgcgaccgctgcggccagatgctgcgggaacatttccccgaatggcggtttcaggaagcggagggagggctttcatactggattgaattacccggcatgctggcgacacagctggcggcacgcgccgaaacgacaggcatcattatgggcaccggcacgcgttttggactatcaggcgcgtttgaccgctacctgcgtatgcccttctcactcagttcaccagaacttgaagaggcattattgcggatcaaaccgctgtggcgtgcattaaataaaagtgtagcgccagtaaaacggagcctggtgtaa

SEQ ID NO: 119983 - DNA, 2484 bp, Enterobacter cloacae
atgcgcttgttggaactggctgatcagcatagaaaagaagcgaataagctgttaaatccaaagacaaaatctgcactcggtcagtttatgaccccggctccgatttgtctgttcatggcaagcctgtttgacgacataaaaggtgacatcaagctactcgatccaggctgcggagtggggtcgctctctgcggcgttcgtagaacgagcgttgcgccttgatgtcgacaagatggagctcgacgccatcgacattgcagaagtgatgcttccgtatcttagcaagacactgaaagcctgtgatgaggctgcaaatggaaaattaacccataaaattagtaaggtagattacatacttgaggcaagtctggctaaaaatatttcgaccagtgaagagccagggacttatagccatgtgattatgaatcccccttataaaaaaattctctcgtcgagcgctcaccgggcctctttacgcaatgcaggcatagaaacggtcaacctatactctgggtttgtggcgttagctttgaaacagctgaaaaagggaggagaattagtggcgattattccacgctctttctgtaatggcccttactatcagcctttccgcgagcttttactctctgaaacgtccatcaagcacatccacattttcgactcccgtaatgcggcttttgctgaggatgaagtgcttcaagaaaatatcatcattcactgtgttaaaggcgttccgcaggggcaggttattatcacctccagcccaacgtcagattttcatcttgatgaagaatccgggcaaatcacggccaccgatatgacgcagcgcaaggtgtcgatagacaaaatagttaacccagcagacaaacaaaagttcattcatatcgctgcaagtcccagagaacaggacataatcgagagattatccccttttacaacaactctggacgagcttaatgttcaggttagtactgggccggtagttgactttcgccttaaaaatgacctcagagaaagaatggactccgggtcagtgccgctactttttcctcagcatttgaacggcaaagtgaattggccccttgatgggaaaaaacctaatgcaattagggtttccgaatcatcacgtccctggttatggaaaaaccagggctacttcctgattttaaaaagatttagcagcaaagaggaaaagcgtcgcattgtcgcaacattatatgactcctcacttcctggcgagttgatcggtttcgataataaaaccaatgtcttccatattcagaagaagggtatggatgcggatctcgcccgagggctttatgtctatctgaattgcactttgctggataagtattaccgtcagtttggtgggcatactcaggtaaatgcctctgatttaagatcaattcattatccatcaatgcaagtattgcgaaaaatgggtactgagttcgatgatgaagtgcttaaacagaaccaaattgacgaaattattaacagggagttagatcttatgacgaaaggaaaaatcgctgacccgttgaaagcgcaggaaaaaatagagcaagctcttgatgtgttgcgtcaacttggaatgcctcgtgctcaaataaacgagcgttcggctttaactatgctcgcattgcttgatcttcatcctgatggcgagtgggagaaaattgaacgcccaatgttgggtgtgacaccgatcatggattggtgtagagacgtttacggaaaagagtacgccccaaacacgcgtgaaaccttccgtcgacaaacgctccatcagttttgtgatggcggaatagctatatacaatccggataaacccgaacgccccgttaactcccctaaagcttgctatcagatagcgcctgaactgcataccgtgttattaaactatggttctgccaaatgggaaacagcgcttgaagaacatatgggcaacgtaccgaccttagttgagcagtatgccatggcgcgaaaaatggaaatggtgccattaaagctgaatgacggtactgaattagaattaagccccggtgcgcatagccagctcatcaaggatatcatcgttgagtttggtcctcgtttcgctcctgaagcagaagttatttacatcggagatactggcgcgaaggaagatcattttagaaaagaccgacttgcagaactgggagtaagtgttgatcgaaaaggtaaactgcccgatgttgttctttattggcaaaaacgcaactggctacttttaattgaatcagttacttcccacgggcccgtcgatggaaagcgtcacggtgagttagcaaaattatttgcttctgctaaacccggattggtttacgttacagccttccccgaccggaaagtgatggcaaaatatctgatggaattatcctgggaaacagaggtctgggtagctgatgctccaacccatatgatccacctgaacggcgatcgattccttggaccccatatttaa

SEQ ID NO: 119984 - DNA, 384 bp, Enterobacter cloacae
gtgaaaatcattgacgtccatcgcagtaccgatcgccttggctttgatgatattatcgttgaccatttcgcgttaacggaccggggaagaattaactggtggctatctcagcgggatatgcttaagaaaaaatataacatcccctccgggcaggagtttgttttgacggtctgggacgtgggggacgggtatctgcgggactcgccgcgagaggattatttttgttttactgatatgacatcagagaagaactgtattgagaaaaaaagccttcttgaggttactttcagatttcctgaaagtaataagatccgtttttatgttggtgatagtatgtacgttatgaataccaaagatggatcgatgacgaaagagcggtattga

SEQ ID NO: 119985 - DNA, 462 bp, Enterobacter cloacae
atgaaaaaatcctggtttatttatatggcgattgcgttgattatgattgtttatagtttctgggaccatatctatcctgtgaaaatcattgatgtccatcgcagtacgaatagcctgggttatgactatattatcgttgaccattttccgttaacggatcgagggcgcattaactggtggttatctcagcgggatatgctcaagaaaaaatacaacatcccctccgggctgagatttgttttgacggtctgggacgtgggggatgggtatctgcgggattcgctgcacgaggattatttttgttttcctgatatgacttcagagaaaaattgcattgagaaaaataaccttcttgaggttgctttcagatttcctgaaagcaataaaatcaagttttatgttgatggtaatctgtacattatggataaaaaagatggttcgatgactaaagagcgttactga

SEQ ID NO: 119986 - DNA, 840 bp, Enterobacter cloacae
atgtacgaaatgaattttccttgcgaaatactttttcagacaaaacaaagaattaatgatacaagtacagatgatatgcggtatagcgatctgtctgctgtagaattacaatcattagggctaaacgacgtttcttctatggtcaacccctataatatgatcttcaaagataacgctgataaatacttcaaatttccatctattgctgggtattcccttaaagacgatcggcccgttacccctgatgaatgcgccagtattctttttgatgaaatgagagaattgtcaggggcgtttgcttccgggcaatataaaaacttaattggagagatgattaaccattttcagcatggagatggcagaccttttggttatagtgcgttactcaacaggtcatactctgatcttctcagggcaaagcaatatggaaatactacgctcggtgttattagaaaagtcattaatgattatgtcagtgacaggcgtaaacacgttggtagtcagggttctatttgggatgtaaaaacaggaatattgaatgcggcattgcctaagtttaatgattttgaagacagatttaacggaatggggatcaccgtccatgatatttatttccagcggattgttatgcttaattttagacgataccagataggatgggaagcggatatattatttgaagctcaggatcattttggactggggcgagaagatatcatgaaaaaactataccaaaacttcaggttttttcggatatggtttgttcttcagcgatataaccgcttttcatttaaaccttttgtgacaaatttcaatgcttctgtaaaactgacggggtaa

SEQ ID NO: 119987 - DNA, 609 bp, Enterobacter cloacae
atgagggggagtatcgtgcgctctttaattagatatatagctcagttccctatggccagtatttttaaacaaatgctgggtattttcattttatcaataattctagtttgtggtattacatttctccactataagtatggatttagtattaccttggagaaagatactactttctttaattattatgagtcaaaaataagagggtatcttttttcaggcttcatttctgttgggtcttttttgttgtcattgcacacttttgttatagtaaatcttaaagataaactttttgattcggaagcatataaaaagaattatatagatttcaaaagtcaggagattagaaattttactgatgatatgattaaggcatctgaatactatgctcctctgaatgttctatctgtcttccttaacgtttcgatatggttatcgattattacagctgttatacagtttacacttggcttttatgataactcatatacagctctattttgtatgtaccttgctcttttgacagtcctcttcctccttaactgcctgatacttatacgctgtaacattaaggtttggctgacacttgagcagaaaaataaacctaaataa

SEQ ID NO: 119988 - DNA, 924 bp, Enterobacter cloacae
atgaaagtcagacgaattggaatttcattaactaataaaaataaaacaattcgcttttcggatttcataaattacttgatcccatttaatggagaaagaatggggttcgagggaggggagcgatttttccttttccatgaagatgatgtgtttttttcaggcgtcgtattatcctttaaggatcagcgaagagattgtagagcaagatttcaggatggacaatttactatccacacggctgatattcttgatgatgaaaagttaattgattttaatttttttgttgttaagaaagactctttgaaaggcctttacgagtactatcacaactcttgcagtatacatgtcttgtttgctttgcttcgtaataaattcaatacattgaaagcggataaaatttctaattacattgctgataatctggcattggggcgtgaaaaagctgaggctaagggtaaaagagaatatgcaggaagactttctacatctattttaatagataatagagatatacctactgtactggctgaatatgctaaggttaagaaaatagaaatgttgttcgatgctcagcaattcgctgttgggcatgcagttgcactacaaagaagttcgcgtgaggttaaagtatcttttaatattacggattctgaacaatctaatattgatagactaacccaaggtgtcgttgagcttgctggcaatgtgggtttcaaaaaaggaagcgttagcaccgtggatagtgatgatatagagcgaactatttctatattaaattgtcctaaaagattaggagagtgtgagttcgaagatttagctcataggattgatggcttgacagtagaaaatttccatgagaatgagatacttgtcgagctcaaaagggaaataaatgagggggagtatcgtgcgctctttaattag

SEQ ID NO: 119989 - DNA, 1203 bp, Enterobacter cloacae
atgaaatacaagcctaatgcgtaccttgttaaagaaaactcttcggtgtactccgtcaaggtcactattccgccttatatgcgttccctttttgggaatcgaacagcattcatgcgtacaactggcacggcagatatcagagaagcccgaatcattcgtgacaaagtcatgcacgaattttttgctatcagagaccgactcaagccaaaaccccaacgtaacagtgttgatcgcgtcctggtggaactgcgctctatcaaccagcatgtaaaccaaaatgatgggatagacttcgccacggctcgtgtgtgtccctcccttgtccaactgcgggatgaatttattgtccaacacaatgacaggcgcaagctgtctaccttgagcaagtacattaaggcggtggaggtcttcacggctcatttccggcgtaaggatttccagttgcaggaaatcaacaggactatggtcaccgattggttagacagcgccaagcaggagaaagccagccagacactggcgaattatcttggctgtctgtcccaactagtggcactggctcagaaccgttatcacgatgcgccgaaagagaatgtattcgcgggccacaaactggacgtgcgccatgatcgagaaagctacgaaccctttagcggggatgaactagctaaggtgtatgcggtgcttgatgaagagatgaaagccgttgcgatggtgggaatgtatagcggtatgcgccttaacgaaatctgctctctgcaaatcagcaatatcaaaaccgttgagggggtatggtgtttcgaggtgacggagggtaagacacgcaatgcggctcgcctggttccaattcatagccgattgacgacactcgttaaagacctcatccagaacaaccacaatggcttcttattctaccatgccagcatcacagaacgtgcagacggcaagcgctcaacgtggcatacacagcgatttacacgggctaaacgtaaagcgttggctgagaaaggcactgagcggaaggtgtttcatagtctgcggggaatgttcatcagccagcttgatcgtggtggagtcccagaggacaggatcgcattgattgtgggtcatgagcgcgggaaaaccgaatcattccgcacctatagccaaggggctagcatgaaggagttggcggattatgtagacattgtctcacatagcatataa

SEQ ID NO: 119990 - DNA, 642 bp, Enterobacter cloacae
atgactcagcgaattcagcagatccaacgtatcgtggaacagcaaggaatcactcaactggtacatttcactaaggccgaaaatcttccaagtataatggaacatgggatagtcccgatttctcggattggagagtttggtatcacgcctgccactaatgatcaacttcgccttgatggtcatttagatggtacgtctctttctatcacctttcctaatcacagaatgttctacaaatataggctggaaaatcaaggggttgattgggtggtgttaggtataaaaccatctattctatggacaaaggattgcgctttttgtcgccacaatgctgcggatgctcgaataagcgtcaaggcattggatgatttgaggcttcctgaatcacttgcgggaatgtttagcgagatagacgggtatgaaacacgagatggtcaaaaacttttaacatccgatccaacagacgaacaagcagaagtgttagtttttgatgtaattgaacctgaactgatcttaggggcggccttcaatagcagaaccgcaaacacactttaccaaaatctcttcggagaaaaaaagattatacttaatgacaaaaccaatggtttatttggttctcgttcatttaagcgtaagtggtaa

SEQ ID NO: 119991 - DNA, 753 bp, Enterobacter cloacae
atggtttatttggttctcgttcatttaagcgtaagtggtaaaacaatggcacaaaggcccgtatatatacctgttaaagaaaaatcactcttcgtaaaaactgagcttgtagattttacgtggttcccgggaatgtcagtctcacaaaagcagaaatcaattgactcgctccatgaagcagcaaagacaagcctgcctaatgtggacaaaatccttgagatttccagcaagtcccgtgaaaccctcggtgttgcactgagtgctttcaacctttctttcacgaccctgaaacagcaacgtacattaactatcgaaagtgcgtttcaaggtagcaaagtgttccaacgtgggggtccatataccgacatgttcgacatgactcctcgcgaagccaaaaaggacaagcgtttattgacctctggcagactgaccggattcaaattttttggtaaagaatgggaactggagccacgtactgcattttatgattggctgtatataagtgcattgaaaaaaagtaccgagctagcagagcaactaattgaatattcagcatttactgacatagagttcaatcctgagcgctcgataaattgccaagcatattctgcggcattatatgtttcattatacaaacaaggcattcttgatgatgccattgcatctaaagagagtttcctagaaacgatcaaaagtgcatcaataagtaatgctcttcaagatgaaacaactcaatcgggctttgggttttga

SEQ ID NO: 119992 - DNA, 207 bp, Enterobacter cloacae
atgcacatgaaactgttcaattctaaaggtctgccacttctggcaatgagtcttgataatcgatccgataactggttgaatctgtcagccattgcgagatatttcgacgttccacgcagcacttttttgcagcgggtgaatgattacggttgggaatcagcacttgctcattatgagcagcatcgaaagattaaactgaaacattga

SEQ ID NO: 119993 - DNA, 1041 bp, Enterobacter cloacae
atggctattaaatcattcgattatgttaattacagcaaggtcttccgtactcaggttccgcagagcaatttactgctgactcaccttgatgtatttgcagaccgtcagatcgcagattcccacaaagttagtatggatcgtatccaagaggcatctattggtgtggatgcgccattgatgcgtttcagttcggagtgggggactatcgagaagccgacagcaggctcgtatttatacgaattgccttggtctggtgtgactgaccgtgtgacttcggcagatctcaaaggttaccgtaaacctggcagcactatggagcagtctcttgatgagattgaggccaacaagtttattcagatgcgtgccaagtttgagcgctcacgtgaatatgcctattggcaggctttgattttcaataaagttaacgcttggggtactcagcaaaatgagatcgattgggctgtagaattctccctgaaccagcgaaccgctgatttgcaccaaggtgtgaatgatgacccgatgcgcgacattgacgatcaggttagcgccactaaagcgctgatgggtggactaactcaatatctgcgtggttgggttctgctgtgcggatctgatgcctaccgtgctgtgagatattctcctcagattcgtgaattgctagtttattcaaacgggctggttggttctgatgtgctgttcccgtctgatgttctgccaggctttagttcgtttatgctgggttctgtgcgtctgatcgaagtcagcgattcagcattcagcggtatcaagtcaaacgaggctttccttgttccggtctttggaaatgctccggttgagcagagtttgcctatgggacgcttcattggtccatgtgctcgccatcttgaaatctccgcttctggtgatgttgaagattggtacgcatacagagctttcgacgagttacgaaatcggaatttatatagtgaatacagcctcatggcatacaacttcaggccggatctggtctgtaagatgacgctattaccaacagcataa

SEQ ID NO: 119994 - DNA, 351 bp, Enterobacter cloacae
atgaaactggaagattatccaaaaacgtataacaacgtggtgaaaaattcggcatatgccaattttgaccgcagaacgattgtattcgcgacactcgtacaggctgtggaaccaggttccgtggtgacctctaccggaacgctttacacctctgggactgatgcgcttctgtgcctctcctacgctgaggcaggttctgatgttcctgtcatcgtggctgaccgcctaatttatgtgtacccagaagcaatccgcgccgtaatgggttcagcaacaaatgcagcactagcagcattgaccgccaacggaaacattcgcctgacctctgacgatgctgtcatcgcagaataa

SEQ ID NO: 119995 - DNA, 2142 bp, Enterobacter cloacae
atgagtgggaccaataagattgttaccagcaccgttaatgaaatctcgtggatcacagacgatgcctcatatcaaaaagccaaaaagaagataatttcgcttaaggctgctcacgagaaacccgctaaagcgcttgagaaggcacagaagcgtaccgcccagagtgaaggcaaagcagcactagcagcagcgaaagcccagactgcgaaacttcgacaggctgaacaattgtcaaaacagcaacagaaacaagctcagatacaagccaaaatggagcgggacgcaatcgcccacgccaataaaatgacctcattacaggctcgccagttatcccaacaggaacaggcagcacgtcagaatgcccgtttagcagcaatatctgaaaaggtgagacaggcgagtcgctcccgcgcgatgacctacaaccccaacatgggcggtcaacattacgatcccggtcttgtttctcgccagactgaagcaatgaaccgtggtcacggcgctgttgctgctgacatcgcagccaccaaaaaggcgatggccctggaggagaagcgccagcgtgagaaagaggcaggacttaagcgtgaggtgacttattacaacagtttgcgccgtagcgctctgactctggcaaacgtgaacggcgctgacgttgcaacccgttataaagcgatcagtgcagcaaaagaggcactcaaagcccagaaagaagagcgctatacggtcgaagagacccgcttcgaaatggctcgtatcaccacagaattacgcaagcaggctcgtttgcaacaacgtattacccgtgagcagaaagccgcaggtgttcgtgctggtcgtgtacgcacagaaagccgtggtgggagtgtaggtcttgctgccgctggtgttattggtggtgcggcgttagtaggtagtatgggcgtttctcgtgttggtcagacccttcagggaagccttgagcgttctcgcgatgtgaaaaaactccagcagtatgggatcagcaaccttgagtttgcagcacttcaggatctatcaatgagccgtgttggttactcactgagtgctgacaagctggctgacctcaacaaggacacaaccgaaaaggccggggaattgctgaacaccggctctttcaaacgtaacaagaaaactggacaggtgaatttcagcggcggtggcgagttcgcagatatcatcaacaacgtgctgacctccaccaacggcaaccagaaggtagcacagaaggtgatcggagaactgcaaaagctggattttccgaccttcatcacttacctgaaacagttgcagaaaactttcaaatggacgaacaaccagacccggcacttggctgaggctgtaaatgatggttcggtcttcctcgaagtgttcaatgatgaggggcagggacttatccagcgtatgcatcaactcgcttctgaaggatggacgctatctgatgcacagcaggccaaccttgataagctggcagctttgggggctgagtacaaccgagtacaaaccagccttgcggatcacttctcagcctcgtttgttgaaggcctggggcagtacgctgccaatactgacactctacgtcagaatatgactggactgatcccaatttccgatgccctcggcgttgcccttggtgagctaaccaccaacattctctccttcgctggtcgagttggtgaagaactcaagaaaggcgcgacattgccggatgcggtttatacgagcgtggtagatgactccgcaaacggtgctgccgattggattaaggaaaagaccggctttgatccacgtagcatcggtcagactctgaaacagatttacccgtggctgaatagttccgcttcgagcagtatcggctcaggcacggcgtataacgttccagcgctagcgttgaatgttcctggcctgaactatctaacaccccagcaaccaacgttcacggttccgacaattgatagcatgacgcagcgacagccgattcctgtcagtgttaccgggcaagcgaacattaatcagcagatggatgtgtttgtccatgacgataagatcgcagggctggttgataccaagataagggaaaacaaccaggcgcagaataacctcatccttgggattgcggactaa

SEQ ID NO: 119996 - DNA, 324 bp, Enterobacter cloacae
atgaccacaataaaagaccggattttcgccgccatgcatggcatgacaccggaggaatacgaactccaaaaagcgcaggacaatctgaagagcgtcaccgataactttctagatcaacatccggagttgctcaaatcagcctcgtctgacacccccaccaaacggattaaaaaatcgttgggtgctgatagtcgttcggttgtctcacataccgctgaccatatcgatcctgaaatactggcgaaggctaaagcagcggctgctgctctcgcaaaatccgatcctgatcgatacggcaatatcatcaagcagcagggggtgtaa

SEQ ID NO: 119997 - DNA, 474 bp, Enterobacter cloacae
ttgtgtgatgttgccaacggcctgagcgccgaagaagaaatccagctatcccgcctgttctccattctggagaaaccgacatataaatcccgatccaaaccttccgatccggaaacacaacgcaaagcccgtttattgcttaatcgtggattttcaccgcatattgtcgctaataccctagatctgccgttcgctgaagtctggcggctcgcacgtcaaaaacaagcggtgacctgggcgatgatgacaccgagagcccggacagaatttgtccgtgaaatgtggtcacatcggatgcacccggaacagatccgcaagcgttgcgatggtctgtcatacgtcagccttcgatattacctgcataacgccgggatcactgacgctgaaatgttgggttactacccagacgtgttcgcgaatatctgcaagctgccgacagtgaagaagaagcgcactaaacgtaaatccaaataa

SEQ ID NO: 119998 - DNA, 912 bp, Enterobacter cloacae
atgagccagaacggaaacaccaatgagcgtttttacaagagcgagaatcgccttttccatgcagacacggttacaaataaatccactggtgaagtggttgagattagcaattcactagaaaaattatacgcttatatgcttaatcagtaccgttatcggaaaggcttgaaacagccatttgctgagtcgcaggagcgtctagggaccgttgctcgaatcggtgacgccaagaagaaaacaaagcctcagatcgataagctgatcgctcttggtctagttgaaatcactggaaaggtcgggcgttgcaatatttataaagtgatcgatgttgataaggtcgctggaaatctggagttttcctacccagagtgggctggagaaccaatgtatgaccatgagaaacgcttaggaaaatctagtcaacagccaaaaaacgaggagaaaaaaggtgatggcgaatctgatcagggcggtgctggaaagcgagacggcgtacctcctgtgggtgttcctgtcgatgctgatctatccggtggtgatgatgcggtgaatggtggaaatgcaatccaattcccaacagtcaaaagcccagaccagccccagatggcagatatcgataccctcaacaactgggtagaaggctacgacgatgaaggatttatggcctatggtgcgatgtgggggatagaaaaacctggtgcgataacagatctgataaagagccatatcagaatcatccagagcgatggatacaaaggatcgaggtctgccgctaacgatacttcatccggtcctgatgcttattacaaacagcagcaggcgcgaagagcaaccgaagcgaaacaggctactaataccccgcagcagcaagaggatgagcagcttgaatttaatgatgacgaaccgttttag

SEQ ID NO: 119999 - DNA, 189 bp, Enterobacter cloacae
atgaaactatctttagacgatgaaacatatgcaattttacgcgaggaatctgaccgcctcgggatgccggttcccaggatgatccggaacatgtgccagaacctggcgaaacacattcagaaacgcaatgaacaaccactgacgaacccacagggagaacaacatgagccagaacggaaacaccaatga

SEQ ID NO: 120000 - DNA, 429 bp, Enterobacter cloacae
atgacaaaaccagtcctgttcgacttttcgaacgccaccgcctcagagattgtttctgcaatcgacaacaaaatcacttctttagtaaatcttcgcagtttcagaacccgcgttggcggctccaggaaagcagacaaactatacccggcaactcgtgaagccatgaatatcatcaaaggtctgcgtcagcaggctaagaatgcaaaaatcatccgggatattctgacgccttacagccatgagttggcaaaaggccgtgatgttatggaaatcattgaacctgtgctttcagcctggcgtgtctattacgcctctcatggaatcggtctgatgaatgagcagatccttctgcttaagatgattgagtctggcggtgaactcgaaggcattatcggaaaagccattcccgaactgaccacaaccgaataa

SEQ ID NO: 120001 - DNA, 915 bp, Enterobacter cloacae
atgcttattcagaagaaacgggttagaaacattgataattacattactccttttgatggtagaagtgtttttatcgctcatccattaccgagtcagcaaaaaagtgaagtgatcgggttcacctccagtcagtcacttggtgaggaagttcttcctcacatcgttggagcaatatctcgatttaatgccaacggcaaatccgtgcctgataaaacacttccaaaagaaacagcttatcgtcaagtctcatggacgtggaagaaatgggccgggaaaggacatactgaagagaccactgaaacacgtgaaattgagtatcagcgatatcagaggatttttaccccccctccgagcatcgagttgaaaattgtcgaaaacctgaaaggggaaaagctggttatttctcctaagctgactttgcgtgatgagaacaaagccttagtaactcactgcattaatctatttttggagattttcggtaagtgcgaggtggttgacgagaagctagataccattatcacaagcaagtctttgaaactaaattggaaccttcttccacaaggccaatacccttggagttcaatcggtccgcagattctcaaagcaattaatattagaggaaagggaaatgccgctgttgttgaaggcaggctggaacttgtaaacagtaaaaaacccgaccttgttgcagtcggaagagcaggttttcaaggttacgtagtgtttggtttttccagtaaaaacacctacatacttgaaagctctcagagcaacaatgcaacttatatctttgataacaactggcctaacttatcccagcttacaaaagctgaaattttagatggtaacttgcatcatgctcgcgtcatccatcgtcgaagttggtcggctgatattcttaaatatttgccttaa

SEQ ID NO: 120002 - DNA, 471 bp, Enterobacter cloacae
atgtctgaccacaacatcatgcaggctctttttaaccagcagcgcattcagataatgcatatcggaaagcatcacgatgagttcagcaatgcttacctgtatgcttgggagtctggagtttatccagctctccatgatacggacggtagcatcccgcaaaaaccccatgaaccctttgctgattttttcactacctcaaaggaaaaaacactttttcttgccaagcgacttgatgatgcatggataaaaaaagaaaggctcaccttctacgcgctagaggatgaacttcaggttcgatacaagcctgaatgggaacgaggtgatctcttaggaatttgccgatatttttacctcgaccgtcgtttcgatcagaagttctgggagacgctgattactaacggagaatgcccctcagaagcccacggcattattgatgtattcgaacggggagaagatatttatttcatgtag

SEQ ID NO: 120003 - DNA, 336 bp, Enterobacter cloacae
atgaaactaattggcaaagataacgggcatatgagcgaactcaagtttctctacagcgccgttgatgagctttcaaataaagatgagattacggtgacggatttcctggctctgagcgcttttgtcacttctgaaaagcttgatctggaagcgtaccagtctgggctggaaaaaggggggcaagagttgtcgaaagacaccagcgcttacctcgatcttctacagaggatggcggctgatttgtcgtacccaacctctggccttgagaacgctatccatagcgcacaatcaacagcaagctgggctttctatcagtgggggctggataaagaataa

SEQ ID NO: 120004 - DNA, 2136 bp, Enterobacter cloacae
atgaagatgaagaatgccccgaatattaaattcctgccgaaagataaatttacagaggcgattatctttgcgggtgaagatgcctattcacatgtgcagcactggatcgagagcgaaggtaaaagggcatgggatgatgtaccgcctgtttatctgggtaaaaggcaacttgcggaactggaacggttaaacatcgttgataacggccgtcgcagtgttcgtgtgatccgcgctggcgaactttccgaaatgcagataagcactatcgcaaccaaactggcgctggcggatgtgaaagaggccaggctgtttaatggcatgtttgagcctcagccgaaggaggactggacgggcaggcttccacgtctcaaagaagaggccgaacgcggggaaagtattgtggtgaacctgcctgtgaaaaaacgggagccaaagcctgaacagggcgatgaactcaaaccccgcgtggaaagccgcagcgatggcctgtactggatcacgccaaaggtggacaaggatagtggcgagatcatcaataacgaaacgtggctgtgctcgcctcttgaggtggtcggctccggtagtgacggggcagagcgctatcttgttttgcgctggcgttctccgcgtggtcatgaagatattaccagggcgatcccctgtgctgatatcggtgagcgcgacggctggcgctcacttaaagctggtggggtgaatgtgaccactaaaagcaccttccgggcgattctggccgactggttgcagcaaagcggcactgatcgggaatggattatcacccataccactggctggcatcacggcgcatatatcatgcctgatggtgaagtgattggtgatccagagacgcccattctctttaacggtcgcagcgctgcatcttccgggtatgccattgctggtactgctgccacctggcgggattccgtcgcccgtctggccgggggcaatccgtccatgatgctgggcgtggcagcggcattatccgcgccgcttattggcctggtgggtgctgatggtttcggcgtccatttgttcgagcagtcgagcgccggtaagaccactaccgccaatattgcgagcagcctgtggggtgagcctgatgcgttgcggcttacctggtacggtactgcgcttggcatagcaaacgaagcggaggcgcataacgacagcctgttaccgcttgatgaggtaggacagggcagcagtgccaaagatgttgccacgtctgcttacaccctgtttaacggtgccggaaagttgcagggagccaaagatggcggcaaccgggagcttaaacgctggcgcacggtggcgatcagtaccggggaaatggatattgaaaccttcctggctgctggtgggctgaaagtgaaagcgggccaactggtgcgcttgctcaacatccctatggagaaatcgacggcctttaacggtctgccaaacggaaaggctcatgctgacgcactgaaagaagcctggattgataaccacggggcggcggggcgtgagtgggttaaatggctggcggctaaccagcaggaggctaaacaggcggtgcgtgacgcgcaaacgcgctggcgcggccttatcccggcggattacggtgagcaggtacaccgcgtggccgaacgctttgcaatcctcgaagccgcgctggtaactggtgcatcaatcaccggatggagtgaacaggcctgccgtgacgctattcagcatagctttaacgcctgggtgaaagagttcggcacgggtaacaaagagcaccagcagatcatcgagcagtgcgaggcgttcctgaatgcctacggtttaagccgctttgcaccgttgccctatgatccgtccagtatgccgattcgcgatctggccgggtatcgaaagcgaaaaagcagtcatgatgatgcgccgctggtgttctatacgttccccgcaacgtttgagaaggagatagctcagggctttaacgccaggcagtttgcccgcgtgcttgccgctgctggcttgctttctgagccgtccagcgggcgtggataccagcagaaatccccgcgtattgatgggcgtcagatcaacgtttatgtgcttcaccaggttgcggaagatggagaagaataa

SEQ ID NO: 120005 - DNA, 366 bp, Enterobacter cloacae
atgaccgatatttttgaagtgctgggatcattgttcagtaagctcactgaaaccattattgctcaccagatagcggaaaccggttcggcaaccttgctggtggagagcgataagtatatggcccgttatcgcttcacgcttgaaccagtagccacttataacgtgttggcgaaaacaatggttttcggttgtgctaaagagtttggccgtgatcagggattaacaaggctgcgcgatattctgctgacctgctttaccgacgatggcgatattagcgaaatggggttgcagatagtgaaaagctgccaccttgagtacctgcatgaagacctgggcgcggatatgtccaataaggtgttgcactga

SEQ ID NO: 120006 - DNA, 369 bp, Enterobacter cloacae
atgatcagcaatgtgaagtttaacgaactggctaaccgcgttgatctgctggttgagaaggtcttgcgccttgaggctcaggttaaatcacttaccgatagtcagggcggagaaatccctccgggtatgacgccagtagcaacactggccgctgaatacggtatctcaaccaaaaaggctgaggagttggcgaaaaacacaggggtgatgctggttaagctgaaatctggcgggttcgttgcgcctgatgaaaagttcagggaagcggctcggctggtgctgcgcagtgctaagcgtaaatatggctctgcgtactggttccatcccctgatcggtaaattccagatgagcggaggtatcccacaatga

SEQ ID NO: 120007 - DNA, 228 bp, Enterobacter cloacae
atggataacttttacacctaccgcagcaaaaaagatttgctgttgctggcgcaagaggttgctgcgctcatgtcatgtgctgcttacctttcaactatcaagggggaggcggagcgtatccatgttatgagtttaacgcacctggctcagcgcctttctgacgaactggcaaactcactggatatttctactttttcagaccctgaaactcaggaggcaagaccatga

SEQ ID NO: 120008 - DNA, 198 bp, Enterobacter cloacae
atgtatgacattgaaactcttggcagagaaaaagccacgtcccgcgcttgtcagttggcaacgttgcttctggtgatttcagactgcgaaatttcaggtcacgagagggataacctcatcgatctggcccgtgatatttctggcgatattgccacctttatgctggagcaggataaaaagggggcgctcaatggataa

SEQ ID NO: 120009 - DNA, 213 bp, Enterobacter cloacae
atggctgacaatcagtctacccaaactcgccctgaatttacatggcgttttctctccgcctctgagcgctaccctaccgccaaaccgttggtgatttacgtcaacgcatccagtgaacgggaagcccgcgacaccatgcccggcgtaactcttattttcgctgcccgcctgccgttccacgcatttcagatgctggaggtgcgacatgtatga

SEQ ID NO: 120010 - DNA, 186 bp, Enterobacter cloacae
atggcaacaggtgcgaagaatgcaaagtcacaaatgaccacagttcgaatcccccatgatgtgatggaagatatcgaactttttaaacatgaaggtgaaagtaccgcagggtttcttgtcactgctgcgaaaggcgaaatcaaacgccgccagcgccaaaaggcaaaagaagagccaaaatcctga

SEQ ID NO: 120011 - DNA, 591 bp, Enterobacter cloacae
atgaaaaaattaaatgcccgcgtggggcagggattcgatcactctgaaaacagcctgattgataattcagtaccaacgatgagcagcttgcaaatggttgaatacatcaatgctgatcggaaagcaaagtccgaagcggaggggttggctttcccgtgtaaagaataccgggtactgcaacacaaggattttctcaagaaaactccgaaggttttaggtggggagcactcagcgaaatttttcgctcagtacaaagacagtacaggaagatatctgccttgctatcagttccctaagcgcgaagcctgcctaatggctatgagctatagctatgaacttcaggcggcagtatatgactacatggaagagctggatcgccagaagggcggttatctggcccataccatcaatgaacttcagcatattgttgcttccgctcgtcagttctccgatgaggattcgagtgatgcaggtcttcgactgagaaaacgtcaggatgatttagtgctactggagagagcggagtatctggttaaaaacctgagtcagttaccgcttaacttcgggggaggtacttctggtgataaataa

SEQ ID NO: 120012 - DNA, 285 bp, Enterobacter cloacae
atgtcaaatattcgttttaccccgccaacacctgagcaacgccgcaacattctggcagagtacggaattaagtttgatcgtcgtattcgtgaaaatgaatgttttgaaataaccagcctttcccgttccactcgctggtatatggagaacgaaggtaaattcccgccacgctgccactttggccgcaatagctgcgcttggcttctttcggatgtgctctggtgggttcggaaccctcctgccgtggaaaacgtcaataatccgtacagccgcaaatcagcataa

SEQ ID NO: 120013 - DNA, 942 bp, Enterobacter cloacae
atggcagaaaaagaaataaagattccattttcatattgtagattgtccagaggtgcatcatttctgggggttgaaccgtcagatttgatcaaccttgctattgaaaataaaatcgaaataagcatgatgctgaaaaggtttcactgccgaatccttcttcgtgaagattttagcgatgtaaaggattggtattcatcactatattttcctcgtacttttaatgctatgtcagggcaaacccgcgcgataacgaatcactcttttattgaatttactaatggccgttattttgaaccggataaactattatctggttcagacatctttacagaacaagaaagtaaagggttccttgtcggatatggctttgcattaggtctgtggcgggtaatgcccgatcagtttgagtcatctttacctgtgaagaattttttccccggatttttcccgtgcctcacgggcggtgaaactccagtaattcagattctgccagcccaaccttttatcgatcaggcgaatggcaagaggtttaattttgacccttatgagtttgaagccgggtatgatgatttatgggttactaattatgatattaaacggcttatggaaagcggccttgatttcgataagctgccaatgctcaatgatattgaacgacctgatttagactctgattcaaaaaatagtattaataaacgctcagaaagtgcaaaagaaaaacatgcacgaaatgaactattaattttaagtgctgcaataaaattcaaagaaacaagtgctgatattttcaatgaaaagtgcttgaaaaaagatgggagctacaatttctcagcatgggccagagaactttccgacagagtgcacttattccctgacggacaatgcccggtcaggagcgttgacacaattacgtcatacattagtaggcactttaagttttaa

SEQ ID NO: 120014 - DNA, 1227 bp, Enterobacter cloacae
atggcgggcactaacaagctaagtgataaaaagctcaaggcactccagggggccagccgtaatgcgccagaaatgtatgctgatggtgaaggtttaagcgtcagggcatcaaaacaaggccaattaagctgggtgttttcgtaccggttgggtggaaggggtagcaaactcgaacgtttaacgattggccgttacccggatttgtcgctaaaagctgcgagagaaaagcgggaaaagtgccgtcaatggctggctggtggtcttgatccaaaaacagagcttgaactgagcacagaagaaacgcttaagccagtgacagtagaggatgctctcgaatactggttggtgaattacgccaggagaaagcgtagcgatgaggagctggtaagggcacaactccgcaagcatatttacccgcgccttggtcgttatccactcgccagatgtgaaacccgtcattgggtggcctgttttgatgaaataaaccagactaaaccgatgaccgccggtcgcatgtttcagatttccaaacaggcgttacgtttctgcaaagttcgccgctatgctgccagtgatgccctggtctttctcaccattcaggatgtaggccagccatccggccaacgtgaccgcgttttgtcagatagcgaactggctgatgtatggcgctgcacagaaagcgatgaccagcagccgtattattcacgtcttcttaaaatgttagtgctctttggtgcgcgaacgatggaggttcgcctttctcgatggtcagaatgggattttacctcgtggatttggactgtaccgaaagagcacagcaaaactcgcgagaaaatcgtgagatcgataccagaagctatacgtccgtggctggaagagttaaagcgcgagacagggaaaaccggtttgttactgggcgaagatcgtacccgtcaggctgtttcattgaaagggcgcaggctttataaagattttcaccataacgagccgtggacgttgcatgatttacgccgcacgttctccacagggctgaacaatatgggtatagcaccgcatatagtcgaactgctgctgggccatgccttgccaggcgttatggcgatttataaccgtagtctgtacctgccggagaaactggacgcgctgaataagtggtatgaccgcttagaacttcttgcgggtaatcatcaaaatgtggttctgttaactgtagcgaatagagattaa

SEQ ID NO: 120015 - DNA, 2391 bp, Enterobacter cloacae
atggctgaaacaaaaactaaacagccgcgtctactggtgacattaacagccgcgtttgccgcattctgcgcgctgtatttgttaatcggtggcgtatggctggtcgcgattggcggctcctggtactacccgattgcgggtctggttatggttggcgtaaccgtcctgcttttacgcagaaaacaatctgctctgtggctgtacgcagcgttactgctcgcaaccatgatctggggcgtctgggaagtcgggttcgacttctgggcgttgacgccgcgcagcgacattctggtcttcttcggtatctggctgatcctgccgtttgtctggcgtcgtctgatcgtcccttccagtggcgccgtggccagtctggtcgttgcccttctgattagtggcggcatcctgacctgggccggttttaacgacccgcaggagatcaacggtacgctgaacgcggaatccacgccggctgcggctatttcgcaggtggcggacggtgactggcctgcttatggtcgtaaccaggaaggtcaacgctactccccgctgaagcagatcaacgcggacaacgtgaaaaacctgaaggaagcctgggtattccgtaccggcgacctgaagatgccaaacgatccgggtgagctgaccaacgaagtgaccccgattaaagtgggcaacatgctctacctgtgtacggcgcaccagcgtctgttcgcgctcgacgcggctaccggtaaagagaaatggcactttgatccacagctgaactccaacccgtcgttccagcacattacctgccgcggcgtctcttaccacgaagcgcgcgccgataatgccagcccggaagtcattgccgactgtcctcgccgcattatgctgccagtgaacgatggccgcctgtttgccattaacgctgagaccggcaagctgtgcgaaaccttcgccaataaaggcattctgaatcttcagaccaacatgccggacaccacgccgggcctgtatgagccgacctccccgccaatcatcaccgataaaaccatcgtgattgccggttcggtaacggataacttctctacccgtgaaacctccggcgttatccgtggtttcgacgtgaacaccggtaaactgctgtgggccttcgacccgggcgcgaaagatcctaacgcgatcccatcggatgaacacacctttacctttaactcaccgaactcctgggcaccggcagcgtatgacgcgaagctggacctggtctacctgccgatgggcgtgaccacgccggatatctggggcggtaaccgtacgccggagcaggaacgttacgccagctccatcgtggcgctgaacgcaacaaccggtaaactggcatggagctaccagaccgttcaccacgatctgtgggatatggatatgccgtcccagccgacgctggcggacattaccgttaacggtaaaaccgtaccggtgatttacgccccggcgaaaaccggtaacatcttcgtgcttgatcgtagcaacggtaagctggttgttcctgcgccggaaaaaccggttccgcagggtgcggccaaaggcgactacgtcaccaaaacgcagccgttctctgacctgagcttccgtccgaagaaagatctcagcggtgcagacatgtggggtgccaccatgtttgaccagctggtatgccgcgtgatgttccaccagctgcgctacgaagggattttcaccccgccgtcagagcagggtacgctggtcttcccgggtaacctggggatgttcgaatggggtgggatctccgttgaccctaaccgtcaggtcgccatcgctaacccaatggcgctgccgttcgtttcccgcctgatccctcgtggtccgggtaacccaatggagcagccgaaagatgcgaaaggcagcggtaccgaagccggtatccagccacagtatggcgttccttatggtgtgaccctgaatccgttcctgtctccgtttggtctgccgtgtaaacagcctgcctggggttacatctccggtctggatctgaagaccaacaagatcgtctggaagaaacgtattggtacgccacaggacagcatgccgttcccgatgcctgttccagtgccgttcaatatgggtatgccaatgctgggtggtccaatctctaccgccggtaacgtgctgttcatcgcggcaaccgcagataactacctgcgcgcgtacaacatgaccaacggtgagaaactgtggcaaggccgtctgccagccggtggacaggcaacgccgatgacctatgaagtgaatggcaagcagtacgttgtcatctctgcgggtggtcacggttcgtttggcacgaagatgggcgactatattgtcgcgtatgcactgcctgacgacgctaagtaa

SEQ ID NO: 120016 - DNA, 303 bp, Enterobacter cloacae
atgagcatcgttaaacataaacgcggtagtgcaccggaagtgagtgcccgccgggaggctgaactcaaagcgctggcggataaacccgacagggaaattgattacagcgatataccggccacggaggatgatcgctgggccggtgccgtgcggggaaaattctatcgaccgctcaaaactcaggcatcagtacgcattgacgccgacgtgatggagtggcttaaacggccagggaaaggttaccagacgcggcttaatgccattttgcgcgaggcgatgctgcgcgatcagaacaaaaaataa

SEQ ID NO: 120017 - DNA, 288 bp, Enterobacter cloacae
atgcctatagagtatgaatgggatagcaataaggcgaaaagcaatctgcaaaaacacgccattcgttttgaagatgcagttctggtttttgacgatccctgccatttgtctgttcaggatcgttatgaaaacggggagtttcgctggcaaaccattggtcttgtacagggtgttattgtcattctggtcgcgcacacggtacgttttgaaagcggggatgaaatcatacgtatcatcagtgcgcgtaaagcggatcgtaaagagaggaggcgttatgagcatcgttaa

SEQ ID NO: 120018 - DNA, 1485 bp, Enterobacter cloacae
atgcagatttctaagaagatttacttttcagattacaaatgttcctcggctaacaagactgggattacgattgctttctctgaaagtgaatataatttatacaataatatcaaacatttaagttcagccaccctgagggatatgattgacatacaatcatatgaaaaactagaaacaatcgcaaatgaaaagaatgtaggcaagtcaacatttataaaagatattttggcaaaaaaatttgtgaatcagaaaaatgaaaaatcatttatgcgtttgcaatcaacctttagcggtggcaaaggtagtccaatgcatgattggtacccatatttagagggttattctcccgaatttgtgaaatgcttgatttcacgatttgctcctaaagccaaaacaattttagatccattttgtggctctggaacaacagccattgtttccgttttagagggtttaaataattactactgcgaagtaaaccctttatgccaatatattattgaaactaaactaatagctttaacattaagcgaagaagaaaaaacaaaattagtaaatgaactttattgtatttctaatgaaataactaatgtactcaaaccttctgcaaccgagacagatctagagaaatcatttaaatccgtttttggtaatacgaaattttttgaggatcacatatttaaagatatacttagttatcaatgttacattagctctatcgaagataacaatcttaagagacttctgacaatagcagggattagatcgttaatcccttcctcgttattggtaagacgaggtgatttacgattcaagacacaaaaagaattagagaaaggcaaccagggctttcgctttcatgtacaaaaaagcttagaattaattgccagtgatttattagacattacggaaggtagtggtttagccaccttcttatgtgatgatgccaaagaaatatctgggaataacctgattgatgctgtaataacaagcccgccatatttaaatggcacaaactattttagaaatactaaaattgaactttggtttatagggaaattaaagaccaaatcagatctaagacattatagggatttagctattaccagtggtattaacgatgtaactaaaggtaaaagcttatcttcaaataatactattatctcagaaataccattattatctgaatgtattaaagaactaagcataaaagagtatgatagtcgtatttcaatgatggttgaaaactacttttgggacatgttcaaattcttatcaaaactccccaaattactaactaatgatgcgactatctgtatagatttaggtgattctgtttattgtaacgtctacatccctacacaagatattttgaaagaaatgatgtcaaagttaggttttgaagagaacgaaagggtcattcttcgtgaacgaaaatcccgcaatggaacaaagttagtccagactgttcaggtttttaaatga

SEQ ID NO: 120019 - DNA, 1140 bp, Enterobacter cloacae
atgaaaaataaatattttagtaaaaaatgggagcaattcaagaaagaattaccccatcaatcaggtgaaatggtaaagagaaattggggccataactggcactctatgtgttcataccaagggaaacttaaaccatcaatcgctagatctttaattgatacattcatgccatcaagtaagggacgtatattagatgtcttctcaggtgttggcaccattcctttcgaagcaagattacttggtcatactgcatatggatttgatattagtccagcagcagttaatatttcacgtgcaaaactagaagttataagtaaaaatgaaattcaagaggtaatcaataaattatctgattttattgatcaaaacaaaaattcaatagattataacgaacataatttaataaggtttaatggttcaattgaatcctattttcatcctgaaacttttaaggaaatactgtgtgctcgtaaattctttttaataaaaggtgaattagatgcatctgaatcgttagtacagtcatgtttattacatattttacatggtaatcgtccgtatgcattgagtagaaagtcccatcctattacacctttcgcgcctactggagattttatatacagtaatttagttataaagttaattaaaaaagttgaaagagtcttgcaaaattctgatgatatcccagatactggcagcaaagtattttatcaggactctacaaaaagttggcctgaagaagtaaataatttagatgcaattataacatcacctccattttatgatagtacccgtttctattcagcaaattggatgcgattatggttttctggttgggaaaaagatgacttccaaacgaagccaaaagattttgtggacgaaactcaaaaaaaaagctttgaaatatatgataatatattcaaacaatctcaacaatgcttaaaaaaagatggcgtttttttaatgcacgttggtaaaagtaaaaaaagtgatatggcaggacaaattgctaaaattggtagtaattatcttagccttatagatatatttgacgaaagtgttgaacattgcgaaagtcacggaattaaagacaaaggcacgacaacccatcatcagtaccttgtctttacgaaagattag

SEQ ID NO: 120020 - DNA, 1005 bp, Enterobacter cloacae
atgagcagaaggcaagcatacacgagggttgaaaggatcaacttcaatttacctgaacatgttaaaggtaaaggtgatgtaggatatcgcgtatttgaatgcttgaatccacaatgtcgtaacatgatacagattcaaactgaggatttaccacctgattttgagtttgaatgcgaagaatgcggttttcaacataaagcaggtgaggtgattaacatttatgaatataatttaattaataatacagaaaaccgtgttattgaaaatggagagttttcaatattgcatgatgattatatagctgaagcattagagtataaatattgtattatttgcggcttattaaagcctttgcaatcttttgatatacactcaagacgtaaaaccggtaggcagggcgaatgtagattatgcaagcatgtatataattctataaaaaatcaaaccagattgactgagcagcatagagaagcgtctcaaaaaagaagactatatgtgcaattcgattctaaaaataaaattgatgttaacgagatatatagaagatttgataataaatgtttcaaatgtggtttggatttaagtgctgatttagtagccaactctgagaaaaaaatgggtaatttggatcatacattgcctgtatattacttatggcctttgactactgataatgccacattgctctgtaaagtacataatggagaaaaagcagagaaatggcctggggagttttattcaaggcaagaattggcatcactctcaagattgaccggggttgaagctcgtgttttggctggggcaccaatatttaatccagaagcaattgatattttaaaaaatcctaaattcgttgaaggtttagtcgataagttttccagatatccgaatgaggtatataatttacgcaatcgaattaagagagttacagggttcgatttcttcgataaccctaatttgaaaatttctgctaattgggttatcgaagccgataaacttatctaa

SEQ ID NO: 120021 - DNA, 456 bp, Enterobacter cloacae
atgagtggatcttcattaatgattatgtctgtttttggcttaaaaaatatatacggaaaagatcccatatatatagtttttagaacaggtagccatgaaattttaaatgcatttctatcatttgacgaggctcaaaatttctgtaatttgcatttagacaaatcccctacaaaaatatttccaaaagtagtgtctactaaatccaaatttataccaaaaaaactctccataaaaagcattatcgctattgaatataccggtaaatgggtatatctgagcaaagttgagattaaatttatagataataaaattgaggatattgggattgtgtcacattctaatatcgatgaaaaaaacttactacttttaaaaaattatctaccacttagaatagaacgagatatactctctaaaagtatagaaaagcctaatattattaaaaagttatccgtgtag

SEQ ID NO: 120022 - DNA, 246 bp, Enterobacter cloacae
atggataaagttaatttaaactcagatgattattttttttcaatgggtaaagttattagcattaaatcagaattaaaaatcagaagcttaaatggaaatgtgatgagtttttcttatggaaaaaatttatatgcatatatagtcgatattggagtaggagaagatgtttgtttttggtatgaagaaaaggagggatgcactaaggtgattaaagaaatcaccagagcacagaacctacacggataa

SEQ ID NO: 120023 - DNA, 138 bp, Enterobacter cloacae
atgcgtatctttttcaatagtttgatctttatatcctatttttacattgccaagatcataagaacttccgtcattatctgtaactatcacatggaatgttgtacgaaaggagaaatcatcccaattatcaattcgtaa

SEQ ID NO: 120024 - DNA, 465 bp, Enterobacter cloacae
atggctactatcccaacccttattttttctgagcataacgaaaaattcacccagcagttaatcgcccatccgcttccatcttctgcggacctctttgaggttgctgatttctgtgccgcgtttgcgagtgtgcttatcgaaacggacgatgccgcagaacgcaatgccttatgcggacgcttactgaatgcgcttatgcacatggagagactctgcgaaaatgatctgcctgtgcatttaatcgaccagcttactgcggaagaaatacccgtttctattatgcctgaatgctggcaggacactgatatacccgtttcttacgccgttgcacttacacaatctttgctaagtaataatctgcctgactcactagcaaaagcgttagcggggcttttgcatgatctcgtctatctcttggctgattttgtgaaggaaccctatattcagcgacagaatatgctctga

SEQ ID NO: 120025 - DNA, 903 bp, Enterobacter cloacae
atgaaagcggatctgcgcacgctggatcttaacctgctgaaaacgctggatgccctgctggacgaacgcagcgtcacccgcgcggcggcgcgtcttgccctgacccagccagcggtaagcggcatgcttaaccgcctgcgggattactttgaagacccgctgtttatccgcgcgccgcacggcatcgtgcctaccacccgggcggaagcgatggcggctcccgtcaaacgcattctggcagatatcgacgagctgcttcagccgatcgcctttgatccgctcaccgcaacgttcaccttcacgcttgccgcgaccgactacgccctgcgcgcggtcgtcgtgccgtttatcgctgcgcttaaggtgcaggcgccgggtattcgcgtgcgcgtggtgcctgtggaatctgaccgtctggtcagccaactcgaacaaggctctgtcgacgtggcgctgatcaccccgcataccacgcctgacgagcttcacagccgggcgctttatgatgaacggtacgtttgcatgatgcgtgctgaccatccggatgccggacagcccatgacgttagaccggttttgcgccctggagcatgtgctggtctcttacgagggcgacggttttcgcggcgtaacggatggcgcgctggagaagactggccgaacgcggcatgttggcttatcggtgagtaactttttagtcctgccggacgtgctggccctcagcgatatgattgccgttgtgccatcacgcatagcggaaaagcagacggggatgttcgtctgcgagacgccggttcccgtgcccggctttaccaaaagcatggcctggcacggcagaacgcaccgcaacctcgcgcaggcgtggctgcgcgggctgttgctggagaccagtcagcgcgcctga

SEQ ID NO: 120026 - DNA, 519 bp, Enterobacter cloacae
atgaaacaatccgccattatctggccgaacgactacctgcccggcaccaccgataactttgcctccaacgaaatcatcgtcgccgggctgagcgcaaaagagatttgggcgcagctcaacgacaccaccctgtggccgaactactacagcaacgccgaagatatccgttttcacgacggcagcggcccggcgctgagcgccaacgcccgcttccgcttcaccacctttggctttccggttgaggcgcaggtgacggagtatgttccgcccgtggagggcgaagccgcgcgtatcgcgtggcacggctgggtagaaggggatgcaaattcgcgtctggacgtgatccacgcctggctgtttgaagacctgccgggaaaccgcgtgcgcattctgactcaggagtcgcagaaaggcgtgccggcgcaggaattagcgcgcacggtgccgaacccaatgattaacgggcatcaggagtggattgtcgggttggcgaatgccgctcttaaggctcgcgggtaa

SEQ ID NO: 120027 - DNA, 252 bp, Enterobacter cloacae
atgcgtgttattagttacagtgaagcccgacaaaacctgtcggcaacaatggtccagacgacggaagatcgcgcgccggtgcttattacgcgccagaacggtgaatcttgtgttctgatgtcgctggaagagtacaactcgcttgaagaaaccgcatacctgatgcgctccccggcaaacgcaaaacgtctgatgaactctatcgagagcttgaaatctggtggcgggaaggaaagggacattattgagtga

SEQ ID NO: 120028 - DNA, 255 bp, Enterobacter cloacae
gtgaagatcacatggtctgaagaggcatgggaagactacctctattggcaggagaccgataagcgcatggtgaagaaaatcaatgagcttatcaaaatctcctgtcgcactccgtttgaggggatcggcaagccagagccattaaaacataacctggctggcttctggtctcgccgaatcacctctgagcatcgcatggtctatgccatcacagaagaagcgatcctcatagctgcgtgccgatatcactactga

SEQ ID NO: 120029 - DNA, 318 bp, Enterobacter cloacae
atgttgttgccggatgagcaagagtttttagattacatcactgaaaattacagtgaacgtaagcgtcctgccctgaaggaatggacctttcaggagcattttaacctcgtccctgaagatctggaggagatgctgctcgacctttttaaccggtatggaattgagcacagcaactttgtcatggacaactactttgagcccgagcttttttggttccagtttgggctaagaaagaagtttcgagatcgtcagtacaagccgctaatgctcgaaatgattattgagtctgccaaagcggggcgctggttgtatgattaa

SEQ ID NO: 120030 - DNA, 588 bp, Enterobacter cloacae
atgaagcgtttattttgtttattgccattactcgttgcagtcagttcgcacgtctcagcaacggaaatgaccggcttcgcgaccgagtattacgatgaagacggatcactgacggaaatttctacaacagtgcccctttcaccgaccatcgctataagcaagcaagccgtacgaatggaggttactcacctgtcagatatcaccagcacaccagttaacaaagacagctcagcacgctgggtctgccttcatgacgacgatggcacgaattactggttcatttctgataacgaaatgggtgcaggattgttaactgcgctagttattgccaaagatggcatccataaagagtgtgctaaaacaacggaacctgtcagcgtctcagtcgcgaatgttccattgttgaatgctactcacaggaatctaattgaaatgttcggcaagaaagggatcgccaaaaagaaagcgatacttttttatcaggagacgccagtacagaatggattcatccagagtaatacggtctcgtattacttcgatggcgaaaaagtgcgtggtgtaatcatcgggcaaattaccagtaactag

SEQ ID NO: 120031 - DNA, 1029 bp, Enterobacter cloacae
atgacatatgaggaattaataaattctccagccggtgagttcgtcatgtttgccagcaaggatggaaaagttcgcattgaatgccgcttcgaaagcgatacgttgtggctctcacaggccacgatctgtgagttatacggcaaagccaaagctacgatcagcgggcatatcaagaatatttttgatgagggtgaactggtcgaaaattcagttgttcggttttaccgaacaactgccagcgatggtaaagtatataacgttcaatactttagcctgcccgtcattctcgccatcggctatcgcgtccgatccacgcgaggtacgcagttccgccagtgggccacccaaacgctccaggaatacctggttaaaggcttcgttatggacgacgagcgcctgaaaaatccgcctgtgggatcttccgccgtccctgactatttcgatgaaatgctggaacgcattcgcgatatacgggccagcgaacgccgggtctatcttcgcgtgagggagattttcgcattagctgctgactatcagccgtcgctcaaagaaaccacgcaattctttcagaccatccagaataaactgcattttgcctgcactgggcacaccgctgctgagttgattcaccaacgtgcggacgccactcaaccgcatatggagctgaccagctataaaggcgaagaagtccgtaaaagcgatgtcaccaccgcaaaaaattatctgtctcaggatgaggtgagcgagcttaatcgcgtcgttaatatgtggctcgattttgccgaagatcaggccaaacgccgcaagcaggtatttttacgagactggcaaaccaagctcgatcagttcctgcaattcaacgaccgggacgttttagaaggcgcaggaaaaatcagcaagaaagcggctgatgagaaggcgtgctcagaatacatcgaatatgaaaaaaagcagcgcctgctgaaagaggccgaaggtgagaaagatattgtcggcttattaaaatgggataagcaggctaagcgctaa

SEQ ID NO: 120032 - DNA, 192 bp, Enterobacter cloacae
atgtcaatcatatcgcgcgaaaaaaaaccaaaaggcggcggacaatctccgcagtttaaaatgcgtattgatccggcattgaaggaacagttggatgcagtggcagctgaggaaggggtgagtctcgccagctggttcaaggagctggcgagggaggctttgcgattaaggaaaattgaacctaagggttaa

SEQ ID NO: 120033 - DNA, 807 bp, Enterobacter cloacae
atgcctaaagaaatggatcgatatggtaccgttaaagtaatatctggaaaatttaaagggcgtattggttattacgatgatgatgattctattttcccagaaaactatgaatggaatgaagaagatgacgatgatgaaacaatagagggtataatccatgtcgctatcgtatattttggccatttttctctagcgactgagcatcatggaatctcttatgatgatttagaatatgcatcaatgcacgatttagtaaatcgtaaagctgaacttactaaactgtgctctccatacaataaaatatcatataagaaattgtgtggttatttttcagaattacattacattgaaactacacttctgaaccaaattgtggagcagcgctatatgaataaacctaacggggcaaaaattttcatttctcattcatcattggataaaccgtttgcaaagatgttatgtatggaccttgaagcaaatggttatgcttcttggttggatgaatgggacataaaagtaggggaaagtattcccgaacgaatttcagacggattagaagaagctgattttgtaattgttattctttctggaaatgcggtttcatcaaaatgggtagaaagagaatggcaaaaaaaatattggaatgaaattcaatataatcgtattcacgtgcttcctttacttttgaaagattgcaaaatacctgagttgttaaaaacaaaaaaatacgcagattttagaaatgattttaatagtggattaagggacttattggaagcactagaaactttgtataaaaagaaatga

SEQ ID NO: 120034 - DNA, 696 bp, Enterobacter cloacae
atgatctacttacgcaaagcaaacgaacgtggtcacgcgaatcatggctggctggactcatggcattcattctcgtttgccgactactacgacccgaactttatgggcttctccgcactgcgcgtgattaacgacgacgtgattgatgcaggccagggcttcggtacccacccgcacaaagacatggaaatcctgacctatgtgctggaaggggcggttgagcaccaggacagcatgggcaacaaagagcaggttccggcgggcgagttccagattatgagcgcgggtaccggggtgcgtcactctgagtacaacccgagcaaaacggaaaaactgcacctgtatcaaatctggatcattccagaagagaccggcatcacgccacgctacgagcagcgccgcttcgacgcgaaacagggcaaacagctggtgctgtccccggatgcgcgtgaaggttccctgaaagtgcatcaggatatggagctgtaccgctgggcgctggcgaaagatgaacagtctgtacaccagattgccgctaaccgccgcgtgtggatccaggtggtgaaaggtgaagtgtccatcaacggcaccaaagcgacaaccgccgatggcctggcagtctgggatgagcaggcgctctccgtgcatgccgacagcgaaagtgaaattctgctgtttgacctgccgccggtctaa

SEQ ID NO: 120035 - DNA, 447 bp, Enterobacter cloacae
atgactactacccctaacttttctcacactttatttactaccccattcgatcacaccactgatttcaccgaactggcagataattgctcgcggtttgtcgacgtgctggttgaatgtgacgatccaacccagaagatggcgctgtgcggacggctctcagcctgcctcgcactgcttcagcctacgctgcttgaacctgttccggaatatttaaaagccagcctgacggtggatgacctgccgctggacgtgccggtcttcgaaccggaagtggatcagttagggcgatattgccagctgttaacgcaaatgctgttagcgcattcgctgtcagaaagcgatgaaagagtcgcaggagatttgttgcaggatttagtggggttttacagtgatacgctgaaagcgccgcgctggttgctcacaaaggaaggcatcgtgccgctgtaa

SEQ ID NO: 120036 - DNA, 1758 bp, Enterobacter cloacae
atggaaaaccgtgagacgttatccccttcaacgcgcgtagccgtcgtgctggcgggggctttacagggcgtaatttgctatgtaatcacgtggtatatcgagtacgcaaaattgccatcggatacgctgtggctgatgtgtgtagtacctgccaccgtggtaatgacaaccacgttgtcgcttgccatgacgtcattcagaaagccatttttgtggctgtcactcgggatgattggcgcggcagtcgcggggatgggcggctggcttaagtggagcgttgcggggctggacaactgggataccagaaatgcggtgctccttttcggttttcatctgctcctgatgacgcttctcctgttgccatggcttcagcgacgccttgagaccgcaccgacggacgctttctaccgcgatttcaacgataaaaactggcataacgcgctgacatttcttcttgtttttgtctcgaatgggctgttctggctggtgcttttcctctgggctgagctttttaaactcattggcatctctttttttgatcggcttttctttaattctgactggtttatttcagtggcgattggcgtggtttcagccagcgcggcagtacttgcgcgtatgcaggttcggctgattctggcattgcaaaatctccttacgcttatcgcgacaggtttgcttccactgatggctgcgctggcgctgctctttataggcatattgcccttcgttggcttagaggctgtttcagcacggatctcggctgcgggcttactgacgacgctggcgctgttgctgttattgctggtgactgtcgtatggcacccacaacgtcaaaagctgccttacttctctcccctgcgaggaatgattcatcttgccgtgattatcgctcctgcgtatcccgtcctggcgggctgggcgctctggctgcgcatcgcacagtatggctggtcaccggagcgtctgtacggtgtgctgattacgatagtggcgctggtctggacggtaggattctgtcttagcgtacttttttaccgtcgggatccacaaaggctccaggctcatatcactccggctaccggattactggcgctgatcttcctggtgttggtctatacaccggtgcttgatccctggcgtatcagcgttgaaagccatatggcgcgttatcaggatggcagaataaacgcagaccaggtaagcctgtatatgctcagcaataccggacgaaaggggcgagaggcgatgcaaatgctgcaaaatgatccacagtttatctcaaacccaaaacgccagcgtgaaataaatggtcttctctccgggaacgctggcggagcaggtaagatgaccgccgcgatgctggaaaaacagatccagctcgcaccgggaatggcccgtcctgataaggcattgtggcgagccatgctcagcaatcagtatcgctttgagagctgcgatagcgcccagagaaactgtttactcatgccgctggatcttaacagcgacggcaagccggaagccgtgctatttcaatttaccgatcgcaggatcgtggcttacacacaaaccaacacgggctggaggatcgccggggacgcgtggaaaatgccggaggcgttgaccagagaagaacttgaccgcgcattaaggcagaggaaagtgaaatctgtcgtgaagccctgggcggatattgagatttttggggagcgtgtcgatatgagctacgacagttacaataatgcgcagtggcgttag

SEQ ID NO: 120037 - DNA, 246 bp, Enterobacter cloacae
atggttctttgcatcgtgaaaaatatgcatcacaaagctgaaaagaaatccgttgaaaatggcgagagctttattgctcaaacccttgcgtggcgtggaggtaaacgtttgcgtaaaatcgtttgtcaagacctgttatcgcagaactattcagttatactgttgcccgtcgtccaacaggactgccttttcaggccaaaaatttacttgttagctgagtcaggagatgcggatgttaaagcgtga

SEQ ID NO: 120038 - DNA, 1140 bp, Enterobacter cloacae
atggtcttgcattccacgcgctggctggcgctcagctatttcacctatttctttagttacggtatttttttgcctttctggagcgtctggctcaagggaattggtctgacgcctgagaccattggcatcctgctgggcgcggggctggtggcacgtttcctgggtagcctgctgattgcgccccgcgtcagcgatccctccttactgattaaagcggtgcgaattctggccctgctgacgctggtctttgcggcctgtttctgggtcagccatcagtttgcctggctgatggtggtaatggttggctttaatctgttcttctccccgctggtgccgctgacggatgccctggcgaacacctggcaaaagcagatcaccatggactatggccgcgtgcgcctgtggggatcgattgccttcgtgatcggctctgcgctggtcgggaaactggtcagcctctatgactatcgtgccattctggcgctgttaacgctcggcatcgcctcgatgctgctcggtatgttgctgcgtccgtcggtgatgccgcagggcgaaagccgccatcaggagagcgccggctggcccgcctggcgctcgctggtggcgcaaagctggcgtttcctggcctgcgtctgtctgctccagggggcacatgcggcctattacggcttcagcgccatctactggcagggggcgggctactcggcttctgcggtaggctacctgtggtcgctcggcgtggtggcggaggtcattatcttcgcgctgagccaaaaacttttccgtcgtttcggggcgcgtgacctgctgctgctttccgccgtttgcggcgtggtgcgctggggcatcatgggctggacgactgagctgccgtggctgattgtggcgcaaattctacactgcggaaccttcaccgtgtgccatctggcggcgatgcgctacatcgcggcgcgagagggtggggacgttattcgtcttcaggcggtctattcagcggtggcgatgggcggcagtattgcggtgatgaccgtatttgccggtttcctctatcagcacctggggcacggtgtgttctgggtgatggcgctggtcgctttacctgccatcgtcatccgccctaaagtcgctgctcgcacgtaa

SEQ ID NO: 120039 - DNA, 1278 bp, Enterobacter cloacae
atgatgacgacgcttgaaattccatctgtgctttccagttcgcagcgccgctgccaggtgcttttgatgctttacctgcccgatgctgccatcaccgcacagagcataatcgctgccaacggcgtggacgacgtcatggcacggcaagatatagccgagacgcgcgatgaaatccagcgctatcatcggcttgatatcgtcacgcaccatgatggctgctaccgaattgagggttccgcccttaatcaacgtttgtgcctgctgcactggctgcgcagggcacttcggctctgtccacattttgtcgcccaacagtttacccctgccttaaaaaccgcgcttaaacagcacggcattgcccgcccgctttatgacgatgcgaaccttcgggcgcttatcaacttttgcgcgcgcaagcttcagcgccagtttgagtcccgcgacgtacagtttttacagctttatctgcaatattgtctgattcagcatcatctgggcaatacgccagagttttcgcccgttcagcgcagctggacgcagtcccgaggggaatactttacggcgcaggaaattgtccgccactggaaacggcgcgtcccgcagggaacgcacagcgatgaacagctgttcctggcgctgctatttatgatgcttcgcacacccgacccggtgatggataaacaccagcaggatcagcgcctgcgtcgcgccatcgtgcgtatgattgcccgcttccgggcgcaaaccgggatgaacttcagcgatgagcaggggctgaccgatcagctttatattcatctggctcaggcgctggaccgctccttatttgacatcggcatcgacaacagtctgccggaagagatccaccgtttatacccccggctgctgcgcaccactaaagaggcgctgtttgagctggaagccgaatttggtctgcgattctccggtgaagagatggctctggtggcggtgatttttggtgcctggctgatgcaggagaccgacctgcatgaaaaacaggtggtcctgttaacgggggaagataaagcctgcgaagcgttaattgagcagcagcttcgcgagctgacgctgctgccgctcaatattcgttatcttagcctggaggcgtttaagaaggagggcgccccccgcgaggcggcgctggtcattacgccttatccaaccgccttgccgctgttctcgccgccgctcattcatgccgttgagaccctgaacacgcagcagcaggaacatattcgcgttatgctcgaatcatag

SEQ ID NO: 120040 - DNA, 639 bp, Enterobacter cloacae
atgcaaatagttaaacaaagcgcggtagcgttatttttggcggttttcacttgtgccgccggcgcacatcctcacagttttatcagcctgaaaaccgaactggtgacggacggcacgctgctcagcggcctgaaaatgcgctggacgatggatgaaatcacctccgccgacctgctgtacgatgccggaaacgcaaagcccggcgatgagatctggaaaaagctggcggcggaagtgatggccaacgtgctgggtcagcactacttcaccgagttctggcacaacggacaaaaggtgaaatttctcaaccgtcccacggtgtacggcatgacccgcgacggacatcaggcggtgctgacctttatccttccgctggcgcaccctcaaccgctggccgggcagaagtacaggttttccacgtttgacccaacctactatgtcgacatgcgctatgacaatgacagcgacgtacggctgccggacgcgctgcaaaaaagctgcaaaattgccgtgcacaccccgaaacccagcgaagagatgctgaactttgccgtttctcttgataaagaggatgcgccccccgaagacatggagttaggtaaacagtttgcgcaggaggtgacgttacaatgtcagtga

SEQ ID NO: 120041 - DNA, 1578 bp, Enterobacter cloacae
atgacggaaaacattcataaacatcgcattctcatcctggactttggttctcagtacactcagctggtggcgcgccgcgtgcgtgaactgggcgtttactgtgagctgtgggcgtgggatgtcacggaagcacagattcgcgagttcaatccaagcggcatcatcctgtccggcggcccggaaagcactaccgaagagaacagcccgcgtgcgccgcagtacgtgttcgaagcgggcgtaccggtgttcggcgtttgctacggcatgcagaccatggcgatgcagctgggcggccacgtagaaggctctaacgagcgtgagttcggctacgcacaggttgaagtcgtcaccgacagcgcgctggtgcgcggtatcgaagactccctgaccgcagacggcaaaccgctgctggacgtgtggatgagccacggcgacaaagtcaccgctatcccgtccgacttcgtgaccgttgccagcactgaaagctgcccgttcgccatcatggcgaacgaagaaaaacgcttctacggcgtgcagttccacccggaagtgacccacacccgtcagggtatgcgcatgctggagcgcttcgtgcgtgacatctgccagtgtgaagccctgtggaccccggcaaaaatcatcgacgatgccgtggagcgtatccgccagcaggttggcgatgacaaagtgatcctcggcctctccggcggcgtggactcctccgtgaccgcgatgctgctgcaccgcgccatcggtaaaaacctgacctgcgtcttcgtggacaacggtctgctgcgtctgaacgaagcccagcaggttatggacatgtttggcgaccacttcggtctgaacatcgttcacgtggaaggcgagcagcgcttcctggacgagctgaaaggcgagaacgatccggaagcgaaacgtaaaatcatcggtcgcgtgttcgtggaagtgttcgacgaagaagcgctgaagctggaagatgtgaaatggctggcgcagggcaccatctaccctgacgtgatcgagtctgcggcctccgccaccggtaaagcgcacgtcatcaaatctcaccacaacgtgggcggcctgccgaaagagatgaagatgggcctggttgaaccgctgcgtgagctgttcaaagacgaagtgcgtaagattggcctggaactgggtctgccgtacgacatgctctaccgtcacccgttcccgggcccgggtctcggcgtacgcgtgctgggcgaagtgaagaaagagttctgcgacctgctgcgtcgcgcggacgcgatcttcatcgaagagctgcacaaagctgacctgtacaacaaagtgagccaggcgttcaccgtgttcctgccggttcgctctgtcggcgtgatgggcgatggccgtaagtacgactgggttgtttccctgcgtgcggtggaaaccatcgacttcatgaccgcgcactgggcgcacctgccgtatgacttcttaggccgcgtgtctaaccgcatcatcaacgaagtgaacggcatttcccgcgtggtgtatgacatcagcggcaagccaccggcgacgatcgagtgggagtaa

SEQ ID NO: 120042 - DNA, 1044 bp, Enterobacter cloacae
atgcgctactgcgtttatcttctcttcttcatttgcgtgcttcccgcgcctttggtgtgggctgcgcctgcgcagcagtctttttcagactggcaggtgacctgcaataaccagaacttctgcgtagcgcgcaataccggcgagcatcgcggtctggtcatgacgctgagccgcagtgcgggggcaaaaacggacgccagcctgcgcatcgatctcggcgggctttcggcgccaccggtgaaagagcctgacatcgccccgcgcctgctgctcgacaatgtgccgcttaaactcacgtcgcaacactggcagttagccccctggcatcttaaaacagacgatacggccaccatcaccacgtttctgaaaaccattcaggaagggcaggcgctgaccctgcgcggggggaagcagacaatttctctggccggtctgaaagcggcgctgctgtttatcgatgcccagcaaaaacgcgtcggaagtgaaacggcgtggattaaaaaaggggatagtccaccgctgagcgtgccgcctgcgccggcattaaaaaaggtggcggtggtgaaccccacgccaacgccgctgacgcataacgaactcaacgatctgctggattacggtacctggcgcatgaaccacagccagtgctctctcgatccgaaccggcgtgaagtgcgcgtgaccgcgctgaccgatgacaaagcgctgatgatcatcagctgtgaggcgggggcgtacaacaccgtcgacctggcgtggctggtgtcgcgtaaaaaaccattttcggccaggagcgtgagattgcgcctgccgtttaccccttccagccagagtagcgacatggagctgatgaatgccagcttcgacgaaaaaacgcgcgagctgaccacgctggcgctgggacgcgggattggcgactgtgggatccagacccgctggcgttttaacggccagcgcttccgcctggtacgctacgcggaagagccaagctgtgataactggaatgggccagatgcctggcccacgctgtggatcacaaggtag

SEQ ID NO: 120043 - DNA, 1437 bp, Enterobacter cloacae
atgtctgaaaccaccaaacgcaataccatcggcaaattcggcctgctgtcgctgacctttgccgccgtgtttagttttaacaacgtgatcaataataatatcgaactcggacttgcctccgcgccgatgttctttttagcaaccctgttctattttatcccgttctgcttaattatcgctgagtttgtctcgttgaataaaaactcagaagctggagtttatgcctgggtaaaaagttcactcggcgggcgctgggcatttattaccgcttatacatactggttcgtgaatttattcttcttcacctcgttattaccgcgcgtcattgcctatgcctcttatgcctttcttggctatgagtacattctcacaccatttgccacaacggtgctaagtatggtgctgttcgccttctcaacgtgggtctccaccaacggggcgaagatgctggggccaattacgtctgtaacctccacgctgatgctgctgctgacgctctcttacattctgctggcgggcgcggcgctaatgggtggggtgcagcccgctgatccgattaccgtcgacgcgatgatcccgcattttaactgggcattcctcggcattaccacctggatatttatggctgccgggggcgcggaatccgtcgcggtgtacgtaaacgatgtgaaaggcggttcgaaatctttcgttaaagtgatcatcctggcggggatctttatcggcgtgctgtactccatctcctcggtactgatcaacgtctttatcagcagcaaagcgttgaagtttaccgggggttcggtgcaggtgttccacggtctggcggtgtggtttggcctgccggaagtgttgatgaaccgtttcgtcggtctggtttcctttaccgccatgttcggctccctgctgatgtggacggcgacgccggtcaaaatctttttctcggagatcccgaccggcatttttggtccgaaaaccgtggcgctgaacgaaaacggcgtaccggcgcgggcggcctggatccagtatttgattgtgatcccactgatgattatcccgaccatgggctccagtaccgcgcaggagctgatgaacaccgtcatcaatatgaccgcagcagcctcaatgttaccgccgctgtttattatgctggcctacctcaacctgcgtcgtaagctcgatcacctgccgcgcgatttcaggatgggttcacgaaccacgggtataaccatagtgtcgatgctgattgttattttcgccattggttttgtggcatccactttccctaccggtgccaatattctgacgattattttctataacgtcggtggcattgttttattcctcggatttgcctggtggaaatacagcaaatacgtaaacggattatcaaaagaacaacaaaaaattgaagcatcacctgcctcgaatattaactga

SEQ ID NO: 120044 - DNA, 3084 bp, Enterobacter cloacae
atgaatcgctgggaaaatattcaactcacgcatgaaaaccggctcccgccgcgtgcgtacttcttctcttatgacaccgtttcccgggcgcgcacgtttgcgcgtgaagccagcagccactttctgtcgctaagcggaaagtggaactttcgcttcttcacgaacccgctgcttgtcccggaaaactttacctcagaatacatggccaactggggcgatattaccgtgccgggcatgtggcagatggaaggtcacggccagttgcagtacaccgacgaaggctttcctttcccggtggacgtaccatgggtgccgtcagacaacccgaccggggcataccagcgctggtttacgctttctgaaagctggcaagagaaacagacccttatcaagtttgacggcgtcgaaacctatttcgaagtctacgtgaatggccgctatataggctttagcaaaggcagccgactgtctgccgagtttgatatcagcgatgcggtacacagcgggcaaaacctgttgtgcgtgcgggttatgcagtgggcagattccacctacattgaggatcaggacatgtggtggacggcggggatattccgcgacgtctacctgctgggaaaatcactcacgcatgtccgcgatttcacggttaaaaccacctttgacgaggcataccgggacgccaccctcttctgtcagcttgagctggaaaaccttgctgcacgccctggctgtgttcaactggattataccctgtacgacggcgggacaatgctgcaccagggaacaaccgacaacctgaccgtcagcgagcgtgcggaaaccgccttcagcattgaggtgaggcatccccgccagtggtccgctgaatcgccggatctttatcatctggtcatgactttaaaagataaccatggccagacgctggaaatcatcccgcagcgcatcgggtttcgggatatcaaggtgaaagacggcctgttctacgttaacaaccgttatctgaagctgcacggcgtcaatcgtcatgacaacgatcatctgaggggccgcgcggtggggatggatcgcgtggagcgcgacctgatcctgatgaagcagcacaatatcaactcggtacgtaccgcccactacccgaacgacccgcgcttttacgagctttgcgacctgtacggcctgtttgtgatggctgaaacggatgtggaatctcacggcttcgccaacgtcggcgacctgagccgcattacggacgatccggtgtgggagccggtctacgttgagcgtatcgaacgccatattcacgcgcagaaaaatcatccgtcgatcatcatctggtcgctcggaaatgagtccggctacggctgtaacatccgcgcgatggcccgtgcggcaaaagcgctggatgatactcgcctgcttcactacgaagaagatcgcgacgccgaggtggtggacattatctccaccatgtatacccgcgtaccgctgatgaatctgtttggcgaatacccgcacgccaaaccgcgcattatctgcgaatacgcccatgcgatgggcaacggtcccggcgggttgaccgagtatcagaacgtgttcgatcgccacgactgcattcaggggcattatgtctgggagtggtgcgaccacggtattcagaaaacagacgccagcggcaacatctggtacgcctatggcggcgacttcggtgattaccccaataattacaacttctgcctcgacgggctgatctactccgatcaaacgcccgggccaggtttgcgtgagtacaagcaggtgatcgccccggtcaaactgcgctggcaaaacggtgagctgcacgttgataaccgcttatggttcaccagcctggatgattacaccctgctcacggaggtgcgtgcggaaggtgaaacgctgcacagcgagccactgaacatcaccgggttggcccccaacagctcccgcagcgtcagcctgcacgtgccggaactggacgagcgcgaagcatttctgactgtacgtattatcaaaaacagtcccacgcgctacagcgaggtcgggcacgagatcgcggtgtatcagttcccgttaaaaggccgcacggcacgcccgacaccgtttatcaacaccagtgccactccgctgcgtctggaggaagatcgcctgagctgcaccgtgaccgggcataacttccgcgcgagcttctctaaagtatcgggaaaactcagcgcctggcaggtgaacggtgaggaataccttacccgtgagccgaagattaacttcttcaagcccatgattgataaccataagcaggagtatgaagggctgtggcagccgtatcatttccagatcatgcaggagcacctgcgcggtttcgaggttgagcagcatgacgatgcgatcatcgtcaccacccgtaccctgattgccccgccagtgtttgattttggcatgcgctgtacctatcgctggcgcatcgccgccgacgggcagatcaacgttgagctatgcggtgagcgctacggcgagtacccacacattattccgtgcatcggctttacgcttggcatcaacggcggtttcgatcaggtgagctactacgggcgagggccgggtgaaaactatccggacagccagcaggccagcaccatcgacctgtggcacaccacggttgataagatgtttgaaaattatccgttcccgcaaaacaacggcaaccgtcagcaggtgcgctgggcctccctcgcggatcgtcatggcagcggcgtgctggtcgtaccgcaacagcctctccacttcagcgcctggcactacacggctgagaacattcacgccgcacagcactgcaacgaactgcgccgctgcgatgacattacgcttaatcttgaccaccaggtgctgggcttaggctccaattcctggggaagtgaggtactggagagctggcgcgtctggttcagtccgttccgctacggcttcacattgctcccgctcaatggcggccgcatcgcctcgatggcgctggcacgccagcaattcggcaccggtttcttctccatggatttgcacagcgaggcagacaaatga

SEQ ID NO: 120045 - DNA, 270 bp, Enterobacter cloacae
atgatggatatgagcggtcacgatcaggccgcaatgtcccatgaaatgatgcaaaacggcaattctgctgcccatcaggacatggctgaaatgcataaaaaaatgatgaaatccaaacctgagaacacccaagaaactgctaagccattttccgaaatgaacgagcatgagaaagccgctgttgtgcatgagaaggcgaataatggtctatcttccgttattcatcagcagcaggctgaaaagcatcgcagccagatcacccagaattaa

SEQ ID NO: 120046 - DNA, 357 bp, Enterobacter cloacae
gtggagaaaagtgccactctgtcgaaaaaatcccggttaggcgaggcgttcgcttatgcactgaaccagtgggatgccctgtgttactactgcgatgatggtctggcagagccggataataacgctgctgagcgcgcgctacgagcggtctgtctgggcaagaaaaactacatcttcttcggcagtgatcatggtggtgaacgtggtgccctgctgtatggtctgatcggaacgtgcaggctgaacggtatcgatccagagggttaccttcgccatatcctgagcgtattgccggagtggcccatcaacaaagtggccgaactgctgccatggaacgtagatctcaccaataaatag

SEQ ID NO: 120047 - DNA, 303 bp, Enterobacter cloacae; identical to SEQ ID NO: 96991

SEQ ID NO: 120048 - DNA, 408 bp, Enterobacter cloacae
atggggcgctggcttgctggcagactcatgaaagagctggggctggtcagttgccagcagccgactcaccggtataagcgtggcggtcatgagcacgttgctatcccgaatcatcttgagcgacagttcgccgtaacggaaccaaatcaggtgtggtgcggtgatgtgacctatatctggacgggtaagcgctgggcgtacctcgccgttgttctcgacctgttcgcaagaaaaccagtgggctgggccatgtcgttctcgccggacagcaggctcaccatgaaagcactggaaatggcatgggaaacccgtggtaagcccgtcggggtgatgttccacagcgatagtaataatgccgatgtcagtctttaccaccacttagtttgccgtttaaccagattggtgtga

SEQ ID NO: 120049 - DNA, 1077 bp, Enterobacter cloacae; identical to SEQ ID NO: 97051

SEQ ID NO: 120050 - DNA, 3048 bp, Enterobacter cloacae
gtgaataactctacatcacattctttagcggttaagacaccgctttccagactttacctcgctctattttccgcgccgctgttactttttttacctgccgatgtcgcgcgtgcagccgatgccttttttgatggcgagtcgcgtattaccgaaacgctgggttacaccggagatgtttatgttggacgtaaccaacgcggaaacctgctgatcgataatggcaaaatcaccgcctataacatcaatatcggtcggctgttcgacggcaaaatttatgaaagcgtggtcacggtccgtgggccagacgctgagcttaacgcggtgaacgatcggtacgtccttcgcggcgacctgaatcttggcctcggcaccctgcgagtcgaagagggcgcgctggcgagcgcaaaggagatcgttgtcggcaccacccgcggctacgacagccacctaatcgccacgggtgccggctctcgtgtgaccagtaattttctcagtgtaggcaccgatctgggcgcacgctccacgcttgcgattgaagacggcgcgtcgctcagcaccgcttacgatgcgcgcatcggcaacggtaccgggccgggtgaaaccgacacgctgagcccgaaagccaccgtcacggggagcgggtcacagtggaacgttggccgtacgttgacgctatatggcgacctggatgtggtgaacggcggaacggttaacgttggcggcgtgcaggtggcgggcgtctccggcgcagggaaaactgccgaactggttattgcaggcaaggactcgcgctttaccagcggcagcagcgtgagcgtgggcgattacggcaatggcgtgctgtctgtgattgacggcggttcattttccgctggcagcaatgcgctgatcgtggggacatcgggttccggctcgaaccggggtgcgctcatcatcggcagccgcggcaatatggacaccggcacgggtttaactgagccaacgcttggcacggcgggcggcgcaggtaccctcgatgcgaagacggcaatcagccttcgtggcggactgttcggcagctatgtctacttcaaccataccgacggaaattacctcttcagcaacacgatgagcggtgaaggtgatgtgatcaacacctccgggcagacgacgctgaacggcgatctttccgcactcaaggcgaacgtaaccgcgcggggcggtaaagtcatcattgccagcaatattaatacccagccagaagacgatatctttgacgtccagacccttagcgcggagaacggcggcacgttgatcctcaacgcgacggcgggttcagacgtcagcaacggggtgggttatagcagcgccgcgtcaatcaagtccggcggcacgctgggcggcaacgggacgctgggccagaccgagatcctgtccggcggacatatctcgcccggcgacggcaatatcggtacgttgacgctgaaacgctatctgaactttatcggcgaatccttctatgacgtggatatcgcaggagatggccgcagcgaccagctactggtatcgggtaaaaccaccatcagcaatcaggctaaggtacaggtcaccgcgctggatccgcaaaccagctataaaacgggccaaagctaccgcattttgacctccgacgggggaatcgacggtgagttcgccggagcgatctccaaatccgcattcctcgacgtggcgcttaagcaaagcaccaacgccgtcgatctgaccatcgcgcagaaagaaaccggtggcgagaatcctggaggagaaaaccccggaggcgaaaatcctggtggtgagaatcctggcggtgaaaaccccggaggcgaaaatcctggcggtgaaaaccccggaggtgaaaacccgggcggtgagaatcctggcggtgaaaacccgggaagcggcaagccgggcattttccagaccgtggcccaaagcagcaaccagtggaataccgctggcgcgctctccacgctgacgcaaagcggcccgtcgctggcgctgtataactcgctgcttctgctaagcgcaccggaagcgcgcgaggcgttcaaccagctttctggtgaagtttatccgtcaatgcagtccaacctgatcgctggcagcacgcaggtgtttaacgtgttaaaccagcggatgcagcgcgcgtttgataacgacagcctgccgataccaccgttagccatgtcgctggtgcagcagccggagccgcaaaacaatggcgtctggggccagaccttcagcgcctggagccgaaacagcggcgacggtaacgtgggcaagctggacggcaacaccaccggcttcctgctgggggcagatcgcaaactggcggaccataacgtgcgtgtcggcggctacttcggctacagccggggtgattatgacgtcgacagccgtcgctcctcaacggataccgacaactatcaccttggtctgtatgcggcgggtcaacaggatgcgttctcccttcgcggcgcgctgggttacacctggcacaagatcgaaggcgagcgcaatgttgatttcagcggcttctcggatcggctgaagtcagattacgacgcgaactccctgctggcgttcaccgaagcgggctaccgtttcggccagccagacaggaatattgagccgttcgtcaatttatcgtacatccggctgcataccgacagcttcagggaagacggcggtgccgctgcgctgagcgtccgtaacgaaacgatgaacaccttctatacgacactcgggttgcgcggtgtgaccgagttgccgaagcacgttaacctctacggttcgttgggctggcagcacgcctatggcgataagaatacctcttcgcgcatggcgtttgcgggcagcgacgcgttcattactcagggacaggccgtggatgaggatgtgatggtcggtgatatcggcgtgagcgtacagctgtcgcgtgctgcgacgctggatgtgggttaccagggacaatatggtgcggatacccgcgtcaactctgttaacgccaatctgcgctggtcgttctga

SEQ ID NO: 120051 - DNA, 2139 bp, Enterobacter cloacae
atgaaaaccatgaaaattgccgtcagccgtgagctggtatccaaagtttctacgcatcgcgaaaaagttatgctggataacactgatttcaccgatgtggcggcagtcgtcattacggttgttgaaagctacagcggcattctcgcattgctgaagcgtacgggctttcagttaccggtatttttgttctcaacagagccaggagaggtgccagagggtgtcacggcgatcatctcgggtaaagcacaggaattgctggaactggaatctgccgcctgccggtatgaagagaacctgctgccacccttttttgacaccctgagccagtatgtggcgatgggaaacagcacctttgcctgtccgggtcaccagcacggtgcctttttcaaaaaacacccggcggggcggcagttctatgatttcttcggtgagaacgtttttcgcgccgacatgtgcaacgccgacgttaagctgggcgatctgctgatccacgaaggctccgccaagcacgcgcaaaagttcgcggcgaaagtattcaacgcggacaaaacctactttgtgctgaacggcacgtcggcggccaacaaggtggtgaccaacgcgctgctgacccgcggcgacctggtactgttcgaccgcaacaaccacaagtccaaccatcatggggcgctgatccaggccggggcaacgcctgtctatcttgaggcagcccgtaatccgtttggttttatcggcgggattgatgagcactgctttgatgaggcctggctgcgggaactgatccgtgacgtcgcgccgcagaaagccgccgaggcgcgcccgttccgtctggcgatcattcagctcggcacctacgatggcacgatctacaacgcccgtcaggtgatcgacaagatcggtcacctttgcgactacatcctctttgactccgcctgggtcggctacgagcagtttatcccgatgatggcggaaacgtctccgcttctgctggaactgaacgagaacgatccgggaattttcgtgacccagtcggtgcacaagcagcaggccgggttctcgcaaacgtcgcagatccataaaaaggataaccatattcgcggtcagtcgcgcttctgcccgcacaagcggctgaacaacgcgttcatgctgcatgcctccaccagcccgttttacccgctgtttgctgcgctggacgtgaacgccaagatccacgagggcgagagcggacgcaggctgtgggcggagtgcgtcgagctgggcattgaagcgcgcaaggccatcatcgccaactgtcatatgatcaaaccgtttatcccaccggtggtggcggggcggccatggcaggatcaccccacgcaggccatcgccagcgagcgtcgcttctttagttttgaaccgggtgcaaaatggcacggttttgaaggctatgcccacgaacagtatttcgtcgatccgtgcaagctgctgctgaccacgccgggcattgatgctgaaacaggtcactataccgatttcggcattccggcgaccattctcgcccactacctgcgcgaaaacggcattgtgccggagaagtgcgatctcaactccatcctgttcctgctgacgccagccgagagcgcggagaagctgatgcagctggtggcgatgctggggcagtttgaacagcatattgaagacgacacaccgctcgcggatgtgcttccgactatctatcagaaatacccggtgcgttaccgcgactacacgatccgtcagctgtgccaggagatgcacgatctctacgtcagctttaacgtgaaggatttacagaaggcgatgttccgtcaggagagcctgccggccgtggtgatgaacccgcaggatgccaaccaggagtatattcgcgggaacgtcgaactggtgcgtattcgtgacgccgaaggacgcattgccgccgaaggtgcgctgccatacccgccgggcgtgctgtgtgtggtgcccggggaagtctggggtggagcagtacagcgctatttcctggcgctggaagagggcattaatatgctgccgggtttctcgccagagttgcagggcgtttacagcgagaaagatgcggacgggattaagcggctgtatggatacgtattgaatgtctga

SEQ ID NO: 120052 - DNA, 693 bp, Enterobacter cloacae; identical to SEQ ID NO: 115900

SEQ ID NO: 120053 - DNA, 1638 bp, Enterobacter cloacae
atgaaagtatcgtttcagatcaagctgtttatttcgctggtcgcctttttctcagtgctgttcgcattactgggcggatattattatgtcgatgtcggcaggcagctttatcaggaaatgagcgcgcgcgcaaaaatacaggccgaagaaattgcgcttattcctaccctgcgaaaagaagtcgaacaaaaggatatcctgggtatccatgactttatgcagaaaatagccgcccgcagcgacgccagttttattgtgattggtgacaataaggggctgcatcttttccactccgtgtttgccgaccgggtaggcaaaacgctggttggcggagataacgacgaggtattacacggcaaaagcaccatcaccatccgcaagggcgggttaggcatttcgctgcgcagcaaagcgcccatttttaatgatgccgggcaggtggtggggattgtttcggtaggctatctcacgagctatctggacaccatcaccgtcaacaaggtggttaatatcctgattgccgccgtgctgctgcttatcgccctgtttattttctcctggttcttcacccgcagcatcaagaagcagatattctctctggagccgcgcgaaatcggcctgctggtgcgccagcaaaaggcgatgatggaatccatttatgaaggggtgattgccatcgacgacgatctccgcattgaggtgatcaaccaggcggcgcgtaaattattaggcttacgccagcccgcccgcgaactgcggggtcagctcatcagccaggtgatcgcgcccgtcccgttcttcaacgcgcaaaccatgcttgcgaaagacacccacgatgagatctgtcgctttaacgatctcacagttattgccagccgggtgcggatcatgctggaagatgcgttgcagggctgggtgatcacctttcgcgatcgcaacgagatcgactcgctcagcgcccagctcagccaggtgaagcgctacgttgataacctgcgcatcatgcgccatgaacagctgaaccgcatgactacgctgtccggcctgctgcatatgggccgttatgacgaagcgattcgctacatacaggcgcagtcggaacacgctcaggagctgctggactttatctcgtcccgctttagctctccgacgctgtgtggtttgctgcttggaaaggccgcccgcgcgcgtgaaaaaggcgttgagctgagtttcgacccggcctgccgggtggataaaccgttcctgccgctgctcgaatcggaacttatctcgatcatcgggaacttgctggataacgccattgaagcgacccagcgtgcaccgctcccgcatgccccggtggacgtgctgataaagctgaacgagcaggaactgattattgaagtcgccgaccagggcgtcggcatcacaccggagatccgcgaccggatctttgagcgcggcatcaccaccaaaacgcgcggcgatcatggtattggcctgtatctgattgaaagctatgtcacacaggctggcggtgcaattgaagttgccgataacaccccacgcggtgccattttctcactgtttattcccgccacgggaacggcccggcaccccgtacaggaactggaagataccgactatgcaacatga

SEQ ID NO: 120054 - DNA, 363 bp, Enterobacter cloacae
atggaaattactcgttcttatgcaaaacagctcagacgcgagctgacacaggaagaaaggcggctttggtatttactgcgcagccgccgtttcgaaaattataaatttcgccgacagcacccggtaggtcactacattctggatttcgcctgttgcgcggctcggctggccgttgagctagatggcggacaacatgatgaaaagctggaatacgatcgacaaaggacattgtggttaaaccataagggctggcacgttattcgattctggaacaacgaactctggaataacgaagaggcggtgttagaaaggatccttgaaacgctgcaagcgctgcaaccctcaccccggccctctccctga

SEQ ID NO: 120055 - DNA, 1416 bp, Enterobacter cloacae
atgacatctgtaaatgactctacccttatgcccgctgcgctgcgcgatacccgacgcatgaaccagtttgtttctgttgcggccgccgtagccggtttactgtttggtctggatatcggcgttatcgctggcgcactgccctttattaccgaccactttacgttaagcaaccgcctgcaagagtgggtggtgagcagcatgatgctgggtgcggccatcggcgcactgtttaacggctggctgtcgttccgtctcgggcgcaaatacagcctgatggttggggcgatcctgtttgttgccggttccattggctcggcgtttgccatcaacgttgaggtgctgctgctctcccgcgtgctgctgggcgtggcggtgggtatcgcgtcctacaccgcgccgctttacctctccgaaatggcgagcgaaaacgtgcgcgggaagatgatcagcatgtaccagctgatggtgacgctcggtatcgtgctggcgttcctgtcggatacatacttcagctacagcggcaactggcgggcaatgcttggcgtgctggcgctgcctgcggtgctgctgattgtgttagtcattttcctgccgaacagcccgcgctggctggcgcaaaaagggcgtcacgtggaggcggaagaggtgctgcgcatgctgcgcgacacgtctgaaaaagcgcgtgaagagctgaacgaaatccgcgagagcctgaagctgaagcagggcggctggtcgctgtttaaggcaaaccgcaacgtgcgccgcgcggtgttcctcggcatgctgttacaggcgatgcagcagttcacggggatgaacatcatcatgtattacgccccacgcatctttaaaatggccggttttaccaccaccgaacagcagatgatcgccacgctggtggtagggctgacctttatgttcgccacctttatcgcggtgttcaccgttgataaggccggacgtaaaccggccctgaaaattggctttagcgtgatggcgctcggcaccttaatactcggctactgcctgatgcagttcgataacggcacggcgtcaagcggcctctcctggctctccgtcggcatgaccatgatgtgcatcgccggttacgcgatgagcgccgcgccggtggtgtggatcctgtgctctgaaattcagccgctgaaatgccgtgactttggtatcacctgttccaccaccaccaactgggtgtcgaacatgatcattggcgcgaccttcctgacgctgctggatgcgattggcgcggcaggcaccttctggctctatacggtgctgaacgtggcatttatcggcgtgaccttctggctgattccggaaaccaaaggcgtgaccctggagcatattgaacgcaagctgatgagaggggagaaactacgtaatatcggcgtgtaa

SEQ ID NO: 120056 - DNA, 1251 bp, Enterobacter cloacae
atggctctcaccgatatcaaagttaggactaccaagccctccgacaaacccttcaaactcaccgatgggcagggtatgcacctgctaatcaatcccaatggttcaaaatactggcgactccaataccgtttcgatggcaaacagaaagttttagcattgggtgtttatccaatggtctctcttggtgaagctcgcaggaagcgagatgaagccaaaaagttggtatctgatggtatcgatccttccgagaagaaaaaagcagacaaaatcgagcagagcgaagccctgacattcgaagctgttgcaagagattggcatactgcctgtaaaaggaaatggtcagaatctcatagtgaaagggttttaaagagccttgaagataaccttttctcttccataggaaagagaaaaatagccgagcttaaaaccaaagatcttctcgttccagtcaaaattgttgagacttctggacgactagaagtagctgctcgtttgcaacaacgaaccacagcaataatgcgatatgctgtccagaacgggctgatagattacaaccctgcccaggagatggcaggagctattgctgtagctaaaagagtccacaggccagccttgccattcgaacgattctcagaacttttagaacgaattgatagtttcaagggtagaaaactcacgaagttagccgtaaagctgacattgctcattttcattcgttccagtgaactcagatttgcaagatggtcggaaatcgatttcgagaatgctatgtggactattcccgctgaacgagaaccattaccaggagtgaaacattcgcaccgtggttcgaaaatgcgaactccacaccttgttcctttgagttgtcaggcattggctgtgttgacggaaattaaagagatcagcggtgatcatgaactcgtgttcattggcgaccataatttcagaaagcctatgagtgaaaatacggtaaacaaggctttgaggtctatgggctatgacacaaccgtggaggtctgtggacatggattcagggctatggcttgtagtgccttgattgaatccggcttgtggtcgaaagatgctgttgaacggcaaatgagccatcaggagcggaactcagttcgtgctgcctacatacataaagcagagcaccttgatgagagaaagcttatgttgcagtggtgggccgattaccttgacctccttagaatacgacaagtttcaccatttgattttaaaaagacttaa

SEQ ID NO: 120057 - DNA, 810 bp, Enterobacter cloacae
atgaaagtagtaagcccttatgaagaattaaaaagctggtttagtctcgaaaactatgagcagttaaaatcacttacaatcaaagaactgcatacagagcttgcctttagagaagcgattttcgacagtgtaaattttggttgggaagatgataatcaaaatttaaggtctatccttgaaggtaatcctattttaagcatacaagataataatcatggtcattttggcaagggccaaagacatgttgcgcaggttagctttggtgatataaaaaaattagagaacaagttaataatgtttagcatggatttttttgaagaaaatggcgatttcaaaaaagagttgaaaaagaaaccaataacaaaaactatgagagacttttttcttaaccaaaatagcagcaaaatatatgtttcatttgatttaggaatgtccagcgatgaagaaattataacagccttacaaacgatgctacccattctcaggaaagaatatgaaattgagccagtaaaaacagaaaaaattggactggcaaagataagaaaacttgtcgattacaatattatcccaatgatggatctattgatttgggcaaaatttaaaaaagtaaaaatctcaaatatggtcttgtctcgtgtcttgtatcccgactttacaagtgagatcagaggagaagatcacattaaagatacagacaggcctgttgcagagaagtcattgaatggagaaacaacccgtagtctcgaatactttatcagcaaaaacagccatctcctcaacataccgatttctgaactcggctctttctag

SEQ ID NO: 120058 - DNA, 207 bp, Enterobacter cloacae
atgactacaactaatcaaagcttaattcgtttaccagaagtcttgaaacgaactggtttcggcaaagcctggatctatcgtctgatcaaagatggtaagtttcctgcccctgtcaaaattggaactcgtgccgtagctttcgtcgaaagtgagatagatgcctggattcagtctgttatcgaaacaagtcgaaataatgttgcttaa

SEQ ID NO: 120059 - DNA, 300 bp, Enterobacter cloacae
atgaatatcgaagaatttgtgaatgaagataaccatatgtgcaatttatgcggagatcttttttacaagatctttgacccagaagtgatttacgacttacccaataacgagtttaataaacaaatcatttactggctcagtcagtaccttgtaggaaatttgagagaacccttagactcgatctctgagcttaatgcttccaaacagatatatgtttacgagacttggttctcgctaattaaatgtcctgatgaaacgaaactcctagcgaagcagataattttatatctattggactaa

SEQ ID NO: 120060 - DNA, 1203 bp, Enterobacter cloacae
atgcgtagtatttgtgtggattcttttatgttcgaaaatggtgagagatattgtcatattgtaaataaaaatactggtgaaccattgtattatcctaacttgtatataacaacacaggtcaggaatcggtcagagtctatatcaacaatgaaggttattgccggtagcatttcattgttatatcgattctttatgaggaaagagatcaatattgatgaaagaattcagaaaaatatatttctggctcctcatgaaattgaagatttgattgaattcacttcattcaatttccgagatggcgaggatgataactttaggagttcaaatgtcaaaaaaccaactaagtactttcggattacaaccatagctaactatctggaatggctgtgcaaaatacatctttctcatacaggacagaaggatactctcaaatatattttagatttcattaacaacataaaaagaaagaaaccgagaaacaatgataaatataatatggatatagaaaaaagcttagataaagaacaattggattctttgtttagcactcttgcaccgggtagtaaattaaatcctttttcagaaaaagtgcaaaaaagaaacaatctaatattcttgctattatactgctttggcctgagagcaggtgaacttttgaatctgcgaattggtgatatagattttgcagaatcgacaattgcaataagaagaagagcaaatgataaaacagatccgcgagtgtatcagccattagttaaaacttgtgagaggaaattaattgctgatacaaagctcatgtttgaaattttagattatattatgaatgatcgaagaaagataaaaaattctaacaaacatgacttcctgtttattacttataaggaaggaaaaactcaagggcaacctatttcattttcttcatatcacaaagtggtgagtgttgttcgtcaatcctcctcacttctagggggattgacaggccacaaactcagacatacatggaattatgagttttcgaaagcaatagacaagaatcaggacatatccgatgaaaaagagcaacaaatccgttcttatctcatgggatggcgaccgggttcagaaacttcaataatttataatcgcaggcatatttttgagctatcgaaaaaaactgcacttgagcaacaagagcaactattcaaaggagaatttgatgaataa

SEQ ID NO: 120061 - DNA, 1305 bp, Enterobacter cloacae
atgaataatttaattaaatacaactcggataaaatgtctttgcatgaacataaaatcgtcagttcgattgaaaataacggaatcaatcttacaaacttaatatttgctatgaacgaaaatttggtttgtgggtttgtatatacagtacaatattattttaatagcaacagctatttgtatgtgaaaaatattgttagaaatatggagagtcttatccgtaaactatctcctactcatattgatgataaggttctaattgaatatcaaaataagaaattatcaaaagccccagcatcatttcgcgttttacgaccatttttgattaaatggtttgagttaggatatccgggaatagatgaaagtgctgtagaactgttaaagcatttggacctaaaaataaaaaaatctggtcagtctgtgcttcaagatgatccaacagagggaccattaaataaagaagaacatacttctttgattaaggctatgaatcatgcatatagaaaaggtgaactgtcactgccacattatgcaatatcactattgatcagtcttacaggtagaagacctcagcagttagttatgttgaaatataaagaccttcttcaaaagaacttagataatggcaaagtagaatatgtaatttcagtgccacgagtaaaacaacggggtaaagaactacgatatcgagaacttgcaataatatcagaggttgcatcaattgttcaattgcaagctaatcaatcagtgaaactcgttgagcaagctcttggaaaaactcttgatgattattctaaacgagaagttcctattttcttaaatgaggaaaaactctcagatttatccataacaggttcaattcttctggaatataataaattatatgcgaagcctataattgctaatgtagcattgaaaggtattgttaataatgggaatataatatccaaccgtaccggttcgatactaaatattacgcctcgtaggcttcgttatacaatagcaactatgctggctaagaatgggcataatgttaatactatagctgagttattggatcattcctctacttcaagtgcgggtatttatattaaaaatcatgctgacagtgttgaaaggattgattccgctgtttcagaacaattgtcatttgtcgctgatatttttatgaacggaatcaaatcgaaaaagagttgtcatttcaaatttttttcttcaagtagatgccagagtcagaattcaggattcccttgcaatcaatgtatattttttattccgattgatcgcagtgaggtgaatcaactatga

SEQ ID NO: 120062 - DNA, 519 bp, Enterobacter cloacae
atggcggtgaatctttctacattgcagttcgaacagccgtcgctggttaaaacagttctcgattgtctgacgcgccatagcgtaccgcccggcatgttgatcctggaggtgaccgaaaccacggcaatgaacaatccggacgaaagcgtgcgtgtcctgacagcgctgacggatgcgggagtaaaagcctcgatagacgattttggcaccggttactcaagccttctgtatcttaagcgactccccgcctgcgagttgaaaatcgatcgtgcttttgtgaaagagttaagtggtgagagcgaagatgcgacgattgtctcggcgattgtcgccctggcaaaaacgctgaatctgaaggtcgtggcggaaggggtcgaaaccgcagcgcagcaaacctttctgacagaactgggatgcaatacgctacagggttacctgctgggcaaaccgattaccgcgcaagctattatggaacagtgccagcacggggagatgtcgctaccccggacgcggtcatga

SEQ ID NO: 120063 - DNA, 444 bp, Enterobacter cloacae
atgcgtgagatgattcgtgacaggttaatactttccgaaaatgacgaccctttgttaatgcttcgtgaacaatttattgtcgcactacaatatattgcgagcgagccgcggcaatatgcgcttttacaaattttgtatcataagtgtgaatttcatgacgatgtgatttcagaatgtgaaatacgaaagcggatcggtttaaacgatgattatcttcgcaagacgctaaagcgatgcattgctcgtaacgttatctcttcgcaaaccaatattgaactggcgctgattgttttccacgccttttttagcggtgtcattaaaaactggttaatggatagcaacaattttaatctgtacaaacaagcaccggcgctggtggataatattctggcgacactaaatatcacccgagtggcgccagtggtttacgatacagcctcatga

SEQ ID NO: 120064 - DNA, 1680 bp, Enterobacter cloacae
atgagtaatgccatcaatgagatagataacaccgatctggtgttcatcttcggctataacccggcggattctcaccctatcgtcgcgaatcacgttattcgcgccaaacagaacggggcgaaaatcatcgtctgcgatccgcgtaaaattgaaaccgcgcgcattgcggatatgcacatcgcactgaaaaacggctcgaacatcgcgctgttgaatgcgatggggcacgtcattattgaggagaacctctacgaccaggcgtttgtcgcgagccgtacggaagggtttgaagagtatcgcaagattgtcgaaggctatacgccggagtcagtagaggcgataaccggcgtcagcgcgcaggagatccgccaggcggcgcggatgtacgccggagcgaaaaccgccgccatcctgtggggcatgggcgtgacccagttctaccagggtgtggaaaccgtgcgctcgctcaccagcctcgccatgctgaccggcaatctgggtaaagcgcatgtgggcgtgaacccggtgcgtggtcagaataacgtgcagggtgcgtgtgatatgggcgcgctgccggacacctatccgggctaccagtacgtgaagttcccggaaaaccgcgagaagtttgcgaaggcctggggcgtggaaagtctgccggcacacaccggataccgcatcagcgagctgccgcaccgcgcggctcacggtgaagtacgtgcggcctacatcatgggtgaagatccgctccagaccgacgccgaactgtccgcggtgcgcaaaggctttgaggatctggagctggtgattgttcaggatatctttatgaccaaaaccgcggcagcggcggatgtgattctgccgtcgacctcctggggcgagcatgaaggtgtctatacggcagcagaccgcggcttccagcgcttcttcaaggccgtcgagccgaagtgggatctgaaaacggactggcagatcatcagcgaaatcgccacccgcatgggctacccgatgcactacaacaacacccaggagatctgggacgagttgcggcatctgtgtccggacttttatggggcaacctatgaaaaaatgggtgagctgggctacatccagtggccgtgccgggatgagtcagaatccgatcaggggacgtcatacctctttaaagagaagttcgacaccccgaacgggctggcgcagttcttcacctgcgactgggtcgcgccgatcgataagctcaccgacgagtatccgatggtgctctccaccgtgcgtgaagtgggccactactcctgccgttccatgaccggcaactgcgccgcgctggcggcgctggcggatgaaccgggctacgcgcagatcaacaccgccgacgccgaacggctcggtattgaagatgaagcgctggtgtgggtgaactcgcgtaaaggccgcatcattacccgcgcgcaggtcagcgaccgtccgaacaaaggcgcggtctatatgacctaccagtggtggattggcgcctgtaacgagctggtgacggagaacttaagcccgataaccaaaacgccggagtataaatactgcgccgtaaacgtggagccaatagcggatcaacacgctgcggaacagtatgtgatcgacgaatataacaagctgaaagcccgcctgcgcgaaagcgcaatgggatga

SEQ ID NO: 120065 - DNA, 303 bp, Enterobacter cloacae
atgaaggagatcgttcagacagaatccttccgacgctgggagcaaaatttaaaggacaggcgggcaaagacgattatcgcctcccgcctctttaggctggcaaatggcttagcgggcgacattagacctgtgggagaaggtatcagtgaactgaggatccactttggcccgggctacaggatctattttaaggaccagggcaattgcatcatcgtgctgttatgtggtggtgacaaaagcagccaggccagagacatacttatggcaaaaatgctgagcaatgtatcccaatggcaggagtga

SEQ ID NO: 120066 - DNA, 288 bp, Enterobacter cloacae
atgcataaattaacaccctacgatccagccaacgcactgctggatgacgaggaaatcgctgtgtttatggctgatgcattagagacgggtgactcagcgtacattgctaaagcgctgggcgtcatcgcccgagcgaaagggatgtcgaccatttcccagcaaacgggcctgtcacgagaacaactgtatcgatcattcagtgataaggggaacccaacgctcaaaaccacgctggcggtcatgaaagcattgggccttgggttaacaatcaaaccctctggggattaa

SEQ ID NO: 120067 - DNA, 1752 bp, Enterobacter cloacae
atgtcgcgtggtctggaattactgattgcccaaactattttgcagggctttgatgcccagtatggccgctttctggaagtcacctccggcgcgcaacagcgttttgagcacgccgactggcatgcggttcagcaggccatgaagcagcgtatccatctttatgatcaccacgtaggtctggtggtggagcaactgcgctgtatcaccgacggtaaaagcccggatgcggaatttttactgcgcgtgaaagagcactacacccatctgttacccgactacccgcgcttcgagattgcggagagctttttcaactccgtctattgccggttatttgaccaccgctcattatctcctgagcggttatttatcttcagctcccagccggagcgccgctttcgtaccattccgcgtccgctggcgaaagatttctttcccgatcgcggttgggaaaagctcctgcaccgcgtcttaacggatttgccgctgcgcctgccttgggagaataaaccccgggatatcggctatatccacgcatatctcagtgaaaccttcggtgaggaggtactcagccgcagccatttgcaggttgccaacgagcttttctaccggaataaggccgcctggctggtgggcaaactggttacgccgacagctatcgtgccgtttctgctacccattcaccgtaccgacgacggcgaactgtttgtcgatacctgcctgactaccagcgctgaggccagcatcgtatttggcttcgcccgttcctatttcatggtctatgccccactgcctgccgccctggtggagtggctgcgcgagatcctgccgggcaaaaccaccgccgagctgtatatggcgattggctgtcagaagcatgccaaaacggaaagttatcgggaatacctgcgttatgtcaccacggctgatgagcagtttatcgaagcgccggggatccgcggcatggtgatgctggttttcacactgccgggcttcgaccgcgtgtttaaggtgattaaggataaatttgccccgcagaaagagatgaccgccgctcacgtccgcgcctgctatcagctggttaaagagcacgatcgcgtcgggcgaatggcggatacccaggagtttgaaaactttgtgctggataagcagcagatcgatccgtcgctgatgtcgctgctaatgcaggaagcgccgacgaaaattaccgatcttggcgataagattgcgattagccatctctatatcgaacgccggatggtgccgctaaatatctggctggagcaatccgaaggccaggctttacgagacgccattgaagagtacggcaatgcgattcgccagctcgccgccgccaatattttccccggcgacatgctgtttaaaaacttcggcgtcacccgtcacgggcgggtggtgttctacgattacgatgaaatttgctacatgaccgaggtgaacttccgcgatatcccgccgccgcgctacccggaagatgaactgtccagcgagccgtggtacagcgtatcgccgggcgatgtgtttccggaggagtttcgccactggctttgtgccgacccgcgcatcgggccgctattcgaagagatgcatgccgatctgttccgcgccagctactggcgcgggctgcaaacgcggatcaaaaatgggcacgtggaagatgtctatgcttaccgccgcaagcagcggttttgcatccgcttttctccctctccctgtgggagagggccggggtga

SEQ ID NO: 120068 - DNA, 843 bp, Enterobacter cloacae
gtgttcggcagctacattccgagctttaccattccgcacatcggggagatgggcaccctgtggctggcactggcgttttgtctggcggggggagtcatcgccatggtatccctgcgcagcgtcaaaaccccaacgcacatgcagactctctccacccgggaaaaattcgccgagctgggccgtgcagcgacgctgctctacaccaaccgcagtattctgctctccagcatggtgcgtatcatcaacaccctctccctgttcgggtttgccgtcatcatgccgatgatgtttgttgacgaactgggcttcaccacctccgagtggcttcaggtctgggcggtattcttcttcaccaccatcttctcgaacgtcttctggggcgtggtggcggaaaaaatgggctggatgcgggtggtgcgctggtttggctgcatcgggatggcgctttcgagcctggcgttttactacattccgcagcacttcgggcataactttgccatggcgctggtcccggccatcgcgctggggatttttgtggcggccttcgtaccgatggcggcggtgttcccggcgctggagccgcggcacaagggggcggcgatttcggtgtataacctttcagccggtctgtctaacttccttgcgccggcgattgccgtggtgctgctgccctggttcagcacgctcggcgtggtcatcgcctatacggtgctttatctgctggcttttgttctgtgtgcctttatccgcgtcacgcagccgggtttagaaaaagcaaatagcagcaagagaaggatggcgggtctgctgaatactcctcatcctgaaacgctgaaggagtaa

SEQ ID NO: 120069 - DNA, 366 bp, Enterobacter cloacae
atgcttgccggcatcacagaagctgatgagcactggccagagcgcatcgagcaggcgctgacgttccggacggaagccatatttacgtcccgctttacggcggccggcaacatagagagggtgacgggaaacatgcatgcgcaggctgacctgccccgtttctttgtcttttttcaccaggcgattgtaggcatgaccgagctgtccggagagctttttataatgctcaggacggaaccaggacgggttttcacatttggcttttgtggagtgttcaccgcgcttacggcgggtccgctttttgaccggctcagtaagaaaattatcctgtgtgccggcatcgacgtcctgccagaaacggattaa

SEQ ID NO: 120070 - DNA, 789 bp, Enterobacter cloacae
atgaaagtacacaaattagctgcattaatagttacaacatacataagctttattgcaacggcacacgcttcggccccgcagctggtcttcagcccggagcaggaggcccgtatcggggaaatcgcagcagactacctggtgtcccacccggagatactggtaacggtcagtcataagctgcaggaacagcaggaggcacgtaagcagaagatgtttgcactcagcgtgatggagaatcaggcgaaccttctgcatgatccggacacaccggtttacggtcctgataatgcaaaggtcgcggtgattgaattctttgattaccagtgcgtgttctgcagccgcttcgcgccggagctggagaaggtcatgaaagcgcagccggacgtccgctacctctttaaggagtggccaatttttggtggtcgctgggaagcctcacttcaggcagcgcagcaggggctgacggtctggcaaaagaaagggccgcaggcctatgtcacctatcacaatgccatctacgccaccggccataatgaaggcaagctgacggcggaggatattcacggggcagcgtcaaaggcggggctgaccactccagctcctggcgaccataccgcgtcccttgagaaaaatagtaacctggcagaggcgctgggactcaccggaacgccggggatcatcgtcatgcccgttagcggagccactcctgacaccatcacggtcttcccggaagccgttaccgctgaaaaactccaggctgcaatccggaaagccaccagggtgaaatga

SEQ ID NO: 120071 - DNA, 5415 bp, Enterobacter cloacae
atgatgtcagtcgccccagtagcgtcagccggcgaggctgcaggctactacagcaattccgataactactattttctgggcagccttcagagcctctggatgggggaaggtgcaaaagcgctgggccttgagggcaatgtccgtggcgatgatctcacggccgtcctcgagggccgcctgccggacggctcacggcttggcaaggaggttaacggacagcacgtccaccgtcccggccatgacctgaccttttccgcccccaaaagcgtgtccattctggcacttatcggcaacgataaagaaatggtggaagcacataaccacgcggtccgtgtggcggccggctatgtggagaagctcatctcggcccgcgacacgaaagacggcgtcacgtccatcgtacataccggcaagatggtggcagctgcttacacgcatgacacgtcacgtaatcttgacccgcagctgcacacccatctcctgattgccaacatgacggagtatgcgggcaaatggaaagccctggccacggactatatccataacgcgggctttatcgaaaccgtcatgaagcatcaggtcacgctcgggaaaatttatcgcagcgcgctgcgtgagcgggttgaagcgctcggccatgaagtggaagaagtaggcaagcatggcatgtgggagattaagggcgttccggaagacgtcagggacgaatattcctcacggggcagggaaattcagggtgccgtgggggctgaagccacgctgcgcagccgggatgtggccgccaaagacacccgcagggcgaaagtcgacccttcgaggatgcgcctgatggaacgctggctgggccagatgaaggagaagggatttgacctgaaggcgtatcaggagagcgtggtgccgcgtgatgcaggtcttcgtgagaccgcgcctcagccggagcgagatcaccaggctaagccggttcctgccgggcctgagctggcttctctgcagacgtcgtccacggcagaaaagagcgtcgatacacctgctcaacccgcagaacgggagagtcagtcccgtcaggctgtaacacagccggctgacacactgcgtcagacggtacagaccggccccgaaaagacgccggcgaccaggagcgttcctgcagcgcagctggacactgaaataccccgcccggaactgactgaggctgtccggctggccatctcgcagctcagcgacagtaaaacgcgcttcacctttggcgagctgatgatgaccaccgctgagctgagtgaacagctgccggagattcaggaaattcgtgtggccatcgatgcggcgctgaaggacggcatgattgtaccgctggacagtgagaaaggggtctttacctcccgtattcacctgcttgatgaactctcgatccaggcgctgagtcaggaacatctcaaatccacaaaagtcgtcagtttcacccgcacggcgcagtacgcgccggcggcgctggaagtggtggagaaagacgccctggttctgatgaatgccccgtcaggcgtggcgggtatccgtgacctgaccgcgcagctggccggtattgccggcgcgaacggtcgtgacgtgcaggtgctggccagctctgccgagcgcgccatttcgctggcgaaatccgacgatttgcgggaacggatcatcagccggcagcatgttctgagcggtgatttccacctgaaaccccagagcacgctgattatcgaaggggcagagcgtctggggttaaaggagacgctggttctgctgggcgaagcgcgcgcgcaggatgcacagctggtctttctcgacagtgccggacgtcaggcgaacggtaacgccatgtccgtgctggagtccgcgggggttgcccgctcccgccgcacggagccggcgcccgggcttgaggccgaagtggtcagtattccgaacaaacgcgaccgttacgaggcgctggccaaccggtttgcagagctgagcggaggaactgaaaacgtcaccgccgttgtggtcggcaggcgtgaacaggcacagctgacgggcttggtacgtgaggcgctgcagaacgcaggacagctggggcgcgacggcgtggagatagaggcccggcagccggtctggctcgacagcaaaacgcgccgcatgcccggttcataccgtcccgggatggtacttgaagatcgcacggacgcaaaagcgcgtaagtcgtatgtgattgaccgggtgcatgaggacacgcgagtcctctcgctcatcgacggggacggcgtgctgacccggatgaaaatcggcgatatcagcgctgactggcgtctcttcagccgcgaaaccctcagcgtggccaccggcgaaaaactgctggccgtggcgggggatcgtgagcacagcctgaaggcaaaagaccgtcttgaggtgaccgggataagtgaaaaggggattgaggtgaaacggggggaagagaccctgacgctgccaaaagaccagccgctctacctgtcgcatgcctacgtgaccgcgccgggcggccgggataacgacaccggtgtggtgctggccgcactgaacagccgcgacatatcgacccagaccatgaattcgctggcacagagtggccaccgggcggaagtgttcacagccgaagtacaggaccgggctgaagcccggctgcagcgcatgaagaccagtgcctctcccgtgcagctggtcagaaacctgagcggtcaccaggacatcagtcaggcagtggattcactgcatgacagcgtccggacggacgccgggctggccgtctggcgtgccatcaatgaccagcgcactgtggtattcagcgaactgaagctggcgacggaagcgcagaaatatcatcccgaccttgaagctatcgggaatgaaattggcgcgatgattaaaaatggcgagctgttgtccgtatccgcagggggagagccggtactggtttcccggtccacctgggagatggagaaagccattctgcgtgtggtggaggaagggaaaggcacacagcagccgttgctggaacaggtaccggaagctgtgctgaacggactcaccgatggccagaaaaaggcgaccaccctggtgctgggaaccacggatcagtttatcgggattcagggctatgccggcgtggggaaaaccacgcagctgaaggcggtgatatctgcactggagaccataccggcggacgttcgtccggtgatgacggggcttgccccgacgcaccaggcggtgaaagagatgagcgacgtcggtgtccgggcgcagaccatcaaatcttttatcgttgaacatgaccaggcgacggccgcaggcggtaagcccgactataaaggacaggtgtttcttatcgatgagtcctcaatggcaggcaaccaggatacggcggcactgttccaggccattgccagcggcggcggtcgcgcggtctcgatgggggatatcgaccagtttgaatcggtcgacgtgggcgcaccgtttaagctgatgcaggagcgcagcccgatggatgtggccatcatgaagcaaatcgtccgccagaaagacctgcagctgcgcggtgccgttcacgacatcattgataaccggatcgatgcggccctgcagcgcattgaaacccagccggctgaccgtgtggcgcgtagcgcttcagcctcgctcccggggagtgccattcaggaaacggagacgcctgttaacgacatcgtggctgactggacggaccggacgccggaggcgcggtcccgtaccctcattatcacccagctgaacgccgaccgtcgtgcggtaaatgccggcattcatgctgtgctggctgcccggggagaactgggggagaaggccattacggtgccggtgctcgataaaatcacccacacccgtcatgagttcaataaaatcgatgcctgggaagccgggatggtggttaaacgcggcgatcgttaccaggacgtgctggccgttgaccgcaacggcagtacggtcacggtacgcgatgaggaggggaagattggactgtattccccgaaggaactcatcaccggcgacgtgcagctgtttcgccgcagcgagagggaagtccgtgccggcgatctgctgaagttcacggcgacagacaaggagcagggacagatggccagccagcgctatacggtcgagtcggtcagcgaaacgggcaatattcgtctgaagggggaaaacggccgcattaccatcaatcctcaggcggtcagggcgcagcagcatattgactacggctgggccgtcaccgggtacggtgctcagggggccagtagcgactatgtcattgcgcttgagggcacggaaggcgggcgtaaggcacttgcctcccgtcgcgccttctacatctcggcctcgcgcgtgaaagagcacgtccagatttataccgacgggaaggcggactgggttaaggcggtaaaaacgccggagcgggatatcaaaacggcgcacgatgcgctggcgccagaaacgcagcgtaaacaggcgaaagccatctgggcaatgggacagccggtgaataaaacggccatgggccgcgcctgggtgcgccatcagggcatgcaggacgcgtcactgacggcaaaaatcatcccggccacccggcgctttcccgaaccggcgctggcgctgccggtgtatgacaacaacggccggagtgcgggcctggctctggtttccctggttgccagcccggaagggcggatgacacagggggagacccggatggtcatgacagaacgtgcccgtggtgcggtactgcagcgaagccagtcaggcaacacgattgtggccagtgacctggcggccgcgcttgatgcagtacgacatcacccgaaggacggtgtggtctggcagaccggcgatgagccaccatcagcacatctgctgaaagtcagcggaggtatcgttacggaggccgcatcagaacacaaactgatccgtgaccaggaggaaaccacacgacagacggaaaaagacatgcttaacaaagccgttaaagcggaaaaagaaaagagtgagactcaggagcgtattgttgtgccggtggaggacgcggtgcgtattacgcccgggatgcttgaggttgacgaccggaatgagccaacgattcctgacggaaaagtgctcattcaggttgccagctcggacagcgttagccacgatgagattggccgtcatatcagggcagaaaaggaaccattggccagcaaagtcgcttcggaacgtgcgggagtcagccgcattgtgaatgagctggccaataccgagcgggatattatccggcaacccgaaaatagcgagcacggccgcatgccggagcgagaagaacagaccctcacccgtaccattcagaaagaacgttaa

SEQ ID NO: 120072 - DNA, 2592 bp, Enterobacter cloacae
atgagcttcgcaggaaaaaacctcacccagggcgggcagatgaccgcctaccgctggcgcatgttcattcaggtgaacaactggataggattctggatcttcatcctgttcgccgtactgactaccgccatctttctctggcgaatccctcaggaagccctggataacggttccctgtggtggttcgccagtatcaacagcagctttattgaccttatgccggcatcgggaacgccaaaaatctacgacgttcactactggtatgcgccgaccgcgacggcaatggtgctgaaaatgactttgccgcagatttataccgacccgtacatgcaggcgatgggcgaccagtgcctgcgtgagctgcagtgggcagccggtgccagcgggctgttcagtatggtggtgtttatcgccgtgacctggtttatcgcgaatatcggcagaaaggaaagtgaagacgaatacatttccgggatgcagctgactgacaagcctgccgaagtgaataagctgctgcgcaaaaacggtgagatctctgacctgcgcgtgggtgatctgcatatggtcaggatggcggaggtactcaatttcctgatgcatggcactatcggggtggggaagtcgacgctgatacgctggttactcgactacatccgcaaacgcggtgaccgggccatcatttacgactccggctgtaccttcacagaaacccactataacccgtccaccgatatcatccttaacgcccacgacgagcgatgtgccaactggcagatgtggggtgagtgcgttgacgcggtcgattacgacaacctggccgccagcctcattccggtggaaggggaatccgatccgttctgggtatccagctcgcgaaccatttatgccgatctcgcaattcgtatgtcgacggacccggaacggagcattgagaagttcctcaaaaccttgttgtccctcagcatgaaaaatctgcgtgactatctggccaacacgccctcagccaacctggttgaggagaagatcgagaaaacggccatttccattcgctcggtggtaaccaactatgccaaagcccttcgctatctgcaggggctggatgacggcaccaggccgccgttcaccatccgggagtggatgacgcaggagcgctatgacagcagctggctgtttatttcaacccaggcccgtcaccgcaagagtgtacgcccgctgatctcgctgtgggtgtcgctggccacactgatgctgcagagcatgggggagaacagcgaccgccgcgtatggttcattatcgatgaagcacccagcctgcagcgcatacccgagctggccgagacacttgccgaggcgcgtaaatttggtggctgtttcgtgctgggcatgcagaacatggcgcagctggttcacgtctacggccgcgagctggccaaaagcatctttgacctgatgaacacccgtatgtacggacgttcgccgagcgccgagatggccaaagtggtggaagaggagctgggcaaccagcgtaagcgcaaaatccgtgagcagaacagctacggtctggaccaggtgcgtgacggtgtgtccctcggtaaggacgaggtcaataacccgattgtcgactacgagcagatcatgcgtctgccaaacctcaacttttatgttcgcctcccgggtgagtatccggtcgtccgtctgaagctgaaatatcgcgcgctgaagaaacggcaggcaggcctcattgagcgcaatatccgcgatgcgctcagtccggagcttgagagggttattcaggagaacgagcgcgcagcggcagctgccggtctgacgttcccgaccggtgaagaagtgctggagaagggaagcgaaatgtcagccgcagctgacggtacggctcatgttgcttctgccggtacgccggcatcatcgcccgtcgaaaaaaagacagcaacaccagagacagcgccgaagcctcctcagggcacagtgcctgaacggaaacaggttgctgtcatggagcctgttatctccggttctgcgacagtcgtaccggaagaggggggcggaaaacacaacacggtgacacctcctgtcattgcagagaaaaaagataacgttgtttctctccgttctgttggcgcaatgaaaaaaccgactgaagcaccgggcaaattaccggtctcccccggagtgaccggtcacccgggtaccgctgactctgtacaaacaatgcccgatgccctcaaggccctgcgaaaccgacatcatgtaccggaaccacctgtcgcctcacctctgagcatgctgcacagggcacgccagcggccggcctcttcggaaagcgatccgcagacagaggaaaacggcggtgagtccatgaacctcgacatgaaagtgacggcactgcctgacggcggcctgagtgtgacgacggcagggaagccagtgacaccgaaaaccccggatgaagcccacggtactcaccggcagctggcgcaggaagaagagaacattttacttcaccgtcacgcggacgacccgggttacgacgaaaacgaccattactattacgacagagagcctgaattatga

SEQ ID NO: 120073 - DNA, 315 bp, Enterobacter cloacae
atgatgcatcagataaatgaacgtgcagattactcagctgaattctggtcgcttatccatctggaaagcgagctgatggcagcaagggcctggatgaatgtatttggttcacttcctgaggggcagggtatgaccattgttgctttctgggctggctatgaatttaccctttatgatctggagccccgggagtggcattcaccggtttatagggatgtggcctcgtcagtccgttctgtggctgcatacattaataaacaggactgggaggacggatgtcagcaggccaggtatgaactgagtcagatggaataa

SEQ ID NO: 120074 - DNA, 732 bp, Enterobacter cloacae
atgaaattaaaacaattagccgttgtaggtctgatcggttcaactctcgctctgtctggttgtggtgccatgtccactgcggtgaagaaacgtaatctcgatgtcaaaacccagatgagtgaaaccatctggctggagccatcatcagagaagacagtttatttgcagatccgtaatacatctgacaaggacatgtcaggcctgcaggcacaaattacaaatgaactggccgcgaaaggctaccgcgtctccagctctccggacacagcctactactggattcaggcaaacgtgctgaaagccgaaaagatggatctgcgcgatgcgcagggcttcctgaaaaccggctatgaaggtggtgcaatgggcgctgctctgggggctggtatcacagcctacaactccagctctgccggtgcgacactgggtgtagggctggccaccgggctgattggtatggctgcagatgcaatggttgaagacgtcaactacacgatggtgaccgatctgcaaatctccgagcgcagcaaagcgaccgtcacgactgacaatatcgctgcactgaagcaggggacctcaggcgtcaagctacagaccagctcagaacagggcaaccgcgctaaataccagacccgtgtggtatccaatgccaacaaggtaaacctcaagttcgaagaggcgaaacctgtcctggaagctcagctggccaaatccatcgccggcatcatgtaa

SEQ ID NO: 120075 - DNA, 714 bp, Enterobacter cloacae
atgctaaaggctaatctatgcagaatttcgtacattcctgtatttagtatatatgctgctattccaatcattcatgatgtggtgcctaaccataacaggtattacagtgaggattggattgcattggcagggatgtacgtgttaggtacattgatatccttaccattgttctatcttcttaagaaagcggataagagtggcagtggcgtttcaatcgcctcgctatttcctcgcttgcttacttcaattctagcgcaagtaatatgcctctatttcctttgggaaaattcaatatatctatatctgtcgatgtccacagttatggttctttccgccgtgttatttggggcaggaaggaaggggttaaacctcttgaaggataaagatacaggcattatctatgaaatacgcgggagtaaagcgtatagactctcagatgaagaggccgttagatatcaaacaagtatgtctggcaagggaatagcattggctgagttttcatcaagccaatattcagggctagacacaagctcatctgttctacctatcaatttcggtccgagtcatacggatatcaatcaagggattgctataaatccttcgtcaggaatgccaatggttggcggtatctctggccttgatatacacggaaatagttggggaacaaacttcaacgaaccttcaaatacatatgaccctaaccggggatactga

SEQ ID NO: 120076 - DNA, 3282 bp, Enterobacter cloacae
atgcttgagatatacaccatttatggcgggggaatgtggaaaacggcgctggacgccgttgtcacccttgtcggtcagaataccttccacaccttaatgcgtattgccggtaccttcggggtgctggccgtattgctcactttcatcaaacaacgtaacccgatggtcttcgtccagtggctggcggtcttcatgatcctgacctccatccttctggtaccgaaacgttcagtgcaggtcattgacctgtccgatcccggtgcggtctgggtaaccgataacgtaccggttggcctggcggctatcgcgtcgctgacgaccagtatcgggtacaagatggcgtcagtttacgacatgctgatggccagacccgactcggtgacctacagcaaaaccgggatgctgtttggctcgcagattgtggcagaaaccagtgacttcgctacgcaaaacccagagctggctcagatgctccctgattacgtggaaaactgtgtgatcggcgacattcttctgaatggtaaatacaccatcaatcagctgctcaattctactgacccgctgacgctgataaccagtaacccaagcccgcttcggggcatctttaagatgacctccacctcacgtaagttcctgacctgtcagcaggccgcaacggagatacagaagctggccaataccgacgtcaacccgggcagtgcgacgttcacctggctgacgagaaaggtattcggcaacaaactgaatggcgcggcgcttctggccaatgctatgggggaaagttacgggtacttctatgccggtggtatgactgctgcgcagatcatgaagaataacatcacgaacagtgcagtacggcaggggatcaagggttttgccgctcgctcttccgacacggctaacctgcttaatctggccaccgagaacgctgccaccaaacagcgtctcgcctgggccgcaggcaacgagctggcgacccgaacgctgccgtttgcacagtctctgctgatgcttatcctggtatgcctgttcccgctgatgattgcgctggccgcatcaaatcacactttgtttggtctgaacacactgaaaatatacgtttccgggtttatctacttccagatgtggccggttatgttcgccattcttaactatgccgccaactactggctgcagagtcagtccgggggcacgcccctggttctggccaacaaggatgtggtggcactgcagcattcggacgtggcgaatctggcaggttatctgtccctttccattccggtgctgtcgttttatctgaccaaaggtgctgcggcgatgggctctcaggtggcggggagtgtactcagctcgggcgccttcacgtcagcaggtgtggctgcgaccacagcagacggaaactggtcgtttaacaacatgtcgatggacaatgtcagccagaacaagatggataccaacctgatgcagcgtcagggtcagcagacgtggcaggcagataacggctccacgcagacgcagacggccggtggccatacggttatcgacggctcgggtgcaatgtcgaatctgccggtgaacatgaagctcagccagctggccagcagtggtttccaggagtcagcccgccagtcgcaggtccaggcgcagactgcactcgatggctacaaccacagcgttaccagcggctggtcacagctctctcagctttctaatcagacaggtaccagcgacagcctgattaaaggcagtgaaaacagccaggccactaatgcaacacggggggctggcatgatgttgtctgccgctgaaagttatgcgaaagcgaacaacatctcgacgcaggaagcctataacaaactgatggatatcagtaatcaggggtctctgtctgcagggattaaaggaacggccggaggtggacttaatctgggtgttgttaaatttggtgctgaaggaagtgtttctggcgatttgcgacattcgacgggcagttcaagaggcgttcaggattcgggatccctaactcaagattctcgacatgatcagaacagccaggctgttaatgacttccgtcagggtatggatatggttaaaagcagccgtatcaccgatggcgcgaatcattccgagaacgctgcaagcagcaatgttcagcagctggctgcaacgctcaatgatgctgaaagccagtaccatcagtacaccatcagttcgacacagagtagcgagttcagcaggatggccaccgttgctcagaaccagagtgcaagcctcgatacgaactatacgcaggagtttgtggactgggcggccaataaatacggcgataaggcacagtccatgctgacaagtgcgccgtcggcgcgcgaagcggcgatggagttcgtaaatgaacggctcaaaccagaaatcatgggggattatcagcaggggcgttcagatcttaccagcggtcaggagcatgcagcattcagtggggagcatatcgttcagccagcgcgtggcagtcaacaggtatcaggttcatctggtcatgatgctggagtcagttacagctctcaggatggcggtgctcatagatcgggaggtgttggcagtacccagacttacggaacgactcagggcgctgaatatgaaggccagcagggtgtgaattattctgccagaacagacgattctgtttcgccgggtatggagcagtcaactgttcatcaaggacaagcagccggacagagaagcagctcgggtaatatcacctcgtcggcaggcatggttgttgccagtggacgcaccactgcagatgaaagaaccggccacattgcagaatcgcactcggagttccatcattcaggagccgtcagggagcaaggaagcatgcatggtcaggagagtgaagttactcatagccgttcaggcattaatgttggcggtgaaaaagtacgtggcgatgctatgcaggagtcatatagagaaaatcaggctaagttgcatgaacattcctcgcagggttttggtcctcagaatgagttacagcgccgagtggcggaacaaagatctgaaaatgagcataaaatcaacgaatctgctggggaaattgataaaaaacaatccactgttcaggcatccagtgatatcctgaaaggagagaatttaaacgcaaccggtaatttcaaaattcaacgaaaagaagccgaaattgaccagcaaacgccagttatagacagtgctgaaaaaaggaagttagaagagcaattgctggaattgaggaaaagggccggctag

SEQ ID NO: 120077 - DNA, 1365 bp, Enterobacter cloacae
atgattaaggctttgataacagccggtgccgtgttcgttggaggactgactgcgttgacggctgaggcggacgtcaacggcgacttgaacggcttcttcaataatcttggctacagcggcaacgtcactcaggcgcaggcctggcaggggcaggcggccgggtacttctccggcggctctgtctacctccggaaccccgtcaaaaatgtccagttggtctcgatgcaactgccatccctgaacgccggttgcggcggtatcgatgcctatctcggggcgttcagtatgatcagcggcgaggaaattcagcgattcgtgaaacaaatcatgagcaacgccgcaggctatgcatttgacctggccctgcagacgatggtaccggagctgaagcaggctaaagacttccttcagaagctggccagtgatgttaactccatgaacatgagttcgtgccaggccgctcagggcattatcggcgggctttggccagtgacgcaggtttcccagcagaaaatctgccaggacattgccggcgaaaccaacatgttctccgactgggcggcttcccggcagggctgcaccgtcggaggacagggcgacaaagtcacggctaaggcaggagacgctgagaaagatcaggtgctgaaaaacaaaaaccttatctgggatactctcagtaagaatggtcttctcggcaacgaccgcgcgctgaaggagctggtcatgagtactgtcggctccattattttcaacaagaatggcgatgtgacaattctgacgccgctggttgataaccgcgacctgattaaagtcctgatgcgcgggggaacggcgaaggtctacggatgtgatgaatccactctgtgtttgggacctgtcgtcactaacctgacgatttctgagtccaacgctctggtcacactggtcaaaaacctgatgctctcaatgcagaacaagctggtagatgatactgcgctgaccgatcaggaaaaaggctttgtgaacaccacctctgtgccggtgctgaagtacctgactaacgctcagagtatggggatgagcgccacctacctactgcaggtttccgacttcattgcccaggacctgatgatccagtacctgcaggagctggtaaaacaggcaagcctgtcgctggctggcaagaacttccctgaagaggctgccgccaaactacgtgacaacatcattcatgctcagggacttctcgctgacatgaagctgcagtcagctgctgatcagaacgcgctggacggtatcgaccgcaacatgcagtacctgcagcagcaggtgtccaccattgtttcaggctcctaccaaagcaactatcactggggtgatcgctga

SEQ ID NO: 120078 - DNA, 264 bp, Enterobacter cloacae
atgacgacaaatacgtatgcgttatcgcgtaccgagcgcgtgtggctgttattcagcgtgacgctgcttgtgtccgcagctttctatggggtgctggcccaccgggtggtcagcgtcatggatcgccctgtactgacaacctgtctgcaggactttccggtgctcctgcttatctcgctgagcatcggttttttattcaccgtcaccgggctgtacgtctgtcggcagaccctggccaggaaaccccgggaggagattgcatga

SEQ ID NO: 120079 - DNA, 612 bp, Enterobacter cloacae
atgaacattaaaaccggactcactgcgttcctgttatccctgcccctgctggcgaacgccggtgctcgtgaggagttaatggcgcttgaagcgacaaaaacgaactcatctgcagacgctacagccatcaccacctccaccatcccggtacccgcgccagccagcctgatggcgctgccagacggacgtcgggctaatatgaaagattatgccgttgtgctctttatgcaggcgcactgccagtacagcgcgaagtttgacccactgctaaagggctgggccgatgagcatgccatcagggtatacccgtacacccttgacggcggcggggacgtatcttacccgaccccgatgatcccacgtaagacggacccaaactctcccatcgcagacgagattgtcaccttcttcggaaacgggttgccgattgcgacaccgacggcctttatggtcaacgtcaacaccctgaaagcttatccactcacccagggcgtgatggacatccccgcacttgagagccggatggccagcctgattcaggctgatatggataacgtcgatccaaaaatgttgccgccaatgccggcaagcgcgcaggtcactcctcagtaa

SEQ ID NO: 120080 - DNA, 219 bp, Enterobacter cloacae
atgaaaccaacaattctcgcaggactgattttctggggcacaatggcgcgcgtactgagcgaactgatgacctggtccgtggagcatacgcagcaggggctgctgtggctgtgcaatggtatgtgggccggtgcggctggcatggtggtgtatgccgtatatcgctggttccgttatgaaaggggacagacgcataaggaagccgatcatgaacattaa

SEQ ID NO: 120081 - DNA, 492 bp, Enterobacter cloacae
atgacaaaaacactgtttaccctcatccgcgatgcagggcgggctgccctgtattccttcgtcctcggcccggcactggtgctgtatgtgtttgtgatgctggcggcatcagacggctcactttcccggcaattcctgacgacttttcatcacctgactgagggtgctcctgccggcaaggtgatggggtgtgttaatgaaagtgtgatggcagaacgcttctcgccacctgaacccggagagtcattaaagccagtgcctcctgccttatcgaaagccccgcctgaagtgttatgtcagcgcggacccgttgacagcgattcatgggggcgttcggttgatgcaacgttgcgctacgtctggacgatgtccgctatgttgggctttggattgtggtttgttttatatggcctgtcccgggccgctcagcgtcgcatttcaccagacacacattcggttctggtacggcagaacaaggagaaacaggaatga

SEQ ID NO: 120082 - DNA, 783 bp, Enterobacter cloacae
atgaagcgtgtcctctgtggcctgctcatggcgctggcgagccatgcggtgatggccgaggagattgtgacgccggcagagccgttcaccggctggtcctggtacaacgaaccgaaaaagccgcctgagcagtcaagaaagccacaacagccagcaccgcaggccattccggatctcagcaaaatgtcgccaatggagcaggcccgggtactgaaaggatacacacaggaggcgcttaaccgcgccatcctgttcccctcgagggaaaatacggcgacgttcctgcgctggcagaagttctggaccgatcgggcatcgatgttcagccagtcctttgcagcggcgcagctgagtcatccggacctcgattacaacctggagtatccgcactacaacagcatggcgccgtttatgcagacacgcgaccagcagacgcggcagagcgccgtggagcagctggcgcagcagtacggtctgttctacttctaccggggcagtgacccgattgatgtgcagatggcgggtgtggtggcggactttgcgaaaaccaacggtatttcgcttattccggtatcggttgatggtcaggtggctgcttccctgccgcagagccgcccggatacggggcagtcccggtcaatgaacattacgcactttccggcgctcttcctggttgacccgcgcagcaagaattaccgcgcgctgtcatacggcttcatgactcaggatgacctgtcgaagcgattcctgaacgtggccaacggctttaaacccaattcctga

SEQ ID NO: 120083 - DNA, 1860 bp, Enterobacter cloacae
atgaaaaaactactttcaacggtgctgatgctttttccgcttttggctggcgcagctgatcctgcctttgaggcgggagcgagctttggcaaaggtaatgcttccgccgggacgggagccctgaaaaatccggataccgtcacgggggcaataccaggctataccgctaaccctccggagaaagggtattacggcggcgtggatggcggtgacggtgggctcgccaacaaagggcaggccgctctgcagggcaatgacgcagcgcagtcggttatcaactccggaaaaacgaacccgactcccgccatagacccgaacgcacctttcatcactatcggtaaaaatgcggaagctggcgctgacggtgtgctaaacgggaccgcgaaccagtgtaaggaggtgacggtatcgaaaaccacctttgaaaattacacctgcgataaggatgtggcctcagtggaagcctgttcaagaacggcaacacctggcggacatacttccaccacgacagtgcagaaaactttcacactgacggcggccaatggcgatgttgcatttacgaataacggtacctctttcagttttagttttatagcgccggcatcaggaccggtgattagcgcgcatttttactgggcagaccgtgaagttaatgcaggaaaaatctcctggtggggagtcagcaagacaatgattgggaaggcgtttgactgggagattcctggtgcacctgctacaccgttgtctaaaggtggctcattacccgccggctcttacaccagtacagggtgtaccagcgggaacaaggaccgttgcgaaaagcatatacgggaacagattgctgattttcagtccggtgcgtcaggcttcacgctggtcctcgtcatgaatgcagttgagacaacctttacccccgaagtgaactggtcttcatcctgcggcctggatatgtctaaggcgcagaaaactacatcaacctgtacatctccgggcggaaataaaaccattgttaacaatggccagagctatgacgtctatagcgactgctgggagtacaccgataactatgtcgtaccgtcagactccacgggtacctgcggaacgctgatggcgaacccgtcctgtacagcggcaggtacgtcctgcaccgaatcgaccgacgggcagtgtacccatatgagctacacctaccagtgtcagaccacgcatcagtcgggtggcctggtctgcggcggcgactacatctgtaagtcaggcgagtgtgatgacacgaatggtgccgggagcagcgggtttgatacggcggtggcaaaactggcaggtcttgcctcggcagctgaagacgcaaaagacgcaagcagctccattgaggtaaaagccttcacgggtaaagccatgcggtgccgtaaggcctttgcaggtttctcaaactgctgcaaagattctggctggggacagagcgccggactggccgcatgtgatgatgaagaaaaggctatagggaaggcgaaggctaagaaaatcacagtcagcgtcggcgagcggtgcgatcgcaaggtgctgggtgcctgcatccagaaaagtcaggtctactgcgtctttgatggcaaacttgcccgcatcattcaggagcaggggcgtcgcgaccagctgggcgttaagtttggcagcggcgacagtccggactgccgggggatcactgtcccggagctacagagtatcgatttcgacaaaatcaacttctccgacttctacgaggatttgatgaagaaccaaaaaatccccgataccagcgcgcaggtccagcagattaaggaacgcattgccgcgcaggtgaaccagcagggaggtggtaaatga

SEQ ID NO: 120084 - DNA, 624 bp, Enterobacter cloacae
atgaaaaacgcttatctccgggcgctgacgatcagcgtcatgattgctttagcgccgctggccctggcgagcgcccaggccgatatctccgtctccgaccatagctggatcaaaggtcagcaggatgcgctgacagcgatgaaggaagacctgcaggggcatccggcggccgcacccgtcttaccgcagcagcaactggacctgattaaccgcctgcagggcgatatcgcagcccagaccaacaagatgggggaaaaagacacgttcccggctatttactttgtgagcctcggtattccacgtgaaggtctgctacccatgctgaaggatgcccgccgttacaacattccgccaacgctgcgcggcctggttaataacgacatgcgacagactgcggcagcaatgtttgagctgagtaaggaggacaaggacgccggcgtgcaaatcgatccaacgttgttcactcagtacaacatcaccacggtacccgccctggtggtgacctgccctggccactatgacgtaatcaggggaagtctgcccctgcagcaggctctcgaaaaagtagctgaaagtggtgattgtgcggcaacggcacgccatcttctggaggccggaaaatga

SEQ ID NO: 120085 - DNA, 999 bp, Enterobacter cloacae
atgaagcacttttcatggctggccggtgtgttactggttcttatttcctgtatgccatcccaggcaacggccgcagccagtaacgccggtgacggccgctgggttaacccgataagcgatgtctgctggaagtgcctgtttccgatgacgctcggcaatattcagctggccgctggaccccaaaaggataccaacaacccggcttcgccgatccagatttgcccatatggtgtgttttaccgcatcggtctggccatcgggttctgggagccaatggcgatggtggatgtaacccgtgagccgggcgtcatggtcaacatggggggctttaaaatcgatctcgggcgaacgggaacgggaaccgcagggcagagtgaccgtcccgctgccggtaccttctaccatgtccactggtacaaatacccgctgattttctggctgaacatcatcaccagtctggggtgtctgcaaaccggcgacatggatatagcctatctctccgaagtcgatcctctctggaatgacagtacgctctcgatgctgataaaccccgaggcagcgctattcggcaacctgatagctcagggggcctgcgctgctgacgcagctgcttcatcagcgggtcttcctctgtctccgctgttctggtgcgcgggaagtcaggggtctatctacccgctaaccggctataccagcggtgagttttctccgctcgaggcctctcttctggttggagagcgaatggcattcaagatgcatcgtgaggggctggtctggaactctgtgggcgcggacgtcgccgtatgtaaccagtatccatccccgatcatcccgaaagagcgatggcgataccagatggtgaacatgtaccccgaaccgggcaactgccatcccttcggggccagcacgcagctctggggcacaacgcataactctccatcatccaaaaagaacttcggctacctcttctggcgcaaacgtaactgcgtattcctttaa

SEQ ID NO: 120086 - DNA, 324 bp, Enterobacter cloacae
atgactcaccctgaatctgtcaggccggtgacggttacccgtgaccgcaatggcttctggacgcaccctcattattttgcaccggccagtgatgaggtcacacagactgaatttggcgactggatgcgccagcacaatctgacctgtgccacccgctggatggaaaacgacgcgcctccccaggtgatcgccgactgggaaaaggggaaacaaaacatcagtgactggctcccttccgcgccagagggcgagggctggttcattggctccattcatgacactgaggacggcccggtctgtgtatggctgcgggaggtgaaatga

SEQ ID NO: 120087 - DNA, 222 bp, Enterobacter cloacae
atgaaaaaagaccctgatactgaaaagggccggaatgtcaccatctcgtcagtacgtcacgatgagggttcggcccgacagctggatgaaatcctcaacgataacccgttgtacaaaccctctcacgtgctgcgcggagccattcttgccctgtacgaaatgagccaggaacaacgcctggccatcattatgaaagcggctgataaagccaaaaaccactga

SEQ ID NO: 120088 - DNA, 546 bp, Enterobacter cloacae
atggcgttaatcagctgcttcaccgaccctcaggggctgcaggggatgctcacctgtttgcgcgataccgagggcatgaccggtattctggtagtggttgcgctactcgctggctggattgtggttcagtacgtggcatgcgcccggcgtgagcgccgggcgcgggagagcaggccgggaatacccgtccccctcgcacaatttggtggtgcccgacatgccgatgcggttcacgcctttgctaaccgagaatactaccaggtattgctcgccgagctggaaaaaggcctgactgaggcgggctatgcactgacacgcgatgaatcactgcgcgtgacgattccagagactgatcggcaacaaatcagccgccggattttccgggcgcgccagaactatacgtcaccgagactatctgagcaggcgatgcaggacaacgaagatgcggcagtgaacgatggatacgccggctcgtggctcagcatactcatacgtggcagtgagcgcattggctggtacatcaccagaccggaaaacagccagtga

SEQ ID NO: 120089 - DNA, 279 bp, Enterobacter cloacae
atgtcactgatacacaataccgctgcgccgtctgtgtctcagcacatgacaggtttcaatgctgataccaaaggcagtgaagaggaagtgaatcgcctctgtcagctgtaccctgaaatcgcttcatggcaaccggcgctgatcgccggtgcctggcatcagtggtgcgtggagaaccagattcagccgatggcgccggaaaaacgtgatgaagcgtttcccctgtacctcgtcaggcttatccgcaacagaatggaggagatgaacgcatggcgttaa

SEQ ID NO: 120090 - DNA, 393 bp, Enterobacter cloacae
atgagtgcaacaacgttaggtgacctgtttcccgaaatgcgtcaggcggtcacatcccatcaccgttacgccagaaaaccgcgtaaacccgctgagataactcctcgcatgggaacagcagaacggctgaagacgctgtaccccgaaattgactcctggcatccggtactggtgaccaaagcctggctccactggtgtgagcagaaccagcaggacagccgggagccgtcgaaacgtgatgaacgtttcccggactacatcattcacctcttactggagaacatgcgggccgaggacagcgcgaaacgtaaaaagggccagacgctgtcactttccgagcgtctcgacaggttgtttgcaggtgaagggcaggagaacgccgaatgtcactga

SEQ ID NO: 120091 - DNA, 636 bp, Enterobacter cloacae
gtgaaaagacgactaaagctgatgggtatgatgctgctgatgctctccgccggcagcggggcgaaagatctcggaacctggggtaacgtcttcgagcctgcagagcaggacatgctggcgtttatccagaatcgcctgaagggaatggagcagactggcgaacttgaccgtctgcgccaagaggcaacggaaagagtgaaggagcatgcagtacgtccgacgccggtggaagggctcacgaaagcgaaggaataccgcagctttgcctgggacccgacatttaccgtgaaggagaccatcactgacatgcagggcaacgtgatcgcccgaaagggcgatacggtcaatcctctggataaggtgcccttcagccaggtgctcttttttatcgacggcgatgataaggagcaggtgaactggacccgacagcagctcgccgatcagaccagcgtaaaggtcattctggtgaacggcaacatcaaagaaaccagtgatgcgcttaatgaacgtatctacttcgaccagtctggcgtactgacccgtaaattcggttttgaacacatccccgtgcggatatcgcgcgatggccgcgtgatgaaagtggaagaaattccggtatcaggagcgaaaaaatga

SEQ ID NO: 120092 - DNA, 414 bp, Enterobacter cloacae
atgagtgaacaacaggacaagccgtatgacgtcgataccgtcaacgatggtgcaactatcgccagcaaaacatcccgctgggttaaagccagcatgctggggctggcaggattgctggccatgacaggtgtggcatatgtgacggcgaaagccgtcacaccggaggtggtggtcttcgatatgaaggggacagtcgacctgttcatgcagcagtccgcgcaactgcagctcgatgaagacaaggccagggtgctgacaacgcgtttcaattcagcgctttcagagagtctcggtgaatggcaggcctcacataacgccatcattctggttaaaccggcggtgatgagcgaccagcgggatatcacgaatgagatccgtgccgacattgcgcgccgcactcaggggggccagtga

SEQ ID NO: 120093 - DNA, 2610 bp, Enterobacter cloacae
atgagttttgtcgacaacctgatggatatgctgaaaaacgggaaagaggaagacggtgccgccacggcccgcgagaatctttcccagacgtggggctacccgtccctggttgcggcactgccgtaccggtattacgacgacatcaatgagattttcgtcaacgccggctctgcaggcttcatcatggaagccgccccgctgcctggcgcgaacgaacaggtgatggccgcgctcgatgacatgctgcgcaaaaaactgccccgccagactcccgtcaccgtcatcatgctcgccagcaagtgtgtcggggaacgtatcgatcgcggtgtgagtaacgacatgtggaaaggagggatggccgatcacctcaataaaatcacccgcgcgttctggcagcgctctgcgctgcacggtctggccaacgaacgcgattacccgctttacctgcgtaactaccgtatctttcttgtctatggtcagccgctgaagcgcgcttcccagacacaacgggtgattgatgacctgattcagatccgcaacaccatccgcgtctccctgggcgctgcgcgcatcgacagcgtgaacgtcgatgtgaacggcttcctgtctgcggtacgcgagcagatgaactaccgccaggaacaggtgctgacgtcctcaggcgactacaacgaggatgaaaagctgaaccgccaggtggttgatcagggtatagggcttgatgtctatccgtcgcatctccggatgacgttgcccgagaccatcgacgcgcgcgggacacggttgccggcatcggcatgccgcatcatcaacatgcagcttgctaaaacgcctaaacgcttcgccctgtggcagggggctgacaatctgcagaacctgcgctttcctgacctcggaataccctgtccctttatgctgacctggacgacggagctggaggagcagacgaaaagccagagtgaggcatttcgtaaagataccgatttgtccaaaaaggccaactcagcctacgccgcactttttcccggcaccaaaagggccgcagaagaatggcgacgtacccgtgagcaactgaacaataacgaaattgcactctgcaacacgtactttaacctgaccctgttcgcgccggacaacactactgatgcacaggcctgtgagctggccgccgtgaacgtgttccgcaagaacgagctggagatggtaacgatacagtaccagcagatgcgtaactggctggccggcttcccgttcgtcatgcaggaagggatgtgggaagacctgaaaacaacaggcgcgacgctgcgcgccaagtcatggaacgcggtgagcctgatgccggtcgtggccgaacgccagttgtcgaatgtaggtatgccgctgccgacctaccgcaaccaggtcgcgttctacgacatgtttggcgaggagaatggcagtaccaacttcaacatcgcggttaccgggacgtccggggcaggtaaatcgtttctgatacagggggtgctgcgcgatgtactaaacgccggcggttacggctgggttattgacatgggggacagctacaaaaactactgtcatcaggccggtggggtttatctcgatggctctaaactgcgctttaacccgttcgccaacgtcaaagacattaagcactctgctgaagggattgtgcgtctgctgacggtacttgccagcccgacgcagccgcttgatggcgtctgcgaggcgatcctgcagaaagcggtaatggatgcgtgggagaaaaaggcaaacaaagcccgtatcgacgacgtccataattacctgactaacgaggatgtgaatcaggcgtttgcagacaagccgaccatcatctcgcgccttgctgagctggccatgctgctcgatacctactgcacctgggggccggacggagaatactttaacgccgacacccctacgctcgatggtgaaacccgcttcgcggtactggagctgctgagtctggaagacaagccgaagctgctctcgtccatcctgttctcgctcattctggcgattcaggaaaagatgtaccacagcccgcgcgacctcaaaaaagtctgcatcatcgacgaggcctggcgtctgctgggtggctccaacccgcacgcggcacggtttatcgaaaccggctaccgaaccgtgcgtcgtcaccgtggcgcgtttatcactatcacccagggcatcaaggacttcagcgccagtaaggaagcggaagccgcctggaacaacagttccaccaaaatcaccctgctgcaggatgctaaggcgtttaaacagtaccttgccgataacccggatcagttctcggacatggaaaaagaagttatccgtggcttccagccagccctgcagaccggctacagctccctgctgataaacgccggggaatacagctccttccaccgtctgttcgtcgaccccgtcacacgcgccatgttcagctcgcgtggtgaggactttgccttcatgcagaaattgcagagagaagccggggccactgcggaggaagctgcatacctgctggcggagaagaaattcggcaatgaacttcgtgaacttgaagaatgggtgaaagcagcatga

SEQ ID NO: 120094 - DNA, 255 bp, Enterobacter cloacae
atgagcagccattacgttaccggcaagaacggcatcgatcatctggcgaaatcgttagtccattcacggaaaggaacgacgcaaatcaccgccacacagtcagtcgataccgacgatgaaacgctggccgttctgagcgtgagctgtgactggcagattaaaacagccggtgatgcaccgctatccgggcaaatgaacgaagagaagctgcgtcgcctggagttaatccgggccgctgcggagggtcgaaaatga

SEQ ID NO: 120095 - DNA, 540 bp, Enterobacter cloacae
atgaaaaaactactgggtgctgcactgctgtgcagcgcactgaccggctgcgccggtctcaattctgatttcgactgcaacaagaccgcgaccgaccagtgcctgaccaccggtgaggccaacaagctggccgctcagggtaaaagtctggatgacctgacggcagagaaaaccgcaaaaaaacctgcgggtgaaaccctgccggcactgcgcaattcggcaccggtcgtgaatccgttccgtcctgtctccgtcgcagcaaccggaaccaccgccgccaggcctctgaccactgcgcccgcgaaaacatccggctcactggtcacgccgctggccacgccgagtcatgcgacccccgtgccggttaacacggcgggccgcgttccggttcagcgtattcctgacgccacgcagcgcctgtggattgccccctgggtggacacggacgacaactttcatcagccggctgtggttgagttcgtgaaaaacaaatcccactgggatgagagctaccgcgttatcggggagggcggggaatga

SEQ ID NO: 120096 - DNA, 396 bp, Enterobacter cloacae
atgtctgccaacatggcgcgctatccattactcaaaatcctgcacaactatcgctatatcctgattccagcactggtattcactatcgaactgacagtgtgggcagtgctcaatcttaaaggcgtgggtgatatgggctgggtctcctggcgagtgtgtctgctcttaagcttgttcctcgtatgctttagcgactcagcctttaacaaactcgatggtgggtttcttatgtatggttcagtcgttccgtggggcggaatgctgatagtggcgagtatttatggctttatccagatgaacctgaactttctgacgctggatttattttatgccggcgtgtttggcagccttgctgtgcagttggttttcactgtgattcagtgcaactgcaaataa

SEQ ID NO: 120097 - DNA, 147 bp, Enterobacter cloacae
atgaagcgtacgagagccattgcactactggtaataacagccggagcgaccggtgtttctgtttacaaccatactggagggctcacagtgttactcaccctgatgaccataggcgcacttgctcatgtcatcaacgtcttcctgtaa

SEQ ID NO: 120098 - DNA, 432 bp, Enterobacter cloacae
atgaatgatataggttccatgaggcgcgaaagcgaactaaagcgtatcgaagaggaccttaaccgctggatggctggaaaaaaaacaaagccccactggatattctgggtcgggacattaaccgctacagggatgttgattttcagcttctggtcaggcaatcaaaggcttactgtggtttcttttgcaataggaatggcattgattctggccgggttgctacagactggtgaaacatgggaagagaaaatacagaagaaaattcggtcatatgagccgcttgatattgatgccatgcgcaccctggccctctctgtttttcataaggatgagctgacgcagaaagaactcagaaagtggctggacgcggagttcagcgccatttctgatgccgctcttcgtgggggaaacgagaaaatcggagaggaatga

SEQ ID NO: 120099 - DNA, 1404 bp, Enterobacter cloacae
atgagtctgaataaaaacctgaaaacccggcgcaaacagctggccattcttgctgccgttatcgtgggaggcgccgccgccacgagcggcgttatctggtacgggcagcatcagcaggaacagaaacaccccgcgccggtcgccaccccaaacatgaccggcgtggtcacggcagcgtttaaccagcaggttaatgatgccgcactggcacagcagcaggccaagacgtccgcacttgaggacaagctcgccacgctcacccagcagtttgcacagaacaagctcaccaccgagcaacaactggccaaaaaggacgaagaaattcagcgcctgaatgaccagctaacgaaagcccccggcagcaacacgaccactggccagcagacaccacccgcaggtcagaacggaacaccactccccggccctgttgctgccggtcaggcccgaccacccgaatacaccgtaaccccctcaggcacaccggccgccactggtgtgaatatggggcagggcgcagcgttctacccgggcggctctggccagagaatgacaggtgggctgagcactacaaagttcagctatgaaagcctgaagaaaaagccaacgaaactaccctggattccgtcaggctccttctctgacgccatcatgattgaaggtgccgacgccaatgccagtgtgaccggccagcagaacacccagcccgtcaccatccgcctgctgggcaatatccagatgccaaacaacaaagaatacagcgccgacggctgctttgtggtgggggaaatctggggtgacatctccagcgagcgcgggattgtccggacgaaatcactcagctgcgtactgaaaaacggcaagcacgtcgatatggagttcgatggccatgtcagctatcaggggaaaggcggcgttcgtggcaagccagtcatgcggaacggcatgattgtcggctacgccggtgcagctggcctcctgtcaggttttggtgaaggcatcaaatctgcggcaacaccatctgtcggcctcggtgccacagcggatgtcggtgccggcgacgtgtttaagcagggtataggcggcggagccagtaaggcggccgacacgctgagccagtactggattaagcgcgccgagcagtatcaccccgtgattgatatcggtgctggcaacctggtaactgtcgtgttccagaagggcttccgccttgaaaccctggaagacgctgaggacgctaaagcgaaagaggaactgcagaaagccggcaacgccgcgcagaacgccgtgactcctcaaccggcgagccagaccactgcatccagcaccacctcagtcggcaacatcaaccctgatgatgttctccgccaggccagccagctgcgtctgggtgacaccatcaactaa

SEQ ID NO: 120100 - DNA, 741 bp, Enterobacter cloacae
atgaaatttcgtatttcaccggcagctgctgctgtgtttctggcagcgggattatttaccagcggcctccgggccgcttccgcacccgcagccattccgtttgagaacgacgccgcctttaacgtcactctcagcaacaccaatccgagcaaggttgttgtcgacggagaactcattaccagcatcagcggaccaaccggtgcctatgaccagagccagaccgacgacggagcacttattctgtctccacttgtcagccagaacttcacgctgtttattcagaccgaccgcggctcatccctgagccttaacatcaggccgcagccgggtaacggcaaaacactgcgcttcaccccaatgtcaccaccacttcgcaagaacgacgatgcgaaggcatgggaagaagggcagacctacgaaaaaacactggtcgcactgtcccgcgccgtagtcaacggtcaggtgccggacgactaccaggagtatccggtcagccgcatgcctgcatacacacccgccagtgatgtacgcctgacaccggaacgccagtttgttggtaaccacctgcgcgttgtgcgcttccggatgagcaacccgggcagcatcacccgcagcctgcgcgagcgcgatttctggcgcaagggcgtccgggccgtgatgctgtcgcagaaccagctttatgccggtggcgaaggctacgcctggattgtgttttcagatgacggagacacccgcccatga

SEQ ID NO: 120101 - DNA, 822 bp, Enterobacter cloacae
atggtcagtttcgcaagccgctatcgtatgcctacctcgatccgtaaagaccgtccgctgacgaatgaggaattacagctcatcgttccgagcgcgttctcatcggataaacacgattcacgctctgaacgttatacgtatatcccgaccattaacattcttgatcgcttacgtgatgaaggttttcagccatattatgccactcagtcacgtacacgcgaccaggataaacgcgactttacaaagcatatgcttcgcctgcgccgtcatgaccagattaacggaaaagaagtaccggaaattattctgctgaatagccatgatggttcaagcagctataaaatgatccccggtatgttccgtcaggtttgcagtaatggtctggttgcatggaaggattttggtgaaatccgcgtaccccacaaaggggatattgtcgggcaggttattgaaggcgcttacacggtgctgaaaacattcgacgcggttgatgaaaatatagacctcatgaaaagcattcagctcactttgcctgagcagcgcctttttggtgcgaccgccctggaacttaaatacgatggaaaaccagcgccgattacaccggagcaaattattaaccctcgccgtgggctcgacagaggccaggatttatggaccacgtttaacgtggtgcaggaaaatgtgatccgtgggggaattcgtggcagaacggaaaaagggaagatgaccagaacgcgggaagtcaccggaatagatggtgacatcaaattaaatcaggtgctctggaaaatggcggaggagtttgcaaaactgaaggcctga

SEQ ID NO: 120102 - DNA, 348 bp, Enterobacter cloacae
atgatgcaaacgacggtgacacataaaacaacgctcctgcgcactgatggctttgtacgcaatattcactcacgtaatccgttcgacgtcattcgtgctgatgtagttctggctcgtatggaaaagcgggctggtaaaacatgcggcgcgtactacgaaatctatgatgtcactttgctgggaatggcgctggactaccttgctaaattacctcttaaagaccgcccggtattcatgggcgcagcgtcgatgcgcggcttatttctgacgtgggctgaggaagaacgtgcgaaggaggcatacgacgatttaatgaccgagatggccattgaggcgggtgagatttag

SEQ ID NO: 120103 - DNA, 375 bp, Enterobacter cloacae
atgcacacacaaaacgtcaacgtcaaaaccgccgctcccgaatcttccaggaagataggggggaaaacaaaaactgagtccagtggctttgttatggaaaccatcgggcagagtgaaacagtctcagcgcttacttttgaacaattctgggatctgtattcatgggtcgtcagcgaatcacaagctgatgtgaagcctgttaattttgtcgcaccggctgacagtgtcgaactgatttatatcgatccggaagtcccggattacttctcagtatggttactggatggttacccggttgccgcagctgcaatgctggaaaatttctcacgcgtattaccttctttcgtgcatatcttcgctggagacaaatcatga

SEQ ID NO: 120104 - DNA, 336 bp, Enterobacter cloacae
atgacaagcaacacactgaacgctgttccggcgaccgtgctggaaacgatggcagaacgccttaacggtcagcctgaaccgctaaaaatccgcagcaacgatgatcacgccgcgctggctgcagatgtgctctggaaatttgcccgtaaaaccgggctgaacagggaaagcgaaagcgtgcaaactgtcatcacggattttctggcaaatctgctgcacctgtgcgaacagtgcgagccggacggggctggcatcgagggatttaatgccctgctgaacatggccatgatgcactatgagcaggaaaacggagcggacagcgaagaaccgatctga

SEQ ID NO: 120105 - DNA, 792 bp, Enterobacter cloacae
atgtcacaactgagttttgaatccctgttcctggcagaccagattgatccgcagccgcaggcttctgcgcctgcccggatgctgtcgccagctgaggcgcgtaaagagttcgccagtgtcttccgtcagacggcgaaaaatatgcgccgttccgaagtgttccgcgacttcatcaccctggcagccagcgagctggatatggcccgtattcgctcgccggagaacatcgaaaacagccgtcgcatctgcgaacggtatcagccggacgatctggacgccatgaagcagctgttctgcctgttggtggaggggctggcgggtgaaattcatgatttcctcggcgctctgtatatggagcaggagctgggtgcggacgaaatggggcagtatttctccccgtcctgcatctcccgcctgatggccggactactcatgcccggcgctcaggagacgataaagcgtgaggggtggataacgctcgatgagccagcctgtggtagcgccggaatggtcattgcctttgcatactggatggctgaagcgggatataacctttcagaacagctgtatgccacctgcactgacatcgatccaatggtggcagatatggcctttatccagctggcactgctgggtatacccgcgaaagtcgtgaccggtaatacgctgaccctgaaagcaaacctcgtgcgttacacccctgtttattacttcaatgactggcagggacgtctggtatttcgcagtcgtctggatgcaatgaaaaactttctggccaccgtggccgcctga

SEQ ID NO: 120106 - DNA, 201 bp, Enterobacter cloacae
gtgaaatttgacccgcaaactgtcgcacaggcgaaggcatttgtaaatgccctccgcgccggaaaacgcgctcgcgtgcccgcgctgcgcttctcacagtggcagccgttcctgtccgtggtaaatgccgaaacgggctacgccaccgatgctgactgtggtctggctgtcagcgtctacccggcgcttggactggcttaa

SEQ ID NO: 120107 - DNA, 462 bp, Enterobacter cloacae
atgaacgttaatcctccgaccgctgcaccaatggcctttttcgttccgtctcataacgccgtttatgaccgagcaacacagctggacgggcagtgggttactcagcgtgaagcgaaaacgctggaatcccttcgccgtctctatccggatgcggagctgatctccgcgactctggtacaggaaaagctgaatgacggctatcgccgtccctgggtggaaatcaccgaggcccggtatatcgaccagctggaaacgttgccgtcagtggactggtgcagggggtatggcggggagtcgttcaaatcgatggagtttacgggcggggatgtgaccgcgatttttgtccggtatggagcgcgtttctttgagtgccatgacctgcacaccctccatcaccgggagctgattggcgacgtgatcgcccgtttctgtctcgatgcgccgctgaattccgcgcattaa

SEQ ID NO: 120108 - DNA, 207 bp, Enterobacter cloacae
atgagcgttaaccccccgactgcaaaggcctgttccggaaatgggcatatgtcaggcccggagcctaaaacagcctctctaattgcgatttatggcaatgaggcgagctattcatggaacgttctggaggatctgaaagctgcaggtgcttcttatacccgcagaaacattatcgccgatatgttccgccgtctgggagttcagtaa

SEQ ID NO: 120109 - DNA, 234 bp, Enterobacter cloacae
atgcacacacgaaacgtcaacgtcaaaaccgccgctcaagaatcttccaggaagatggggggaaaacccgtttcgtacaggatcctcgtcgctgagacgaaaaaaaactctgaggaggaatcggacgttctggagttcagcagccttgcagagctgaagaaactgcgcagacgctgccccgaaacaatgcgctgcacctatttctacgccctcagcagtggcgtcgataaatag

SEQ ID NO: 120110 - DNA, 186 bp, Enterobacter cloacae
atgccgcaaggcaaggagaagaaggccatgaaactgccgcgaaacaccctgctctggtgcgtattaatagtgtgtctcacactgctgatattcacttacctgacacggaaatcgctctgcgaaatccggtacagggacacggacagggaggtggcagcttttatggcttacgaatccgctaagtag

SEQ ID NO: 120111 - DNA, 225 bp, Enterobacter cloacae
ttgagcattatcagccgcaggttcgacaaaaaagagacaggaaccgtgttccggcatgctgaaagcgggaagatcctgtaccgccttgatgcccggctggagcgggatgactgggaaatgttgcaggcgatgatcagccttgtctataacgccggcgtgaccgccggaagcgaacagagagccgctgagattcgtgaggcgctgggtatttcaggggctgaatga

SEQ ID NO: 120112 - DNA, 231 bp, Enterobacter cloacae
atgagaaataacccctgcaagacggagctgaaagtcgcccgcagccagcgtaacaaactccgtaccatgtcggcaaagctgaaagagatgtgctgcgagtgggacggactcagtggctggctggaaaccgaaagcgagcagctggctgagaatatagacaggcatcttgaggcgctcgaagaccagatccgcgagtggtcagaaggtacggataaccgggagggctattga

SEQ ID NO: 120113 - DNA, 732 bp, Enterobacter cloacae
atgatcccgtcctcacacgcgctcgtttccctgaagcccgcccgtcaggctgcaattcaggctatcagccatgttgagtctgcccgcgaacgcggcgcacgactgcccgccatgccgtatgtgcgtacctttctgcgcttgctcacgggcagcggacgcctcaacgccacggtggccaataaaatacctggcctgcactgggtgccaaataaccgtcattcgaacctgaaacaggtcgaggaagcgcttaacacgatgattgccaccagtggcgaagcctgcccgctgccgctcacgattgacgtacaggtcgaactgtttcctgaggtcatgcacacccgcacggggcgacggctgcacaggtctggcattaagaccacgcgtcagatgcgccgccagtctcgtgagtacgaacagcgctggaaactgcgccagaacctgctggagcaggcgaaaatcgacctgaattttcagtcaccggaaaccgtctgcacctggtacacccggtggagcgacgagtttgacgcggcagagcttgccggaccgttctggcgctggcagtcgcggttctcgtcgctgaaggaacttgactggcttcgcatcagcggcgagccgctgtatgcagtgatgtacgaaatcccgtttatcgtgcgggagacgccggaacctgtccgtactgctgagcgctggcaggtgccgaacaagttacggtatcagcagggggcagaatga

SEQ ID NO: 120114 - DNA, 435 bp, Enterobacter cloacae
atgaccatgcaatatgacctgaaccgaatcaacaccctgaccgccacagacctggagtttatccgtcagcagggcgaggacgcgcgccgcgccctcagcgatgccgtgaccggccttctgtcgacacctgagggatggtgcgtctgcgccgagttccgcaccgagttcggcggcttcttccccgtccagtgccgcttcagcgaggacggcagcgatgactggcatctgtgcgtgtgcagccccggcgaaatctcgccttactggcttctggtgctgctctcctccggcggtgaagtggtgcgtaccctttaccagagcgacacgctccagcctgaccggataaaccagctgatcgcgcagctggcgggtatgcgccgctttaactgcacagccagcaccgtggtgaacctgatgagcctggaggtgacagcatga

SEQ ID NO: 120115 - DNA, 2013 bp, Enterobacter cloacae
atggtcgccaccaatactacggcaaaaaaaccagccaggaacccccgtcagactaaatctgcggaaaaaatcgcgcagtctaccgagcagaagctcgtccagctgctcgctgatacgcccgtgcaaatcttcccgtactcccgcctgtcacacactggcttaaacacgcgcatcattccgcataccgatcaggaagtggaagagatggcagacagcattcaggcaatgggcatcctgcaaaacctgatcggtgcagaactgccggacggtacgatcggcattgtcggcggggaaggtcgccgcagaggcacaggcattctggtgatgcgcggtgtgctcgatgcagacacgccgtttgttccggtgaaagtcctgcccgtggagatggcggtggcggcctcgatgatcgagaacggtcgacgtaaaaacatgcatcccgccgagcagattatcggttttcgtacccttcagcaggaaggtaaaacggcctctcagatcggcgcactgatgggctatcacccgcgccacgttcagcgctgcctgaagctggcgaatcttgccccgtccctgctggatgcgctggcgcgggatgaaatctcccttgaacagtgtgaagtcctgacacttgctgatacccatgagcgtcaggagcaggtctggaaagaggctgttgaacagtggcgcgatccttccgtacagaccctgcgcaaaatggtgactgacgacaagatggccatcagtcacccgatgtttgagtatgtgggtgaggaagcctataccgccgctggcggtacgctgaccgccgacctgttcagcgacaaggacagcacctttgccgatgcggctctggtgaaatctctgctggctggcaagctcaccgtgctcgccgcccgcgttaagcaggagcagggctggggctgggctgagtaccgtatgacggaactacgcgccagcggcgaggacagcgaaaactatcgctttgccatgccgagggctgtgctgacggaagaagaacagaagcgcgtcagtgagctggaagaacaaatggaagctactgaaagctacgatgacgaatacgagcttcagcagcagatcgatgatatctactatgaggcgcagtaccgcgaagccacgccggagtttcgcgccgcccacggtatctgggtgtcatgggacggtagcaattttcgggttcagcctggtatccgcaggctgaccgatgaagaccgggcagcggaagaacaggcgcgtcaggaacgtgaaagcaatgtgatcagacacaccacgcctgaaattcccgcagacgcctatccggcaacgctggttaaggccatgtctgcggagcgcactctcgccgttcaggccgaactggcgggtcgccccgatgtatcggtggcgctgctgacgtggacactgtgcctcagtatgtttgaccgcagctacggtaaacgcagcgaaccgctgaaagcctccgtgtcctcgaatcagtatcaccttgcttcactggctccatccggtgaagaagggaaggcactgacggcgctcaatgcacagaaaaaagcgcttcaggcaacgctgcccgaagactggcatctcgatttcacctggctgctgtcatggtcagcagagcaggtgaacaccctgctgggattctgtgcggcgcacggtatcaacggcattcaggaacgcctgtataaccgcacggacaccagtgaactggacgcgctggaagcggcgctggactttgacctgcgcaagtggtggcaaccgggtgcagagagctacttcggcaagctcaccatcgcccagattggcaaagcctacgaagaagccggactgagtacccgcgccggagagattgtgaagctcaagcgccgcgatgcggcaaaggccgccgaacaggatctgaatgctcagggctggctgcctgactggatggtgcgccctgcgccagccgctgaggctgaagaagccactgaatccgacgctgataccactgaccacgctgcttaa

SEQ ID NO: 120116 - DNA, 366 bp, Enterobacter cloacae
atgcagaaccttaacacccgtccggcgacccgtaaggtcgggcagagcaccgaaatcgtgaagctgctgcgcattcaggccagcgacacccacgtggtcgagtttgacaacgtggatacccgatttaatgactgcaacaactggcaggtgatggcaggaggcaaacgagtcctgtacagcaaccgcatgtatgagcgtttttcagatgtgaaatcggggatcgtggcaacgatcaacgtatgtgaaaacagcggcatcgaaacggataaagcgatgctggaaggggcaaaagtcatgatgcagcttcttgatggctatccgtcctttggagcactggcagcacacccgaaacgcattaccggttaa

SEQ ID NO: 120117 - DNA, 273 bp, Enterobacter cloacae
atgcacacacgaaacgtcaacgtcaaaaccgccgctcaagaatcttccaggaagatgggggaagaacaaaaccctgtttctgtcgcacgggagtgggtggctcaggccacttcgctgaaagcgggggtctccgtcactctgtccgatgtgtcccgatacggcgacgttcaggtggagatccgcaccaacggaacgcttaactggcacgcctggtcgtttgaaccggattttcttttggaactgaaacgcaacctgcaatacgtgcagctttaa

SEQ ID NO: 120118 - DNA, 198 bp, Enterobacter cloacae
atgcaactgtcaccggaaaccagcagcatcctgcgccagtataaaacgctcatcaacgagcgacgtcgcgaatccggacccagccccgtaaccacagcgaaagtgctggatgagatctgcgaatcggctacccgccagtgcgccgtctatctttgcggccacttcattctccagggcggtcagggcgacggacagtaa

SEQ ID NO: 120119 - DNA, 411 bp, Enterobacter cloacae
atgattggtacagcaaaagatatagccatcgaaatgctgcgtgatgacgataatgacggcgagaaatttgtattcgccagctggagccggaacgatattcgcggtctctgcattgactgggatctcagtgatgaagagatcgacgtggtgatggaaagactggaggcagagctgtatccctccgggtgtgtccctctcatctacaacattgttgaggcgatggtggaagaaaaaaggaacaaccgcaatgttaccattccggctgcggcgcttgcgatggtgatgcagcttgcagggaaggaaatggagcgtatcgctatatgcgcggaggatggcggcggatcggcagaagaaaccctgaaagaagaaaatgatgtcatgttgagcctgcgcgctgcgctcgatgcctga

SEQ ID NO: 120120 - DNA, 204 bp, Enterobacter cloacae
atgaagcttgaagaactgtcaggagacgaacgcacgctggtcgttgtggcactgcaggcgctgcaccgtgagagattaaccgcgtcaaatgccgtctttacggtctgtagtctggccggaaaggagccgccgccggatgatatttttggactgcgtgaagttcaggatgcgctgaggcgtatgggtgcagctcctgcgcgttaa

SEQ ID NO: 120121 - DNA, 264 bp, Enterobacter cloacae
atgtcagtgattaaacagaaggcagagcagtgcattcataactttctgcgtgcccggaacgtgcctgaatctcagtggccggatctggtcaaaaagaccggcaggggaatgatactggcaggcgtggccgttgtggttcccggcgttctggctgataacatctccctgccggtgacaatcgcgatgcaggtctgctatgcctcactgatcggcctcggggttctcctggcgtttgacgagaaaaaaccaaaggggcggggatga

SEQ ID NO: 120122 - DNA, 663 bp, Enterobacter cloacae
gtgccggacggccagtattctttctatctgcacagcgacgatcgcaccgacatcgcggcgatggcgaccatcagcaccatctcacagcccctgcgcggtgacttcatccggaccgccgccaccgccggggcggtgatgtaccagacggatgcccgtttaccggctctgatcccggtgttctttgacgggcatctgagcgccatccggcttggcgccgtgatggctctggtatccggtacctggtcttcactctcaggacttccagatgagcctgatggtggcgtggcggctctggccatgtcaccggagacggaataccagcgccggcgttacaccctgacgcttcaggatgaccggagcagtgaacgggttgagcgtgtgctgacgggcgtgtcatcccgcctgcgtggagagctgctgagaaacctgattatcaccggtctggccctgcatacgaccgcgccggagctgccgcgtctgctggccagcatgccggtaccgcccggcacggtcagcgagctgcaggttctggttcagcagatggccggtacggctggcgtgagtaaggctgccgtaccggagaaaccagcacagcctgccgcaccggtaaccggtgaagcgaccaggataaagaaaaatatgcaacgggcattcggagactag

SEQ ID NO: 120123 - DNA, 432 bp, Enterobacter cloacae
atgaaactgcagcttttcagcaccgggaaagaactcccgccacaggcccgtccgttgtttgcagacctggccagctgcggttttcccagccctgcagctgactatgtcgaatctgatctggatctccatgattactgcatacggcatccgagcgcgacttactaccttcgcgccagcggtgacagcatggccgacggcagcctttacaatggcgatctgctggttgtggactgtgccgagaagccccggcatggcgatattattgtggccagcgtgcagggggagtttacggtcaaacggctgctgctgacgccacgactgacgctgcagcccatgaacgccgcctggtcgccgatttatcccgacccggacgatctggatatctttggcgtcgtcacgcacatcatccaccgcccgagggagatgtactga

SEQ ID NO: 120124 - DNA, 756 bp, Enterobacter cloacae
atgacggaagttgcggttatcaaccataaaaaacgtaagaatagcccgcgaattgtccagtcaaatgaactgactgaagcggcatacagtctctcccgagaccagaagcgtatgctttatctctttgtggaccagattagaaaatctgatggcacacttcaggaacatgatggcatctgtgaaatacaggttgccaaatacgcggagacctttggactgacatcggccgaggccagtaaagatatccgtcaggcgctaaaggggttcgcgggcaaggaagttgtcttctatcgccctgaagaagatgcaggggaagaaaagggatatgaatcttttccttggtttatcaaacgtgcacacagcccttccagaggtctgtacagcgtgcatattaacccttatttaattcctttcttcattggtcttcagaaccgttttacacagtttcggctcagtgaaacgaaagaaattaccaatccttatgccatgcgtctttacgagtctctttgccagtaccgtaaaccagatggctcgggcgttgtgtccctcaaaatagaatggatcatggaacgctaccagctcccccagagctatcagcgtatgccagacttccgccgtcgctttctgcaggcgagcgtcgatgagatcaacagcagaacgccaatgcgtctttcttatatcgagaaaaagaaaggccgtcagacaacgcatatagtcttttcattcagtgacataacctctattcaacctgtgtaa

SEQ ID NO: 120125 - DNA, 1359 bp, Enterobacter cloacae
atggacctagtgtggaaaaaaaatccaaggggaaggcttgaaaggaaactgaatctggcagagagagaggcattgctgcatgttttcagcaacggtcgaaaacccgctcaggctgatttacgcatagcaaattctgtgcttgaagaaatggaccgccgtaagttgtggttaaaatgtgattgcgtcgaacatgacccgaacattgaaggtccttttaactgcgaggttaacgttgccaggttacgccacgtcaagacgacaagactgcatgatgaacagtgccctttgttcaggctaaagaaaagtaaggatgctgataacactatcactgaaggaaaaaccagcccactaaacccggtaggtggaaacgactggttaccagtaaagaagaaagaaaccagaatcacctctgtggaagggccggttgtgccccgaaagcgtcgacgcaaaacgcttaagcccattcctgctctgggccgaaaattgctgacactcattcaggcagccggcctgaatcaaattgaactggttccagagtttcaaagtccgggtcttgtcggttcaatcaacagtataaaagaagtgctggatgaatattcaatgggcaatggaacactgctgaatatgctgttcagctgcgcgccctggctgtcccccgaacggattaacgacttgttgacccaactggaagtttctctgggaaaagatagcagtgataaggaggcatgcgtgtatatcattggtattgcgaccgatgccaatcgagaagaagttaccttcaccgttcggggtaatacttttatccataggcctgaagcccgcgtcagcatcaatggtgaaagcacatacaacgctggcagcagggcaccttactgggcaatactggaatatcgtagagggagagatgggaaagtttactgccatgaaggctatgcgcatgccgcgtatacgcttgataatcctgtgccagtcgatagcaataaagagcgcgacactcttaaggtaataataaacgccagcagctatgcaggccgtcaggccaatcatccagaggcgatcagcctcagcaagccactcttcacgtcgaaaagcattttgaatggggttgaagaggttattcatcctgatttcttattgaatgtggtaccgagaaaagaaaatacagttaccacttttatcattgaaacaatgggctctgaatccgaggaatatgttgcgcgaaaacatcaaacacatagctggatggagcaggagggcgtgctcttaacagatcctccgggctggccagaaccttcagacaggacatttaacagcttcttgcttaaacacatttttagtgcaggaaaaatgcaccagtag

SEQ ID NO: 120126 - DNA, 627 bp, Enterobacter cloacae
atgatcattgttcttggtagtcaaaaaggtggagtaggtaaaagtacgctcgcagtttccatcgctgcatatcttatggcactaggaaagcgagttatcattgtagatgccgacgatcaaaaatcagtactgacctggtataacaatcgaccagaaaacttgcctcatatgcctgtgactggagcgtccggcaacatcaaagccatgctaaaagagcatgaaaaatcttatgactttgtaatcgccgattgtgctggccgtgacagtgcagagatgcgaagcggattaatggctgcagatgtgtttatttcccctttacgaccatcccaaatggatttggatgtcgtaccacatacatgctctgtttttactgctgctaaagatttcaacgagtctgtacgtgggtatttagtgttgaatatgacaccaactaacatgttcgttaatgaagctaatcaggcagcggatgttctcaaagattttccggaaatgaatctatctaatgctcgcgtatgtgacagaaaagctcacagggatgcctgggccgaatcaatgactatttttgaaacacagaacatcaaagcccaagaagaaattgaagctctggttaaggagatcattctgtga

SEQ ID NO: 120127 - DNA, 777 bp, Enterobacter cloacae
atgaccggactcgttaccctggggcagcaaccaggaatggtagctcagttgcctgtgtccatcgactatccggcggcgctggcactgcgccagatggctctcgttcaggacgaactgccgaaatacctactggcaccggaagtcagcgccctgctccactatgtgcccgatctgcatcgcaggatgttgttggccaccctgtggaacaccggcgcccgtattaacgaagcactggccctgacccggagtgatttttcgctggcgccgccctacccgtttgtgcagctggccacactcaaacagcgtgccgagaaggctgccagaacagctggccgcactccggccggtagcctgcctcatcgtatcgttcctctttctgacccgcagtatgtgtgccagctggagatgatggtggccacgctgaaaatacctcttgaacgacgtaacaagcgaagcggcagaaccgagaaggcgcgtatctgggagattaccgatcggacggtccgcacctggctcagcgaagcggttgaaacggctgcggccgatggagtgacgttttccgtgccggtgaccccgcacacattccgccattcctacgcgatgcacatgctatacgcaggcataccgctgaaggtgctgcagagtttactgggacataagagcatcagctcgacggaggtgtatacgaaggtgtttgcgctggacgtggcagcacggcaccgggtgcagttccagatgccgggcgatgaggcggtagcgttgctaaaaaatagatga

SEQ ID NO: 120128 - DNA, 819 bp, Enterobacter cloacae
atgggaagcgcgaaagagcagttgctggatattgaatctgaacgatttgatgaatggcttgaggaaaattatccggatgttgttcccggctctgacgagtgggaacaggccgcgaacctttactactgggagcaggatgctcttgccgatcaggctcagtgggatcatgaacatgggctgtttgtggcgtccctgaacaacgtccatcagcgttacctgcacgccaaccaggaactgagggctctctatgccctgctagataaagagcagcctgaactggtgtacaggatgtctttcgtccatgccgtgacggtcatggaggcgtacctgatgtactgtgcgagggcgctgctggagcatgactggccgcttacacgcttcagggatgagttttatatgaagtccgatagaatcaaaaatccggtaaaacatgctgcccgtgagatggagctttccctgttcaggcctgcggcgaggaactttgtttcccgactgacgtttcataacgttaaaaccattgagcgctatttcggggccgtgcttcatattccgcccgtttggccaacagagatgctgggcatcatcgctgactggcgtaacgacctggtacaccgtaacggcgtggatgaacatgatgtgccaaggaagatatcagcgccgcagctgcagaatgccctgcagaaagtgtcggacctgatagaggctgcagaccattccctgcgtctggaagtggactatttcggaaactggcgtaatgaggaaaaccgggaaatcatcgcatcagcactgaatatacctccagccggagagtcacactga

SEQ ID NO: 120129 - DNA, 303 bp, Enterobacter cloacae
atgaatgtatattcccatgaaagcgagcgcgtcacggtttcgcttgaagcggcctggcgggcactgaccgccctcggccatcaccggctctggctccgtccccctgaggatcgcggcgtgaacacctggctgattgtcacctgggacggtctgacggtggccgaacgtatccgggtctccggctcatggtggctgaccggggatgccagcgccatctacacgaatccggacaggatcgtcccggacgggctggaagaactcacctggctctcggtgcagcggcgaatgaaggaaggattctga

SEQ ID NO: 120130 - DNA, 1023 bp, Enterobacter cloacae
atggataagagagtgatatttgcggttgccggatcgggcaaaacgacgctgctgatacagcggttaagggaggaccggcggacgctgatcctgaccttcaccgtgaataatgaagcgcacctgcgggcgcagattatcagacgctttggctacataccggacgggatccgtgtgatgacctggtttgagtttctgcacggtttctgttttcgccctttcctgcaggagcagctggcatcgcgtggcctgagcttcgaccagcctcctcccggaataccgcgcacgaatgcccggcattatcaggatccggccggaagactgtatcaccggcggctcgcacacctgctgacagcccgggggctgctgccggatatccgtacccggcttgcccgttactacgatgagttgttcgtcgatgaagtccaggactttgccggacatgactttaattttttgctggagctctgccgcgcggaaatctctgtgctgtgctgcggcgatttttatcagcatacctttgacacaagccgcgacggtaacgtcaatgcgacgctgcatgacgacataacccggtacgaggcccgcttcagggctgcgggtatcatggtggattgtgagacgctcagccggacatggcgctgttcagctacagtgtgcgagttcattaccggacaactgaacatccgtattgcagcccatggaacccataccacccggattgaaacagtcacggataccgagcgtacagcggtcctgcacgcggacgacacggtgatcaagctcttctatcgcgaacatcaccgttatggctgccactcactgaactggggcgccagtaaaggactcgaccacttccaggacgtatgcatcgtgctggggaccagtcactgggagctcctcatccggcagacgctggcggcactgccgccgtcgtcccgtaaccgattatacgtagcctgctcacgggcgcgaggcaacatctattttgtcccggaaagccatctgcgaaggttcagaaactga

SEQ ID NO: 120131 - DNA, 3120 bp, Enterobacter cloacae
atgtttggaaaactcctcacaagtgtctcatggcaggtcagggctgagttgcgccgtagcctgaaatcgaaccaggattacaaaaaactcacatggaacccgatagaaagagttctggtttcctgctccacccattacattcgggctatgctttttctctggttcgcggccgtcggtgctgttggtgtggcggaatactttcgccctgtattgcatccgttcgctcttcagcatctaaaggggattactctcctttcaggatggatgtctaatttactgggtagccagttgactattatcggtattgtttttccactggtcgtgggtcttattagtgttctgtttcaaaaaaaatcagcaaggatccatatccagtcagcgtatcaacttcactccggatatatgtttgctggcctgagtggtctgtctcttgccgcatttattgtattaggcggtatgacgttatcaattggtgacagatatcttaatacagctttcgccgttaccgcatttgtgtggatgtttttcaatatttttctgtctatctggttctttgtttccagcctgagtgttctggatgagaataagcgcgatcgtcttatgaataaatatttcttgtcacaggtggtggatggttacattcaaagtgcatgcattgtggcgaggctgcgatatccgggggttcacatcggtgaggtttgtcccggtagaattaaaatacttccttattcaatatctgaagaggaagaaatgactcatttgaaatttaatgtcagtaaagctgatgttgttaaagatatctatattaagccacttttattcctgctgagaaggctaaaagcagtggatggacagaatgctgaaattatcattttgccctctttcggtgttcgttccggtgaactgattttattgtcattgaaaggtgtcatacctgtttcaggagtatggcggtggttattgaggcgttgctttatgacaggggcttctgagaacaaaagggatctggatgatattacttttgatttctttggtgaggcttacgatgcacttaacgataaaaacatcagtgtattcaggactggtgttgaacgattaacggatacctatacatctattaaaagaagttacaattacgggagcgacagaaattatctggatgaagtgaaagaatcaggttttagccatgcattcagtgattcattccattatgaattgagaaaattttttcgtgaaaccgtaaagtcaacagaatattctggcgaatatttccgtgaatctatggctattccattacatgtgtacagaaaaacacagagctctcgttttactgatttcagacaatttatactttcgcttttcagggtatggcatgtgttaaacgagtggaaagcgggactgggggggcctctgtcggccagccaggagcagactcaccaggcgcttatccgtgattttatcggcctgtgggagggctggagtatgggcaggatcattggcagccccgggagtgaagattctcccggtcgtctgatgtatcatctgcataacaccgccaggctgcttatcccgtcagtggttgccgataatgcttcttccgtgcgatatgctcatgacgttctctgtctctggtttaaccagcgccgattttcacggtactgggaggaagagtaccgctggcacagtttcttcctgactccggattatctgtctctggaggaaacagatccgcagtgggacatgttactcaggggaagcccctataaaaagaatgcggccttatccattatatttgccaatgccttatctgatttgcgactgttaatggcaggctatcttatcgcgcatttcgaaccgcaggaaaatgtaagcttagctgatcttgttaatcatctcattatgtctgaactatatgaaaaaagagacgctcacgatacgctgacgcctgcattcagatattctgtcgatatcattgatatgatactgagaattgagaacggtaatcttcatgcgaatacaaactggcacagtgagttatcagaaaccattgaggtcatgaactcttataatgagaggccttacattcccgggcgggtgtatacaggagtaaatgaggatgttgggagcctctacggagcattttctttgctggctataaagctcgcgagatcagctgaacaggttacgcagcgtgttagtgaggctctggctggcggtatattttcctattccagtaagatccgaataatatctgttcttcagcgactgaagcgggatccatcagtcccttatgaaggctatatcatttcagaagtggagtatgcaacgaatgtggtgttctttaataatgttctggataaatatattgaagtcttcagtcgtagcaaatcagcagatattgttgctgccgaagtagatcttgaacgtctcagaaacaccgataatcgtctgacaaaggaacttccgggagcattgtctgaagatactttacttaaaaacttcacattgtctcaaaattctgaatgtgatcgcaactggctggtgagatacattcctgttggtgtttccagggattatgttgccagggaaattaatcagaatgtctacggagatttcccctcgatatcagaagtgaagagaaatattcttcacagacttcattatttactgtggaaatctcaggctaaattaacgattgaggtcaataaactcgatacgctgttaatggaagtagtgcaacggtccgctgataagaaaaattacattctggtggtttatggttcccgctttagcgaagaactgagggagctggtccatcagccggaaaggcatgatacgtttagcctacatgttgatgtgcacgccagagatatccgttctctgcccttcagggtcaataactgtcttatttaccttgttctcaattccgaacaggaattttcgcttatggtcagtactgaatcgtttggtgaactcaggctgttcaggtatccggatggaacccttttcaacaccttctaccgcagcagcgacgatccactcgaaggtgtgatgaaaacgctctgggaaatggagatggaaatcaccgatacaccagtggcgcggtttgaacatcgctga

SEQ ID NO: 120132 - DNA, 909 bp, Enterobacter cloacae
ttgattaatgtttttggtcacctcaatccggacagtgatgccatctgtaccgccgctgtcacagctgactggctttccagacagggccgtccttcccgtgcgtggaggaccggtgaagcgaacccggaaacccgctatatttttgaaacagccggtctccccctgccaccccttctcgatttccccctgaaaggggaacgggtatggctggtcgattttaccgaaccggcgcaggggcctgctgaccttcctgagagtaatgtcatcgggattatcgatcatcaccggctggggggactgatcacgttactgccgccggaggtctggataaaaccggcaggcagcagtgcgacggtactctggtcgctgatggatgcagaaatgcgccgcaccatgcccccgactcacggcatcctgcttcttggtgcgctgctcagcgacacggtaaacctgcgctcacccaccacgactgcagacgatattcgcaccgccactgaacttttcgtgctgtcgggaataaaacgaaaagcttttgttcacggtcttctggccgctaaaactgatatcaccggacagacggccaggcagcttctgaataaagatcttaagaccttttcgattgcggacacagatgtgcgtattgcccaactggaggtgagctcagctgatcaggtcgctcctttgctggatgaactgcgcaatacgatggcgcagatggcggtaaatactggcgccgggctgatcgtgctgatggtaaccgatatcagtaaatgtttttcaacactctatttcgccggaccggagagcagtaatgccacttcatgctccttaccgggcatggtcagccgcaagaaacagcttctgccctggctcgagcatttcctcaggcaacgccggagacagccatga

SEQ ID NO: 120133 - DNA, 426 bp, Enterobacter cloacae
atgaaaatctatactcacgcacttgttctggttcaggggaaagaggatggcgttccccttctcgcactggcggcgactctgtcccgtctgcttgagatgaaaatcacgcttgcccacatctgtaacgactaccgggagatgaactatgtctcggacagcctgatggacgatgccgtctccagggatgttgtccaggcgaaggcgctgctcagtgagctgacatcctcggtggatgagcacgttgatgcccgtgagctggttaccatgcggcgtttcgaggatatacagaaatgcatcaccgacaccggtgtcgatcttgtgattgcaggacaccgtaaccggtttatgggcacgttgacctcacgttcagctgaatacgttaaccacctgaacgtggatgttctgattaaacacatttacgactga

SEQ ID NO: 120134 - DNA, 1290 bp, Enterobacter cloacae
atgaattttatactggaaaaagtcaccgctcgcgaaatacttgattcccgcggtaaccccactgtggaggtggatgcctggacttctgacgggttgatggctcgtgcatcagtgccctccggggccagtaccggttcgcgggaggcaactgagcgccgcgatggtgacccggaacgttttggtggcaaaggggtgcttgatgctgttaaggccgtcaatacagaaatctgtgatgccatcaggggaactgatgtgcgggagcagcggcggctggataatagtatgcgggagcttgacggcacggagaacaaaagccggctcggtgccaatgccattctgggtgtatcgctggcagtagccagactggctgcacaggtcacccgtcagccgctgtaccgctatcttgggggacttaatgccagtcttctgcctgttccgtgcatgaatattattaacggtggcgttcatgcccggggtcagggcgctgactttcaggagttcatgatagcaccgcacggtgcatcaacgctcactgaggcggttcgtcagggcagtgaagtctatcaggccctgcgtcagatccttgtgtcgagggatctctccgccgcggtgggggatgaaggcggatttgccccggccgtctcctcaaacagagagcctctggaattcatcgttcaggccattgaaaaagccggttaccgtccgggggaagacatcagtatctgtatggacccggcttccagcgaattttatcgtgacgggaaatatcatcttcgcaccgaacacagcgccctgagtgctgaagagatgacggattattacagggaactgatgaaccagtttcccgtaattctgcttgaagacggactcgcagaggatgactgggctggctggaaatatctgcatgacaaactgggcgggcgtgctgaactggtcggcgacgacctgttcgtgaccaatgtgaagtatatccgccgtggcattgaagaaaaccttgccagcgcagccctcataaaactgaatcagataggcacgctcagcgagacatttgacgcagtttcactgtgtcatgaaaacggatggggggcttttatttcgcaccgcagcggtgaaaccatggacacgtttatcgccgatatgacggtggcgctgcgtgcgggacaccttaaaaccggcgccccctgccgcggagaacgaattgaaaaatacaatcagcttatgcgcatcgagcaggaactgggcaacgaagcccggtatgcaggtataagcgcctttgttcgtcatctctga

SEQ ID NO: 120135 - DNA, 375 bp, Enterobacter cloacae
ttgagtcagctggcagcaattatgattggtggggccgcgggatgtattatccgttggtttttggggatgaaactcaacagttttttcccgtctcttccacccggaaccctggtagtgaatttgatgggagcatttattattggtggcgcaatggcatatttcattcgtcatcctcacgtggatccggcctggaaactgctgatcgtcaccggtctgtgtggggggctgactaccttttcaacattctctgtcgaggttttcaccctgctgcaggcaggaaattacacgtgggctttcacctccgtactggtgcacgtgatgggatcgctgctgatgaccgcggcgggtttttatctgataacgtgtcttatatga

SEQ ID NO: 120136 - DNA, 723 bp, Enterobacter cloacae
atgaacaaactgaatgacagcctgccaaatattatccctgacattttcagcgtgccggacttcacagattaccccgtatccgggatgccagggcatgcaccgcgtattttgatgctgtatggatctgtacgtgaacgttcttacagccgcctggctacggaggaaggcgcacgcctgctcaccgccatgggggctgaagtccgtatttttaatccgtcagggcttcccctgccagatgatgctccggatactcacccgaaagttgccgagctccgtgaactggtgcgatggtcggaaggaatggtgtggtgttcccctgaacgtcatggggcaatgaccgggattatgaaaacacagatagactggatcccactgagcgaaggtgctgttcgcccttctcaggggaaaacactggcagtgatgcaggtcagcggtggctcccagtcctttaatgcggtaaaccagatgcgtattcttggccgctggatgcgaatgatcaccatcccgaatcagtcatcagtcgccaaagcctggcaggaatttgatgaagaaggcaggatgaagccctcagcctattacgacaggatcgtggatgtgatggaagagctgatgaagtttacgttgcttacccggggaagaacagcctgcctggtggaccgctacagtgaacgtaaggaaagtgcagaggcactttctgcgagagttaatcagcgcagtatttag

SEQ ID NO: 120137 - DNA, 324 bp, Enterobacter cloacae
atggatattgttaaggcggcagatgcgctgaaggagctgggtcatccgacccggctcggcatcttcaaggaactggttaaatttggatatacaggcttgcctgtcggggagttacagaagcgtctcgatatcccggcgtcgacgctaagccatcacctgtcggcgctgttgtctgtggggcttatacgccaggaaaggcagggacgcaccctgtactgccagccacagtatgagcaactgagccagatcgtcggatttttgctggatgagtgttgcatgggcagcgcagccagtgtttcaacagttacatcaacccgtgagtaa

SEQ ID NO: 120138 - DNA, 1014 bp, Enterobacter cloacae
atgtccgcagaactgcaggatgtcgccagcatgtttgccttgttcgccgtcgaactgtcggctttatttttacttatcagtttgctggttggtgtactgcaaaggcatgttccgccggctcgtatcgaggcattgctcagtgccggccgcttcagaagttattttctggcggcgggcctgggggccatcacgccgttttgcagttgctcaaccattccggtgctgaagggactcatccgcgcccgcgccggatttggcccgatgatggtgtttctctttgcatctcctctactgaacccggtcattattgccctgatggctgcgacatttgggttaagcctgacgctgatttatgccggcgccgcgcttctggtatcacttatcgcgggatggttactgcagattctggggtttgataaatacatacgcagcggggtgtatgagggggaggctccctgccagacggttgaacgcggcagtcatgtgggcagtgaactcccctgctgtggcgaacgcctgtccgtaatccgttcccgtcaggctgacatgacggcaactgtaccggagaattgttgtaaaccgcagtctgacgttaatgccttcccccgccgttacggcggcttatggcgtgatacctgggctgacttcagaggtgttttaccctacctgatcgccgggatagctatcggaagtataatttatggttacttgcccacgacgttacttgaacggtatgccggaccggcaaatccttttgccattcctgttgcggcaattattggtgtgcccctttatatccgggctgaagcggttattcctctggcggctgcattactggccaaaggggtgggggccggtacggttctggcccttatcatcggcagtgcaggtgccagcctgacagaactgatcctgttgcgcgcccttttcaggttcaggctagtggcagcattcgtgctggtcattatttcgatggcgataatggcaggctacacagcttatctctttttctga

SEQ ID NO: 120139 - DNA, 498 bp, Enterobacter cloacae
atgtttcacccgtttgatattctcaccctagacaatggcgccaggctgatatttactccctgcccgggaaccagaggggtgtcccttgctgattcattaaaatccttaaaagaagccggcgcacaggctgtaatcaccatgatgacgctggctgaactcagtgaaaatgaggctgatgccctcccttcactgtgcgctaacctttatatggactggtttcacctccccgtagaagacagctgtgcacctgaagccccatttgaacaggcatttgcccgggaaaaaacgaatctgctggcgatcgtcaggtccggcggaacgatggttatccattgtcatggtggttctggccggacagggatgatggccgctatcctgatgctcgagtcagggtatctgcctgctcaggtgaaaaaacaggttcagcaaatcaggccaaaatcactgacttcgccggtgcaggtcagttatcttaacaggcgatacggctaccagtaa

SEQ ID NO: 120140 - DNA, 510 bp, Enterobacter cloacae
atgataagtaaaacatacaatgtcctgttcctgtgctccgggaattcggcacgaagcctgtttgcagaagtgctgatgaaccagctcggcgggggaaaattccgggcattcagcgccggtactcaaccagccagttcacctcacccgctgacgctcagggtgcttaatgatcagggattcagtactgaatccctgaaaagcaaacacctgcaaaactttcaacatccggatgcaccgcaaatggatttcatttttacgctctgtgaccagatggcgggagaaggatgtccggtgttcccgggtggccccataacggctcactgggggggcagggatccggcttccgcagagggtaccgataaggagaagtaccacgcctttgtggaggttgaaaaacagatagccacgcgcatccggctttttctgagccttcccctggataaaatcgaccggctttcattacagcatcagctgcaggcaatgggtaataccggatctgacgaacattaa

SEQ ID NO: 120141 - DNA, 429 bp, Enterobacter cloacae
atgagcgcaattacgatttatcataacccggcctgcggtacgtcccgtaataccctcgagttgatccgcaacagtggtgtggagcccacggtcattttatacctggagacgccgccagcgcgtgctgagctggtcaggctcattgctgatatggggatcagcgtgcgtgccctgctgcgaaaaaatgtggagccttatgagcaactgggtctggcagaggacaaatggagcgacgatgagctgattgattttatgctgcagcatcccatcctgatcaatcgtcctgttgtggtcacccctctgggtacccggctgtgccgtccgtctgaggtggtgctggatattctgccggacgcacaaaagggagcgttcagcaaagaggacggcgaacaggtgattgatgcccagggacagcgtgtcgtgaagtaa

SEQ ID NO: 120142 - DNA, 1290 bp, Enterobacter cloacae
atgtggctggctgcagctatttttattctgaccattgtactggtcatctggcaaccccggggactgggaataggctggagcgcgatgctcggggccttacttgcactgattactggtgtggttcaccccggtgatattccgaccgtctggcatatcgtctggaatgcgacagctgcattcattgcggtcatcattatcagtctgttactcgacgaatcagggttctttgaatgggcagccctgcacgtcgcacgctggggaaatggccgtggacgatggctgtttacctggattattttactgggtgctgcggtcgcggcgctgtttgccaacgacggtgcagcgctcatcctgacgcctatcgttatcgccatgttgctcgcactggggttcagtaaaggcaccacgctggcgttcgtcatggcggcaggatttatcgcggactccgccagcctgccgctcatcgtttcgaacctggtgaacattgtctctgcagatttctttaagctcgggttcaatgaatatgcatctgttatggtgccggttgatatcgcagccattattgccaccctggtgatgctgcatctgtatttccggaaagatattcccgcaacctatgaaatttcgcgcctcaaaacgccggaagaggctatccgtgatcggagtaccttccggacaggctggggggttctggctcttttgctgcttggattctttggcctggaacccctggggatccccgtcagtgcggttgccgccgtcggtgctctcgtcctgtttctggtcgccaaaaaaggacatgcgattaataccggaaaggtgcttcgcggagccccctggcagattgtgattttctccctgggtatgtatctggtggtctacgggctgcgtaatgccggactgactgactacctgtcagctgtgcttaatcagtttgccagccaggggttgtgggtggccacgctgggcacgggcttcctgaccgccttcctctcctcgatcatgaataacatgccaaccgtcctggtgggggcactgtctattgatggcagtaccgcgaccggggtgattaaagaggccatgatttacgccaatgttattggcagcgacctggggcccaaaatcaccccgataggtagtctggccaccctgctgtggctacatgtgctggcgcagaaagatatccggatctcctggggatattacttccgggtcggcattgtaatgaccctgcccgtgctgtttgtaacgctggtagccctggtattacgtttatccatttcgttgtga

SEQ ID NO: 120143 - DNA, 1767 bp, Enterobacter cloacae
atgaattatctcaacgcgatcccgaaatttctcttttttacagggaaagggggggtcgggaaaacctcgctttcctgcgcaacggctattcaccttgctgatgacggtaaacgcattctgctggtcagtaccgaccccgcgtccaatgtaggccaggttttcgggcagcagattggtaataccctgacttccatcacggctgtccccggactcaccgcactggaaatcgatccgcaggcggcagcgcaacagtatcgtgcccgtattgttgatccggttaagggagtcttgcctgacgaggtggtccgcagcattgaagaacagttatccggtgcctgcacaacagaaattgccgcttttgatgagtttaccggtctgctgaccgatgacgtgttactgaatgattttgaccatgtgatttttgatactgcccctacaggacacaccattcgcctgctacagctgccgggtgcctggagcagttttatcgagacaaatcctgatggtgcatcctgccttggtccgctggccgggctggaaaaacaacgggagcgctacgcgcatgccctgtcggtactggcagacggggaaaagacgcggttaatcctggtggcccgcgcgcaacagtcaacgctggctgaggttgcccgcacgcatgatgaactgttgcatgtcggtctgaagcaccagtacctggtcataaacgggctcatgcctgccggagaagcctcacaggacagtctggccagcgcactgtatcagcgtgaacaacgtattctttcccacatgccgcaggtgctggcatcgcttccgacggacaggttaagccttcagcaggaaaatctggttggcgtgacggcgcttcgccgcctgctgacgggaaaaaataagccatgctcactgccagcagtgaaatccgtgtcagagcctctctctgtaccgtccctggaaatgctgattgaggatattgcccgtgacggacatggtctggtgatgttgatgggaaaggggggcgtgggtaaaacaacgctagccgccgcggtagccgtagccctcgcagacaaaggatttgatgtccatctcaccacatcggatcccgctgcgcaccttgaaagcacgcttaacggacaattgcctcatctccaggtcagccgtatcgatccgcataccgagacagcccgctaccgggaacatgttcttgccaccaaaggaaaggatctggacccacagggacgggcgctgctggaggaagatttacgctccccctgcacggaggaaatcgccgtattccaggcattttcccgggtgatccgggaagccgggaagcgttttgtggtcatggataccgcccctaccggccacaccctgttactgctggatgccacgggagcctaccatcgggaagtggttaaacgaatgggtgaaaaagggcattatctgacgccaatgatgcagttacaggatcctgagcgaacaaaaatattgctcgtaacgctgcctgaaaccacccctgttctcgaggctgccggcttacaggaggatttacgcagggccggtattgaaccctgggcatggctcatcaataacagcctggttgcgacagaaacaacatcccccctgttgctcacgagagccgcacacgaagctgctcagatcgataaggtcaggacggagatggcatcacgcatggcgctgatccctctccagcaggaagagccaacaggtactgaacagctcaaacgtcttacccgtcaggctggaaaataa

SEQ ID NO: 120144 - DNA, 366 bp, Enterobacter cloacae
atgaaaacactgtcagtgtacgacccggcactttgctgcagttctggcgtgtgtgggacggaagtggaccaggctttagtgtcattttccgcagacgtcacatggctgaaacagcagggtgtgccggtggaacgctttaacctgtcgcagcagcctctggcatttgccgagaatccgtcagtcaaagcctttcttgagcgctccggggctgaaagcctgccgttaattctgctggatggtgaatttgtcctgtccggtcgctacccgacacggcaggatctggctcgctggtttgagattaatcaggagaaaacaggcgtggcaccggagaaaagctgctgtggtggcaaaacgtcatgttgctga

SEQ ID NO: 120145 - DNA, 480 bp, Enterobacter cloacae
atgaacattctttttctgtgtaccggtaattcctgccgatccatcctggccgaagcgacatttaacgcgctttcaccagcagcacatcatgcctacagcgctggcagccagccaaaaggagaaatccatccccgctctcttgccctgctcaggaagaaagggatacctgcggaggggtattacagcaaatcgtgggacaacgtcccggtaaccccggatgtggtgatcacggtgtgcgggaatgcggcgggtgaagcctgtcctgcgtatctcgctccggcggtcagggcacactggggagtcgaggaccccgataaggcgaccggaagtgaagaagagatagatgctgcgttcgaacaggcctggcatattcttcgtcgccggattgaagcctttctgttgcttgcgccatcggtcctgtccggtcctgaagagcgtcttcaggctgagctgaaccggatcggtgaaaccattttttaa

SEQ ID NO: 120146 - DNA, 354 bp, Enterobacter cloacae
atgcccccgattaccgcgcttcagcttttcaagaatctctcggacgaaactcgcctgaaaattgttctgttactcagggcatcaggagaactctgtgtttgtgagctctgcggaacgcttgaggaatctcagcccaaaatatcccgccatctctccatgctgcgggaaagtggactgcttgttgaccgccgggaggggaaatggatccactaccggctttctgcgcatatgccagcctgggcggcagccgtcattgagcaggcttatttaagccagaaggaggacatttcgcttctggccgggcggatagcccgtaacagcgcgacaaccggtggcagagcggtttgtctttaa

SEQ ID NO: 120147 - DNA, 174 bp, Enterobacter cloacae
atgcgtatcgaaaacgtcacaggctggttattcaggctgatcccggaacgcgtttttgacgcgttatccgggatcgtatgcgcagaaatggatggtattgtgcatgatcctctgccggaagagacagagcggaaggccacacgccccgcaacaggacagatgcggcgaaaatga

SEQ ID NO: 120148 - DNA, 543 bp, Enterobacter cloacae
atggtgcaacagacagactcactgccttgcctgatgaaggcatggaagctgcacgaacacgaactttattgctggttactcagacaaacgcgtaatcaggctgataccgatgatctgatacaggagatctttctcagggcagtacggcaacagcggaaattctgtgccatcgtgaataccagagcctggctgtttgaagttgcccgccatcttgtcattgataaaaaccgccggcggcgcgcataccagccgctccatgagggtatatgtataccggataacgtcacagaaacagtcgactcactcgccgaatgtctgccccggatactcaataaaatgacagaagcggatcggaatatccttatactctgcgatctggaagggatgaaacaggctgattttgctgaccgaaagggtctcacgcttgctgcaaccaaatcgcgattattacgggccagagcaagattgcatcagaaactctccactgaatgccaggtcagactggacgagtccggtcgggtatgttgttttactccccggtga

SEQ ID NO: 120149 - DNA, 1002 bp, Enterobacter cloacae
atgttccagattttcagtgattttgccacctggctggtctatgaaaggcttaatctcattccgtcaaccaaactcggggacgctctccatttttttgtcgaagacgtgagcaagattttcgttctgttgctggtcttaatctacttcgtggctatattgcgggcctcgctggacgtcggtagggtcagagattatctcgcgggtaagcaccggggggcaggatattttctgggctcctgctttggtgccattaccccgttctgctcctgctcgagtatccctgtatttctgggatttacatcagcgggtataccgctcgggatcaccatggcctttcttatcacttccccgctgatcaatgaagtcgccgtcctgcttctggtcagcctgctcggatggaagttcacacttgtttatattgttgtcggaatggctgttggtatagctggcggggcttttcttgatcatattaagggagaacgatggttagccgactttgctgctgacgccctcagggacgggcagcaacatccaactgatgggatccgcctctccgccgggacacagcacatgtctctctcaaggcgacatgcctttgctaaagatgaaacgctcaccatttttaaacgagtctggttctgggtcattctcggggtcgggattggtgcggcgctccatggatttgtgccggacggatggatcgcgttgcatcttggtgccggtcagtggtggaccgttcctgtcgccgtactggctggcattccactctattccaatgcgaccggtgtcatccccgtaatggaaagcctgataaccaacggcctgccagtgggtacagcactggctttttgcatgagcactgtggccgtcagcttccctgagttcgttctgcttaaacaagtaatgaagtggcaattactttgtatcctgctgctgatgttgctgaccgcattcacactggttggctgggtttttaacgtggtattcccactggtttcctga

SEQ ID NO: 120150 - DNA, 231 bp, Enterobacter cloacae
atgaagcatgtaaaaatcctgggtacagggtgttccggttgcaaaacaaccctccggcttatccggcaggtcgctgatgagcgtggcgtcgctgttcagcttgaaaaagtggagtcattacctgaaataatgaaatacaaagtgatgtcgacaccggcagtcgtcatagatgacatcgttgtacatgccggaggaataccgtcaagagatctgatcgaaagctggctctga

SEQ ID NO: 120151 - DNA, 204 bp, Enterobacter cloacae
atgcataacccccttatgattgatgaaattctggcacttgcccggcttgccaccctggcatttgagaagcccttaaaatatatggatgacacagatgctgaagtcattgcccgttttaaaaaaacgatgacccctgagcttattgagcagatgtgcatccggatccttgagcttgaagcgaaacgtcagagcgcgaacgaataa

SEQ ID NO: 120152 - DNA, 846 bp, Enterobacter cloacae
atgtcagaaattaatgatatggaaaacaccgttattgcctgcgtggatggttcgtcatcaacacgctccgtgtgtgagtatgcggcctgggttgcagggaagcttgacgcgcctcttgccctgctgcatgtgcttgaaaaaaatgaacaaccggcagtttctgacctgacgggggctatcggtattgacagccgggagcaactgacgcaggaacttgtccggatagagggggagcgtaaccgtctgctgatgacgcagggacgcgccattcttgccggatgcgcagaactgctcagtcagactggtatcccggatgttcagcagcttcagaagcatggcgcactggatatcatcctggctgacctgaagggtattcgtctgatggtgctcggccgccggggagcacagcacccggttggcagcaatctggagagcatcatccgcctgcagaaaaagccggtaatgattgtacctgaagctttttctgtcccttccagagccatgtttgcgtttgatggcagtgaggaaagccggagaaacctgcgtcgactgacgctaagccctctgctgcagggcatggagtgtcatatcgtgatggttaacggggatgctcataccctcgaagaggcgaagcgtagtctgcagagcgctggcatcagcgcgatatcccggttagcggaaggacgttcggtcacggaggcactctgcgagtatgcctcggacaacgatatggatctgattgtgatgggggcatatggccattcttccctgagacgctttttcatcggcagtaacaccactgcgatgctcgaacagacgcgtgttcccctgttaatgctcagataa

SEQ ID NO: 120153 - DNA, 207 bp, Enterobacter cloacae
atgtctacatttttagctgcagtatttgctgtaatctttaccctaatcggcatcggccacttcatctggacaatcgttgtcgcataccgtggtctaacctggtttttgaccaattttgacgaccttccacatatctggaagcgaaacgggcgatactatcgccgtttcatactccgacgcatctggaagcgtatcttcagtcactga

SEQ ID NO: 120154 - DNA, 294 bp, Enterobacter cloacae
atgagcaatcaagcacacctgacgctgatccactcgctggtcaaaaccaatgcgtttaacctgtacaccctggccagcacagagagctggcagaggccttcggtccgggacatcgccgtggtccgggggctgattccactgaccgacgtcgagctggcccacaggctggatgtggacgaacgcaccatccgcaagtggaaatccggccagacacggatggtgtacaccacctggtgctgtctgtgctggctggccggactggggatgccgctcgataacattatcagtgactga

SEQ ID NO: 120155 - DNA, 1134 bp, Enterobacter cloacae
atgcacttttatgtggatgaaaccggtcataccggtccgaatctttttgaccgcacccagccagtactttcttatggcgtcctgtcttcacccaatgacctggacaaggttgcagaaactgaactggccagtttgcgaaacaaactgggtgtacaacgtcttcatgccgctgaactgggcatgtaccgccttgatgaggtggtcgataccctgcttgttctgcagaagaaacaccggatacggtttgatatctggcaggtggttaaacgggatcacgccattatttcattcttcgatcaggtatttgaccagggactgaatccggttgtgccctggactgcctactggaccccgctgcgctatccgttgctgctgaatctggccattctttttgatgaagagctggctgaaaaggcatggcgtgcccgtcttgaggcacatgatgaacgttcttcctgcttattcagtgaggtgtgtggtgagctgcttcagcgcgttcacattctgagtgatgcccgttcagttgaactcattacagatgccctgtcctgggcgatggtcaactttgatgagctggggtacaactgcaaaaccaacaaggaaaagctgcagatcatgcccaacatgatcggattccagtcagttctgcacgggatttgcgcccgtctgggggcaccgaaccggaaagccaatatcattgttgaccagcagtcgcagttcaatacaactcagcgggagctgaacgagttttactaccagatacgcgaacagccgtgggagcttggcccgggtttacccgtcatggacatgaagaatatgccggcaaaaccgctggtcttccagtcgggcacgaaaagcgcagggctggagctggtcgatatttatctctggatcttcaaacgctacatggaacagaaggaactgaccagaccccttacccgccttctctacaccaatctcaataccgccagaactgacagtgtttccctgcagtctgtcgctaaacgatttaaggagttttttgaaacactgcctgagcctactgcagaaatgatgcaaaaagggcgcgaatacaaggagcgggaagaagcccgtcgcctgcagcaccggattcctggcctcagtggctcctga

SEQ ID NO: 120156 - DNA, 765 bp, Enterobacter cloacae
atgttgatcctcgattgctcctcacgctctaaggcgttgaatacactgtctgccgggtttggctgttcccctgaaaaccttaaaaaggtgcttctgtcgctcgatctggagcatatctacgaaacagatcaaagcattatggtggatgcaaatcagtatctgaaagattatgtcagcgcggaactgggcgaaccaggtcccttctcccgggctttctggtttcatggtacccggacttttgccgggaatactttcccgaaggggttacttgcgctgaatcattcaaaatcgcttgcggtaaagatgctggtagacctggctccggatgagttagtccgtaaacgcctgcggcagtggtttgaaacgggaggtgttccggatgtgctgtttcagctcagaaccggcgacagcatgcactgggggccttatggccatctggttcgggaattgcattttcatgcccgagaaaacggactacacgattatctccgcttgcctgagttggtagaggatgtctgtaacgcctacctgaagcagtatggtcacgatcttacggcctattaccttaaggtgctgcatccctgcattatctggttccaggcggatatctcttatgaaaaaggagcgattgaaacggccctggcatatgcatatacgtcagtccgggcgcttccgccggactgccatgcaactatcggcatcgactgtgaagggaaatcggtgtccaggtcgtccattgctaaaatcgagtttctgccgccctag

SEQ ID NO: 120157 - DNA, 501 bp, Enterobacter cloacae
atgggaaattattcagattttgagaccgaatttgttcagcgaacactggcacttatcgatcagtataacgaaatgattgaagtgcagggcaagcccttcagggagcagtacaactacacgctgaccctgaattgccttctgggtctcatcgtgctgccgaaagagagggcgctctctttcctgcccgctgaccgtttaacgcagcagcttaaaacaagcatggggttacaggattcgcagctacccggaccggagatgactctgcgtactcttatccttaaaatgaggaactctgtggctcatttcagcgtccaggttgtatcagtcagcgaggagcgtctcgtcgatctgattgctttcagggatgatcctgaggatgagaatgcctacgccactttcagcgccccggaacttttaccctttctgaaatattacgcagcgcagctgctcgggaatatggctcgtcgtcgagcccctgctgttaacgcagtggatttgtaa

SEQ ID NO: 120158 - DNA, 255 bp, Enterobacter cloacae
atggatgagaaagaagtgaagttttcactcagctatgagttgctgacgcaaaagacagaagaagaaatcaggaaatgcgaccttcgccaggacggcccgtactacgtccaggagctgaacagggcctcagacattctccggttctggtttatcctcgcgatgagcggatacccgcgcctgccggatatggagcgcattgacgctgacaggcagcgccttgaggagcttatcagctgcggaaacagcgcagcatga

SEQ ID NO: 120159 - DNA, 651 bp, Enterobacter cloacae
atgaccacggccaaaacccggcggccgtcgccgctgcagaaaaggatactgattgtgctggccgccctcggtgcgaaacgtccggggccggtggccacgcgggatatcgagcgggtgctggagcagggcggggacgccccggtgtacgggccgaacctccgcgcctcctgccgccggatggaagccgcgggctggctgcgcaccctgcgcgccccgaacatgcagctggccgtcgagctgacggacgccggccgtgtgctggccgccccgcttctcgcagacgaacaggcgcgggtcctggcgcagcagcgtgccagcgaggtgaaggtgcttcccctggtttcggccattccggcaggcagtccggggccgactggtgatgatgttctgctcatgattgatggcgtcgcacgtaccgcataccgtggggattttgtgatacgcctcgacgggaccacttgcctgcagttgtgggacactggtggcaggttaacccgcctggaaggcgatcccctgcaggttgccagctggctggaggcgtgccatgacgctggtattgccgtcggggtgcaggtcaatgagagcacggtaccgcacgacactgagcacgctgatgctgtgcacaaacctaccggggagatacatccgtga

SEQ ID NO: 120160 - DNA, 771 bp, Enterobacter cloacae
gtgaaattcagccggacagaccgtgtgcttcacgcctttgcagtggtggcctttgccgccctgatccttattattctttttggccagacagtcaaagacagtggtccggccgagtggctctccgccgtactaaatctggtgatggccggggctgccgtcgctgcctatcttaccgcgcgcagctggttgcctcagctgaccactcaggaaggctacaaggaggcgatcgccctggttaacgagcagtacatccatctgggtccgtttaatactctgacgtcggccgctgaaaaggtcatgaaagccttccagaaatataacgaaaccttgcaaggtgacgatctggaagcctacacggaagcggtaaatgaactaacccagcttctgtacacagcagattcagttcagcagtcaatcagggaaatacggttccggctgaacacctatggtctcaagcctgcggaaccttacgctgccaagattgaagccatgacaaccgcctttgagcaggtgcaaggggtgggcggttggttggtaacaaagcttggagaaaatgtaacccgtcattatcgggcaaggcaaccgccgctgcattactacggccttaactatgaagcattaattcttggtatgaggaaggcagaaacacaagagaccatagaatccctgcatcagctttttaccgctgccctgaaggaaatggtcgactgccatgatgcaatatttgcggggaagcccccgatcggtgaactgttcaccgtccggaaataa

SEQ ID NO: 120161 - DNA, 339 bp, Enterobacter cloacae
atgaaaacagaagtcagcgaccacagccagcgtaatctccggctgaccatcactgaggagaaaaagatggaactgtttagctttctgcggggcagaaaaagtacattcaccggtacagttcaacgaactgcgcatgtgatgaccgccagcgcgaacgggaatgccttttttggtgtcctgcttggggaagaatggctgcgggtgtatacaaacactctctcactggcggaatccatcgcgtttctgcggtcgggtgatgtggtgagtatcgtggtacaagggagctttaaagaagacgggcggacctggtaccgacttatcagcgtcaaaccggcctga

SEQ ID NO: 120162 - DNA, 507 bp, Enterobacter cloacae
atgacgcgagatctaaaacgacgtatccatgccttccgtaatgccctgatgctcgcggccgacacacgttcaaatgaatgttttcatatgaaccgctggaatgagctgaacgaatttccccacggttgctgcgacctggccagcaactttctggcgcagtacctgaaagacagcaaccctgccctaaagccggttgtcctgctgatgaaaacgactaaagacttccgtgataacgaaaattcaactatcgaggcacatgtaattctggaactggatggctggtatatcgatctcactctgaaccagtttgcggagtaccagcatcgggtagtgattcagaagaacaacgaaacactgggtagtctgctgagaaaaaacaaggaatacggaggctccgttacagagaagaaaattcatctcgacagcggcctagatgaagacggcagcgaactttatgaatggctgcacgatactgcagaaagcctccttaatggaaaaacagtttga

SEQ ID NO: 120163 - DNA, 612 bp, Enterobacter cloacae
ttgacagggcaaggtaacgtccatctcatcgtcacctgcacgcgtcgaaaaaccgtggctgcaggtgatgcggtttttccggatgagcgcgatgccggcagggcttacgggctctggatggaaagactggcgcaggcccgtcgcggatcgccccccatgaccgccggcgagctgtatacaggccagcactggagcagggcagctgtggctgcggcgcgtagtggtgctgagatatggattttatccgcaggcctggggctacttcatatctctgatcccgtggtcccgtatgaagcgactttctccacgatgccgttctgccatcgcactcactgggagcggctgacaaggcgtccaccttcggaacgacggtgtacctccctgaagacgctgatgcagtcaaggcctgccgatcggtttgtggtggcggcctccccgctttatctgcgtgccgttgagtcagacctgctcgcaggcatgaaagctctctgcaatccggaacaactggcagtggtcacgtcaaaaggctatcagggaagcctgaagggcaataccaagttggaaaaccccggcagaaatcaaagaccaataccgcagtgccagtattcttaa

SEQ ID NO: 120164 - DNA, 360 bp, Enterobacter cloacae
atgcagattaaaccaattaaaacagaacaggactatgaagccgcgttacgcgctgtagagcctatgtttgataacgaacctcctgccgataccccggagggagactttttcgaaatcatgtgtgtgctgattaatgaatacgaaaacaaacactttcctatcgaagccccagatccgattgaagctattaaattcaggatggaacagcaggggctgacggtaaaagatcttgagccggcaattggaaaatctaaccgtgtctatgaagtgcttaaccgcaaacgtaatctgacgctgcccatgatcaggaaattacattcaatgtttggcattcctttaaaaagcctcgttggaggataa

SEQ ID NO: 120165 - DNA, 498 bp, Enterobacter cloacae
atgatgaaacggaagttctgctcactggtcatgttcgttgtggcgttttcggccagtgcagatatcagcggccggattgtgcgcgtgctggacggggataccgttgagatacttgagccaggaaaccgactgacgcgcgttcgcctggctggcatcgatgcgccggaaaagagccagccctttggccagcgttcacgtcaggaactctcatcgatggtggctcagcgtcccgtaaccgtcacgggaagtgaaacggatcgctatggacgcctgctggggaccatatggcttggtatgacggatgtaaatgccgaacaggtacgcaaaggcctggcctgggcataccggtaccacgtaaaccccgtccggccagactacgcagttctggaggccgaagcccgccgtcagtcagtcggactctggtcagaaccgggtcagacagagccgtggcgctggcgtagtctgcatcaggatgagcaaaaaacgaataaaaattaa

SEQ ID NO: 120166 - DNA, 498 bp, Enterobacter cloacae
atgactttcaaattaaccgaaagcaaactggaaattcttatcgatacgttaaatgccattatatgcggtgaagtcaatattacgcgtgagcagcgcgaaaatatggtcaggacggttgcaaccctgggtgggttaacagaacggcagcgcctcattacagctgaaaaagaagccagaaagcaggtaaaagaagaaaaggaaaaaaaaccacgccttccggatgaagtttttccgcgttccggaaaaccgtgggcaccggaggacctggaccttattcattcgattatttcagatattccggatgacagaatcgatgatcatatactctggctgtcgaagaaactgcagcgcacaccttatgccatcaccctgaaaattgtcagtgaaggccgtatgaacgaggaatgggctaaagggtggaagcctgccgcaaaatctattcgtgaagatttcgccctggtcagggcaaaggcatcagcaagcaatgcaaataattaa

SEQ ID NO: 120167 - DNA, 771 bp, Enterobacter cloacae
atgaatcattcagtacccgacgttcttcccagtatccggaacgccagccagctcagtcccgcagctctcgatatggtcaaacttctcgcacttctggccatgattatcgaccacatcaatacggtgtttctgtcgccagccttgccggtgatgtatgcgcttggccggatggccttccccctgttcacgcttatatgggcgatgaacgtacagcgcaccccggaacgacttcagaagagagccaatcgtctgtggatctgggcagtcatcacgcagccggtgttcagcctggccttctggcatcaccagccctggtgggccctgaacattctgttcgtgtttgccggcgtcacgcagctgattgccctgcagtatcagcacggccggaaaggaatgtttgtgggatatctgctcctggccctcatgatttggccactggagccggcaagctacgggctggcaggaataacgctggccatcagtatggcaaccgtttctggcaacgaaacacacgaagtgcagcggctggcggccatcactgccgtgctgtcactgatttgtttaaacgggttatcgcatctcctggatctgcccgcagaaacattattactggccacgctgcctactctggcatttcccctggcagtggtttccttctgcaggaaaatctgtccggagggccgcaagcgtttcatgccgcgtaatttcttttattatgcttacgccggccacctggggattattggtctggtacagtctgcttttggctga

SEQ ID NO: 120168 - DNA, 327 bp, Enterobacter cloacae
atgaaccatgaaagtgatctgacgaaccacggcttcagtgataaggacattgtccggctgcgggccagttcagctaaaacgggtacggagatggataccctgctgaacgatctggcaaaccgttttaaggccctgatatgggtgctgtcagtcatgttactgatttttgtggccacacttttggctggctcgaggatgcatgccatttcctttggcgtggctattcttgttcttggcactctgtttacgatcaccatgcctttgaagctggcctataaatcatggcattaccgccggaatctcatttcccagcgtcatcagaagtga

SEQ ID NO: 120169 - DNA, 471 bp, Enterobacter cloacae
atggtcggttatgtcatctcaggaattaaagtggtgctggcaggtatgcagggcgcatttggcttcgtgctgacttcctcaatgacccccgttggcgttcttgccggggctattctgattgtcgactcggccaacacgataacccgtgaagttggtcgtcagttcctgaatgaacctgacacgcagggtatgtttggtgatggtgccatgaacatcgctaaattcatgggatttgaacgatcaacagggttagggatatacaacgggatcgcgcttgcaggcaatatctacagtgtctatggattaatggccagacctggaacatggcgtctgtttaactatatcagcaccgatttttaccggaaaatcgacaccatgtcccggggtaaactgacaatgaaaattgtgggatggggggtaaaggctaaggttgttttcgatctgatcacttctgatgacgctgggaaatga

SEQ ID NO: 120170 - DNA, 525 bp, Enterobacter cloacae
atgaatggaaaactttttaaaagcgcattagtttgctcatctttgcttttaggttggcaggcgcacgcggggaacggcaatggtactgtacactttacaggcgaaattattgacagcacctgtgaggttactgcgccaacacaaactcaaaccgttgaccttggtaaagtcaataaatccgccttttctggtgcaggctcgacggcttccgtacaggctttccagatcgatcttgaaaattgccctgatacatataaaaaagccaccgctcgctttgatggtacagaagatggagacggttaccttaaactgaacgctggtggagctacaggggttgccgttgccatctacaaccgtgctgacaacaccttgctgaagctctacaaccagtcagtcagtgcagatatcgacgctgatggcaaggcgacactgccgttcatggctcgctatattgctacctccgcaaccgtaacgcctggtgtggcaaatgcggattctgaatttactatcacttacagtaattaa

SEQ ID NO: 120171 - DNA, 684 bp, Enterobacter cloacae
atgcgcaggcgttttatcgacatttttattattctctttttagtcgtgtgtgcctctccctcctggggtgggattattatcggtggtacgcgggttattttccccagcaataaaacagataccactatttctgtaattaataatgatacttccttaccctatctgattcaggcatggattgatccttttttagccacagagaaaacgaaaccaccgtttaccgttattcctcctgtttcaaggctggagccaaaacaggagcgcgtattgcgcattattaaaacaaaaggcgatttacccaccgagcgggaatctgtcttttggctgaatgttaagaatatccctccaacgccggacaaacagaacagcaagctggaaatcgcgattaaaacgcgcattaagttattctggcgccctgccagcattactgaaaagcctgaaaccgccagcctaaaagtcatctggcgcaaacaaggcaataccctggtggttaataatcctacggctatccatatcaacgttattgatgttgctgtagacggcaaaccgctggatttggcgatgattaagccctttgagacgctcaacattcccttacccgctggcgtcgcgggtaagacactcacctggcatagcatcaatgattatggcgcgataagcgacgtcatcaaataccccctttga

SEQ ID NO: 120172 - DNA, 2478 bp, Enterobacter cloacae
atgttatccctggtgtcgctgtgggtcagcggcacgtattccgggcacgctgctggtgaaacctttaactcacgattgttagaacttgaacatccggtcgacattgatatcagtcagtttagccggcccgataatctccctgaaggggattatcaggttgatatttatatcaacgagcgcttttttgagcgccgtgaaatccatttttttcgaacaaacaacgagagcgcactccagccctgtttccgcgacttaaaaaatacgctggctacgtttggcataaaagtggatgccataaaagcactggctacgattaacaccagccgctgcgagcccgttcccccgcttacgggagctacatgggttctggatgacgaaaagctcgcgttacgggtctctatcccgcagatttatatggattcttcagcgcgtgacgctattccgccttcacgctgggatcagggtattaatgccctgatggtgaattatgatttttcaaccacccagacgttgaaatcagactatgacagtgacgatctgtattatctgaacatgcgtagcggtattaaccttggcagctggcgacttcgcaactacagcaccctcaatgcggtaaacagcaacggcagttatcattctgcgagtacgtatttacaacgtgatattgccagcctgcgaagccagataatgatgggggatacctggacggcaaatgatctattcgatagcagccaggtgcgcggcgtgcgcctgtacaccgataatgacatgctgccggatagtctgaacggcttcgcacccgtcgtccggggcattgctaaaagtaatgccgtcgtcaccattcgtcagaatggctacattatctatcaatctgctgttcctcaggggccgtttgccctgaccgatctcaacaccaccagcagtgggggcgatctcgacgttacgatcaaagaagaagacggtagtgagcagcattttacgcagccttatgcttccctggcgatattgcgacgggaaggccagacggactttgatatcagcattggcgaactgaacaacagcgatcgctattcacctgatttattgcaggctcagcttttacgcggcatgcaagggggaatgacgctgtatggcggcacacagttagctgagaattacactgccatagcggctggtattggtcaggatctcggcgagatcggggcgatatcgatggatgtcacccatgcggcgtctcgttttgtcgatgatacggagcaggggcaatcctggcgttttctctattccaagacgttcgatgtaagtaataccagcctgcgaatagtaggctatcgctattcaacggaaggattttataccctggatgagtgggcttcccgcaggagcgatagcgagacgttctggcaaacgggtaaccgcagaagccgtctggagggaacgtggacacaaccttttgcgcaggggtatggaaatatttacctgacgctgagccgtgaacagtactggcgaacggataacgttgaacggctgatccagattggttacagcaacagctggaaacagatgacgtggaatgcgtcatggaactataccgatactgcgaatcatcacgatggggactgggaaaaggatggcgaaaacgaacacgttttcatgctgtcactctcgcttccgctctcccagtggttaccgaacacctacgccaactataacgttactggcaacaataaaaacagcgtctcccatcaggtaggcctgaacggaaggctgcttcagaacaacaacttgaactggaacatacagcaatccgttgatgaaagtggcggcagtacgggggggaatgcgggactggcatgggacgcggcttatggctccatgaaaggtaactatgcctggagcaacgaaacccgaagtctcaattatggcgtcagcggcggcattctactgcattcagaaggtgtcaccttctcacaggaaatgggagaaaccgtcgcgctggtgaaagctccaggagcggcgggcctggcggtggaaaacagcagcggtgtcgcgacggactggcgcggctacaccgtaaaaacgcagctgtcaccctatgatgaaaatcgtatcgcaattggcgacagcgactttgcctctggcaatgttgaactggaaaaaagcgtccagaatctggttcccacccgtggagcggtagtaaaagcggaattcgttacgcatatcggctaccgcatccttttcagcgttcatctcagcaatggcaaacctgcgccttttggggcaacgggatcggcaacgctggacaccggaagcgttacgggcattgtcggagaagagggcgaactctatctctcaggcctgccggaaaaggggcaatttacgttgacgctaaacgacggcgcaacctgtcgggcggaatacacgcttcaacaacagcctgacgctggactggtgcagatgcccgtcacgtgtcgataa

SEQ ID NO: 120173 - DNA, 1053 bp, Enterobacter cloacae
atgaaactgcaatactggcttttagccttactgacctgcgtcttttatgcgcatgcggccccaaccggttattgtgtgccagacaatggcaaatatcataactacctcaattttacagagcagttttccattacggacaatatagccgggacgacaacgcttattaatgtgaataataacaacacctcgtttaaaggtacctgctattgtctgaccgggccgaatcagagttacgatcacacctacataaccagcgtcgttaatccggcgctggtgcctgcgggaagcaggaacaatgtcgcctattttaacctgaatgaaaacgttgatatcggcctgcttgtttacatacttggtgtcggttatacggccgtgccttttgatcatctgccgaataaaaccggtacaccctatcaatgtcacagcggtgtaagttccgccaccacgttttatagtggcggctcggggcaggtctatttgtacgttaaaaaagcctttaccggggtgatgacgatcccggctacgctggtggcgaatatctatgccacgatcgacccgcgtaccgtctcgaatgagattatttctgatgtgattgttcagggaacagtgacggttcctcaatcttgtgagattgatgaggggcaggccatagtttttgatttcaataaaatcctggcgtcagagttttcgtcgactaaagggaaagcgctgaccgatcgcaaaatcactcgtaccgtgaacatcaaatgcaccaatatgatgttctacgacaagctcgacgcaaccctgcatgcctcagccgtggcttctgataattcgatgattgcgacggacaacgaagacgtaggaattaaagtctacgataaatataatcgggaagtgaatacgaatggcggtgcccttgaagcggaaacgactaaaattcccgacatcatgggggatacgctgggcacgctgacattttcaagcgcgcctgccagcgcgacaggagcgaggcccaaaccaggccagttcaatgcaacggcaactctgacgattgaaatcgctcattaa

SEQ ID NO: 120174 - DNA, 1041 bp, Enterobacter cloacae
atgaaagttatgcgtaccactgtcgcaactgttgtcgccgcgaccttatcaatgagcgctttctctgcctttgcagcagcaagcctgactggcgctggtgcaaccttccctgcgccggtgtatgccaaatgggcggatacctaccagaaagagaccggtaacaaggtcaactatcagggtatcggctcctccggtggcgtaaaacaaattaccgcgaataccgttgatttcggcgcatccgacgctccgctgtctgatgagaaactgaatcaggaaggcctgttccagttcccgaccgtgatcggcggcgttgtgctggctgttaacatccctggcctgaaatcaggcgagctggtgctggacggcaaaaccctgggtgacatctacctgggcaaaatcaaaaaatgggatgacgaagccatcactaagctgaacccgggcgttaagctgccttcgcagaatatcgcggtggttcgtcgtgctgacggctctggtacctctttcgtgttcaccagctacctggcgaaagtgaacgaagagtggaaatctaaagtcggttccggctctaccgttaactggccaaccggtctgggcggtaaaggcaacgacggtatcgcagccttcgtacagcgtctgccaggctccatcggttacgtagaatacgcttacgctaagcagaacaacctggcttacaccaaactggtttctgccgacggcaaaccggttagcccgaccgaagagaacttcgccaacgccgcgaaaggcgctgactggagcaaatccttcgcgcaggacctgaccaaccagaaaggcgacgatgcatggcctatcacgtctaccaccttcattctggtccacaaagagcagaagaaacctgagcagggtgctgaagtgctgaagttcttcgactgggcatataaaaatggcggcaaacaggctaacgatctggattacgccagcctgccagacagcgtggttgagcagatccgtgctgcatggaaaaccaacgtgaaagacagcagcggtaaagcgctgtactaa

SEQ ID NO: 120175 - DNA, 714 bp, Enterobacter cloacae
atgcaggcatctgattatttaaagatgaagttccaaagcgacaggcagttggctatttatgggcagcagggcgttgcagggacgtggaaagcattacaggggatcggctctgatatttactcaggaattgagcgtgtaagttggtactcatcatgcttaatccccagctatcacgatgtgtgtgacgagcttctctcagaagaaaagagaatgtacctctcaattctctcgctttaccgttatcgcgatgtaatagcccacatgctatatctttattttggaagtgttatttccgattctgaaaatggaaatgaacacaatcgcgttcgtaagacggattcaaaagtaaccgggcttgttaataacataccgaccagcaaggccgcgcgtttagcgatagcatggggtctggccaaatccctttccgaatctggcctgctgtctgaaatcgtcgtcgaacggcttgcacgccgcgtacctaacgttgtcatggcgcttcaattgattggaacggaacagaagtgcgctcttgctgctcgtcgcctgaaaacactgaaccctaaatattacgccaccctctatgccgcacaactggagatgctttactacttttttgagcctttcctgtctgaactcattaagaaggtgcagttgggattctataaggatttcgatgcaatttataaagacttaaagggcaaggagcatgtttaa

SEQ ID NO: 120176 - DNA, 222 bp, Enterobacter cloacae
atgggctggcaaaagtgtagcggtattaggtttagctatttagatgcttggacctttccagtattgataataaaacgactcggattattcaaagaaatactcaaactaaacatcatactggagcgcaggtatccccttaacgtcattaatttcgatgtccaaggagaattgctggttggtgttgaaacattcgtctggtcgttgctgctacgcttctgttaa

SEQ ID NO: 120177 - DNA, 855 bp, Enterobacter cloacae
atgaataaaattactcctccaaaaataaaaagtaggaatttgtatctgacgtgtcttcgtgctcttcggaaagatagtgaagaaaattatttaaaaatgagggctgtatttaatgaaattaatttagagtggaacgaatatttgagtagaaagaacgctcctgattttcatttatttactccttgccgtcatggtcatggggatgatgttatatgtggggaggtatccaaagataatttagtaagtctttatactaaatatatgcttaagtcaggtacaaaagcaaaagatatctatgacgctatcagtgttgcatcaaatggtatttgtcctttgtgtggcgttactagtgtaagtacgttagatcattacctacctaaagcaagatatcccatcttttctgttatgccggagaatcttgttccggcgtgcagtgattgcaataaagggaaaggaagtagtatccttcgaacaaaagaggagcaatgtttacatccctactattcagaacgtgtgttttatgaggatgtttggataaaagcgagattgaaaaaaacaacacccataacttttgatttttttgtatcagccccagaacattggagtgatttgaataaagaaagagctaaaaatcatttcaaagactttaagattaataaaaaatattctatatatgcagccacattagttacgatgttaatagcaacaactcgccagctattaagagaaaatactcctgaaattgttcaggaacattttaaaagtattgctgatggggaacgtcctaatacagtaattcaggctgtctataatgccgttgctgctgacatcgatttttgttcaggtcatttttaa

SEQ ID NO: 120178 - DNA, 930 bp, Enterobacter cloacae
atgattaactgtatactagacagttctaaagaaaattcatcctactttatagataatgttagcctattttcgcaaaaaaagataaataagacatattttagcagtataatttctatatcttttagtgcatttgacccttttaatccacctcaggagcaacctgatccaacgaaaggaacttgctatttttatctaggattaaagaaaacagctggtgatgtcggggtatctcagcttaggacaattgatgaacttagggaggaatgtgtaagtagtttaattgtgtgtttttctgataaaataaaaaaaggacgatggatgaaagcaatatccacattagagtccgataataatttcttagcaatgaatctgagtgaattgtttgaaatatcagatgataaagaattaagaagtaaattcatgcgtcttttgagaaaaatgagttcaggccatgcaattgttctattaaccataactaagttagttgaaaaagctgaagagaaaactctagtcttaattgatgaaccggaaagccatttacacccgcctcttttatcagcatttactagagccttaagtgatcttttgattgatagaaatggtgtttcaataatagcaactcattctcctgttttactacaggagattcctaagatgtgtacgtgggttattaatagatatggtaagcaaatatctgtagcaagacctactatagagacatttggtgaaaatgtagggctattaacgcgagaggtgtttcgcctggaagtagagaactcaggatatcattcattacttaaaaaacatgtcgacaatggggaatgttttaatgaaattatggctaaatataaaaataaaattggtcttgaaggtcaagctctgctaagaacaatgatcagcttacatcaaaaagatgaaggtgaggaataa

SEQ ID NO: 120179 - DNA, 2592 bp, Enterobacter cloacae
atgttatttaaacgttctcttttatgtcttacgataagtgcagcattgcctttttatgcctgtgcagaaaatatcacgccagcaaaagatctgcctgacaatgaagaagaggtcgagtttaacgatcaatttcttttaaatggcagcgctaatattgatattaatcgtttttcacatggcaacccggttttaccggggacctatcgcactaagatcaacctgaacggtaaactgaagtccaccgtggaggtcacgtttaaagataacggaacacctcgtgcgaccccgtgcataacaaaactgctgctgtcacaatcgggtgtcgacaccagcacattgcctgacggaccggaagacgatgaaacctgcgtcgatattaaaaaatctttcgctggcgctacggttagctatgacagtggcaagcaggctatggattttaattttccccagatttatgtgctgaaacgcccggcgggctatgtcgatccatcgttgtgggataacgggattcctgccgctctgctctcttatgacatgaacggctggcgtagcgagaacaacggcagtacatcagaaagtgcatatgtagggttacgctatggtctgaatatggggccatggcgcctgcgctcgcgtggcaattttaactgggacaaagatagcggcacaaaatactccagtcaggatgtctatttgcagcgcgatattacaccattgagtgcccagtttgtcatcggcgactcttacacgcgtggcgaggcatttaactctataagccttcgcggcgcacgcatgtacagtgacgatcgcatgttgccaatggggtccacaggctacgcgcctgtcattcggggtgtcgcgaacagtaacgcgaaggtcagcgtcacgcagagcggcaataagatttatgaaacctcggtgccaccaggcgcgtttgaaataaacgacctgagtaccacaggttacggaaatgatttactggtaacgattgaagaagcggatggcagcaaacgctcctttaccgtacccttttcatccgtcacgcagatgctccgtccgggagcctctcgctgggacgtcggtttaggtgaattaaatgacgattcactgattgatgcgcctaaagtgggttacggtacgctttactatggcctgaataatacgttcacgggttatattggcgcgcaatataccgacatggatttttatgccggtattctcggcgtggcaatgaacacccctgttggtgcgtttgcattcgacgttacgcaatcttatgcagatattgaggggctggataaattaagcgggcaaagttatcgtttaacctacagcaaaatgattgagtcgacgaatacttcctttaacgttgcggcttatcgtttctcgacggaagactacctgacgcttaacgatgcggcgcaacttcaggacagtattaggcaccagaagtactcaaaccgtagctatgactcaaacgaagcgctatatgcagactatcagcgcaccaaaaaccaggtgcaaattagtcttaaccaaccgctaacctccggagaagacaattttggctccctgtatgtaagcggcacctggcaggattactggaacgcgacgggctctacttccaattacaatattgggtataacaatagcttcacctacggcagctacagcttgtcattacagcgaacctatgatcagaacggcaagaaagacgatagcgtttatttaagcctaagcattccattaagtgtattctcaaaagatagagggaatgccggtggattctccaacatcaatatgggattacgttccgaccttaaaggcggcacaagctttaacacgtccgcgggtggaaatacgcaagataataaggtgagttattccgttagcgcctcgtcaaacagtggtaattatggtgacctgaatcagataagcggctacgggtcctataacagtgaatatggcccgctggggttatctgcctcttttggtgatgacaacagtaaacaatattctgcctcctataacggtggcatggtcatccattcaggaggtattgcatttgcgccagggagtattggtgacaacgatgcgctggcactggtcaaagcgagtggtgcgaaaggcgccggtatcggctttggtaacagcgaaataggcagttccggctatggcattctgccttatatgtctgcctaccgtgaaaaccgcgtataccttgatatcagcacgctggaaaacgacgttgaaattaaaaacaccagtgaaattacggttccccgcagtggttccgttgtgctggttgattttgcaaccgatgaaggtcgttcattaattttagaacttaagcgcaccgataacggatttattcctttaggcgctgatgttttaaatgaaaaaaatgaatctattggcaccgtgggacaggcggggcaagcctatgtccgcggcgttgaggatgaaggcacgcttcatgttgtctggggaagcgataaagacagtaaatgtgacgtgcattataacgtctcatcacatgctcaaaaagtaggacttacaacggtgctcagcaatcaagtgtgccagatgtaa

SEQ ID NO: 120180 - DNA, 1077 bp, Enterobacter cloacae
atgaaaaaatacctcactatattagcgttcgcagcgttcgggctgtctggcgcagcaaaggctaatttcgaggagtgcaaattttacggtaatgatgacttgcagattatgtctccaggtgcacaaccagttatcactcctctgcctgtgggcacagtaacaactcccatacagatcagtaatacgatcattatggaaacaacgcctgcgttaaaatctcactgtgctgggggaaatgacggtgaaaacacctatcagattaccgacaactcaatgctggcaggctacatagataacaaagccaccttccggacgaatattccgggtattgtctataccctggcgatgtatcccgatggtaacggcgtcaccgcgtggttcccgcccaacgcagggtcctggtatatgaccgcacctaatgacgatcacgaagagttgcttgacgaaaaaacctggcatgtgcgcatggaaatctatcaaaccaatggatttcagggtgttccttcggatgttaattttttaacggccggtgcaggcccgattggtcagatcattctgggcgatccaagcgatccgaagacatccgatcaccctcgtccccatgtgaacatgagcgagatgtcatttagcatgcctttaaatcgcccgacctgtgtcttacgtgcgcccacaacggtaaatcttggtgactggtatcccgcagaagtcgaaaacgggaataccagcaaagtcgagttccatgttacgggtacatgtgtaaatacaaccgctgtttactatacgttatcctccacacataccaccgcagataaaaaatattttaccaataccgtcgagaatactggtggtgttactgcggcaggaggcgtcggcgtcatgattacggattctgaaaatgatcattaccccgtgccggcagacagttaccaacgtgtcattgctataggagaggttgttggggatcctgttagtattattgacagatcactttgggccaggttggtcaaaaccggtagcgatccggtaaccgtcggtgttttcggtaccaccgtgaccattcagaccacgtacgaataa

SEQ ID NO: 120181 - DNA, 663 bp, Enterobacter cloacae; identical to SEQ ID NO: 113860

SEQ ID NO: 120182 - DNA, 537 bp, Enterobacter cloacae
atgaaacatattgttgaagtgatgatcccggaagccgagatcaaagcgcgtatcgccgaactgggtcgtcaaatcaccgaacattacaaggacagcggcagcgaaatggtgctggtcggtctgttgcgtggctctttcatgttcatggcagacctgtgccgtgaagtgcaggtgccgcacgaggtcgattttatgaccgcctccagctacggcagcggcatgtccacaacccgtgatgtgaaaatcctgaaagatctggatgaagatattcgtggcaaagatgtgttgattgttgaggacatcatcgactccggcaacacgctctctaaagtgcgtgagatcctgagcctgcgtgaaccaaaatcactggcgatttgtactctgctggataagcctgaacgccgtgaagtgcaggtgccggtggagttcgttggtttctccatcccggacgaattcgtggtgggttacggcattgattacgcgcagcgttatcgccatctgccgtatgttgggaaagtagtgattctggacgaataa

SEQ ID NO: 120183 - DNA, 1473 bp, Enterobacter cloacae
atgactaacgccgcatataacattaactcggtggtggcgaatacgaacgggatgatgcttcagacgtcgctgcataaaccactgtcgccagagatgatcaaacacacccacaacctgctgaaagaggcgcgcaaggagatggatgctttcgcgcaggtgaaattcaacagcctggcagagacaagggctgctgaggagcttcgcgccaaatttgacctggtttataacaccgtccaaaccaagctcggctatcttgagcgaccggaaggatacccgggctcgatgaacggtgatatggaactgcgtaccgagctgcgtcaaaaaattgagaagtattcagaaatctcatctgaccgggggtacgaatatgtatcagtagctgaaagcagctacaagatgatgatttgggtaagcgtggtgatgatggccatcgcgatttgcgtattgttagccgttcgctactggttgcgtattgcgctggtgcgccggatggaaactaccgttgagatgcttcagcgcgtagcggcaggcgatctgagtcatgccatagagactggcgctgataacgaaattggcaaaatgctcagggagcttgagaagatgcgtgtctccctgaccaacaccattaccggtatccgtgaaggggtagtgaatatccattctaacgcccaggagattgctcagggcaacagcgacctttcctcccgtaccgaagaacaggctgcggcccttcaggagacggctgccagcatggagcaaattaaaactaccgtacgccagaatgcggataacgcacatgcggcgcgcagtctggcagaaggggcaagcatgaatgcccaaaatggcggcgaggtgatggtaaacctggaagctatcatggcgcagattaccgaaagctcccgtcagattgctgatattaacggcgtcatcgacagtatcgccaatcagaccaacattctggccttgaacgcagcggttgaagccgctcgagcgggagagcaggggcgtggctttgcggtagttgcggaagaagtgcgtaacctcgccaagcgcagcgccgatgcagcgaaagagattaatcagctgattaataccagcgttaacaatattgatacaggttcgcgccaggtaagccaggcgagcggcgtcatgcaggacatcgtgacttcggttgctgaggtgacgcagattatgggcgaaatcagttcggcctctgacgagcaaagtgcgggtatcaatcagatttcgcaggccgtgaacgagatggatctggtgactcagcagaacgcggcgatggtggaagaagcggccatggcggcaggcaaactggaatctcagtcggacgagcttgagcagcttgttgcccagtttaccctgcgagatgaaaaagttgaaaaacgccatacgcccgcgccggaaaaaatgacgttgcgtcacgttgaaaatgataatgcgcagtgggaaacgttctga

SEQ ID NO: 120184 - DNA, 780 bp, Enterobacter cloacae
atgtggtttcaactgataattgagaatgtgaagattaggtggaagaaatgcgtggacggtatatacacagctgaagggctggagaataaaacggcattgtggtcaaaataccattttatcgtcaggcaagaagcgctgcgtttgcataagagactgcctgccaatgtcgaattagacgatctcattcaggcgggctccatgggttttttgagtgccattgatagctttgaccctaaaaaaggggtggcccttaatgcctggatctcacagcgtgtgaaatgggcattaatggatgagcttcgggaaagtgattgggttccacggcgcgtgcgatcgcattcgcgggaaattgtgtcacttattcatcagatcgaacaggaaaaggggggagaagcgaccgaagctgatattgctgaacgtatgggcgtttcgctaaaggaatttcagcaaatgctggctgataataatagcagccagatgtactctattgatgaacttcaggaaaactattcagacagttgggagagtaatgacggcgaaaatgcacagcttaatccgttgaatgaggccattcaggaaaacttgatagccaacattgctgagcatatccgaatgatccccaggcgtgaacagcagatattgcagttttattatcagcaggatctgaacatgaaagagattggattaattttgggcgttaccgaaacgcgcgttagccagttgcacagtttagcgataaaacgcttacgaagcagaatggatcggttaaggaaagaataa

SEQ ID NO: 120185 - DNA, 351 bp, Enterobacter cloacae
gtgtccaattttgacgagtatctgcaaaacattcacgatattaatctttcttatttattactggcgcagcagctgatcagacaggacaagtttgctgccagttttcgtctcggcttatccgaaggcacgattgataatttaaaagagttgtctttaccacagttgatgaaactggctgcgaccaatcagttgatttgtcgtttacgcgtcgatgacgaagtggtcatcgaaaatttgacgaaagattcgcgtattgaagctcttcagcaaattcataccggcatcattttatcgacaaacttacttaattcattaagcgagtccgatgctgctgtgacgggagaagcataa

SEQ ID NO: 120186 - DNA, 573 bp, Enterobacter cloacae
atgtgcgagaaaagtttattgcaagaaattgaagaggtaaatattgccatggggttaattaaccttggggcaagaatgcaggttctggaatctgaaacttctttaagtcgtcggcgtttactgcgcttgtataaagagttacgcggctgtccgcctccaaaagggatgctccctttttctgaagactggttcatgtcatgggagcagaatattcactcttccatgttctataacatttacctttatcttcagaaaactgggggcgggcgtcctattgaaatattgatgaaaacctaccgtctttatctggagcagtgtggttcttgctgcgacgataaacctgtcctggggctaacgcgtgcctggacattattacgctttatcgactgcggtattatttcccgtaaggcctgtagcgtttgttccggtggttttgtggtcacgacggaattcatcaaaaacccgttcacctgtagtttgtgtagccctccttcgcgggcatttaagaaatcgcaggtcaacctcagcggaatcgcaggcaattatgccacgccggaaattatgacagcctga

SEQ ID NO: 120187 - DNA, 897 bp, Enterobacter cloacae
gtgttagttatctttggctatcttgttgttattgctaccgtatttggtgggttcgtactgtctggtggtaatctgctcgcgctgttccagcctttggaattgttaattatcggcggtgccggggtcggcgcttttattgttggtaataacatgaaatcccttaaggcgacgggtaaagctatcgtgaagctgttcgtggggaaacgctacaacaaaacggtttatatggacctgatggcgcttatgtttttgctgctgtcaaaaagtcgtgttcagggactcatgtcacttgagaaagacattgaagatccggcgggcagcgaaattttcagcgcttatcctcgtctgatgagcgatccgatgttaagcaactttatcctcgattacttccgcctgatgattggcggaagtatgaactcgcatgaaatcgaagcgttaatggatgaagaaattgaaacctgcgaagaggagcttgaggttccggcccacagtctgaataccgtcggcgatgcctttccggcctttggtattgtggctgccgtcatgggggtagtgaacgcgctcggtgccgcggaccgacccgcagccgagctcggaatgctgattggccacgcgctggtgggcacgttcctcggaattttgattgcctacgggtttgtattaccgctcgcaaccctgctgcgtcagatgagttccgatcaggtcaaaatccttcagtgtataaaagtcacgctgctctccagtctaaacggctatgcgccacaaattgccgtggagtttggccgaaaaaccatttttaccagcgaacggccttcctttgaggagcttgaagagcatgtgcgggaagtgaaatccagcgccagccttaagtctaagtctgcggatgccacggcatga

SEQ ID NO: 120188 - DNA, 906 bp, Enterobacter cloacae
atgaaaaacgattccccgataatcatttcgcgcaagcgaaagaagaaaaagcatgctcatcacggtggtacgtggaaaatcgcctacgccgattttatgaccgcgatgatggcgttcttcctggtaatgtggctgatttctcagtccagcacggtgcagcgggagatgatcgccgattacttccgcatgccgcttaagccatctatggccaatggcgacaaaaccagcctgagcgacagcatcatccccggcggcggtgacgatctgatgaagcaggacggagaagtggcgaatcataagcgggtacagagcgagcggcagcgctggatggagagcctgaaacaggccagagataaattgcagcagatgatcgaaaccgatccccggctcaataactttaaatccaacattatgctgcgtcttaccaacgacggcctgctcattcagatcaccgacagccaggatcgcccgatgtttagagtaggcagcgagctgccggaatcctatatgaacggcattttgcaggcgcttgtgccgctgttgcaggagttgcccaataaaatcagtctcaccggccataccgactcgcttccctatgcgggcggcacctccggatacagtaactgggaactttcttccggacgcgccaacgccgcgcgccgcgtgctggttaaagcaggtcttgacgatgagcgttttcttcgcgtgatcggcacgggaagccgtatgcctttagaaaacagtgatccctcaagtccggcgaatcgccgtattagcattttggtattaagtaaaaccaaagaacaggatatccgtctggaagacacgcgcatgcatcgcccagaaaacgtcctgaacaacactacgcagcaggaggtaagggggtatagcgatggacatgaatga

SEQ ID NO: 120189 - DNA, 1989 bp, Enterobacter cloacae
atggacatgaatgatttcaccgagatcttttttaccgaagcggaagaactgctggccgagatggagaagcatttgctggagattgatgccgcatcgccgaatcctgaacaggtaaatgccatttttcgcgcagcgcattctttgaaaggcggggcagggacttttggctttaatgccctgcaagagaccacgcatctacttgagaacctgtttgaccaggtgcgagccggagaacgctcgcttaaccgaacgaccgttaatctatttctggaatgtaaagacattatgcaagcgcaactggaagcctatcagtcttcgcaggaacctgatgaagcgagttatcgctatatttgtgaagccctgcgcaagattgctctggaagacaaacatgcccagacggcagtcgagttgcaagacaaagccgtgacgcagcagggggcagctgatgatgagcttttactctgcgtgacgttgaagaaaattcctgaaagcgagcgggcaatgcttcaggaagagttatcccacatgggagagattgtcgctacggagaaggctgatgatggcatggtggttcagctgcgcacgagcgcctctgccgatgatatctccgcggtgctgtgttttgtgcttgaagagtcgcaaatccttatcgagcatgtcgttcaaccagcgtcggttgaagtgacttctcctgttacggacaaggcttctgtagtcgcggaccattcagaaccgccttcacgacctgccgcgccggtgccagcccgcagtaatagtcaggaatcgggcagcatccgcgtggcggtcagtaaagtcgatcagatcattaaccaggtgggtgagctcatcatcacccaggcgatgctatctcagctttccaaaaaacttgatccagcgagctacgacatgctctccagctgcgtggcgcaaatggagcgtaatacacgcgagcttcagtcatcagtcatgtcgattcgaatgatgccaatggattatgtgtttagccgcttcccgcggctggtgcacgatctgggttctcgcctgaacaaagaggtagagctaactcttcgtggcggctcggccgagctggataagagcctgatcgaacgcattatcgacccactgactcatctggtgcgtaacagtctcgatcacggcattgagcagaaagaagaacgtgcccgtaaggggaagtcggtagtgggcaatcttatcctctcggcggaacatcatggcggcaatatcatcattgaggtgactgatgatggtgccggactgaaccgggagaaaatcctcgcgaaagcccgctcccagggaatgaatatcagcgacaccctcagcgatgaggacgtatggatgctgattttcgccgcgggattttccaccgcagaaagcgtgacagatgtttccgggcgcggcgtgggtatggacgtggtccgtcgtaacattatggccatgggcggccatgtcgaagtcctttcaaagccgggagaaggcacgacgatacgcattattctgccgctgacgctggcaatccttgatggcatgctggtgaaagttggacaggagatctatgttctgccgctcggcgcggtaatggaatcgctgaggcccggcgaggatatgctctgccgcttcgtcggggaggaacgtctgctgcaaattcgtggcgaatatcttccgctggtgatgctgcgtcagcgcctatcggtgcccggcgagaccgcacctgaagatggcattgtggtgatcgtccaaagcgctggatgccgctacgccctgtgggtcgatcagctcattggtcagcaacaggttgtggtaaaaaacctcgaacagaactatcgcaaagtaccgggcgtttcagccgcgaccattctcggtgatggcagcgttgcgctaatcctcgacgtggttgaactgtcgacgatgaacggacaaaaggaaaaccatgtcaggccgacgttcggtaagcaaggagtaacagcatga

SEQ ID NO: 120190 - DNA, 504 bp, Enterobacter cloacae
atgacccaaacaacgacaaagcctgcgggcgcggacgccattgcgcaggagtatctggtttttcgtctcggtaacgaagaatatgggatcgacattctgaaggtacaagagatacgtggatgcgatagcgttactcgtatcccgaacgcgccaggttttatcaccggcgtgaccaacctgcgcggtgtgatagtgccaatagttgaccttcgcgtgcgcttcagtcttcctgacgttcagcaggatgacagtacggtagtgatcatccttaacctcaataatcgcgttgtaggaatcgtggtagacggtgtggttgacgtgctgtcgatggacatggatcagattaaaccgacgccggacttcgcgtccatgctatcaagccgctatcttcttgggcttggcgtgatggaaaacagaatgatcatcctggtcaatatcgaaatgctgctcagccgtgaagagatggatatggtggattcaatgctggaaactagcctggcctag

SEQ ID NO: 120191 - DNA, 1056 bp, Enterobacter cloacae
atgagccaaatcgttttaaataatctcggtaaatcctacggcaacgtcagcatcattaaagggatctcgctgagcattcacgaaggcgaatttattgtgctggtcggcccgtccgggtgtgggaaatccaccctgctgcgcatgattgcgggtctggaagacatcacctccggtgaactgctgatgcacggggaggtggtcaacactctgcccgccaaaaaacgcgatatcgccatggtgttccagagctatgcgctctatccacacatgaaggtgcgggacaacatgagttttgccctgaagcttgccagcgtctcaaaagcggaacggatggcgcgcgtggaagaggcagcggaaatcctcggcctgacgcatctgctcgatcgcctcccgcgggatctttccggcggccagcgtcagcgcgtggcgatgggacgcgcgctggtgcgtgacccgaaggcctttttgtttgatgaaccgctctccaacctggacgccaaactgcgccataaaatgcgcggagaaattcgtaagatccaccagcggatgggtcgcaccaccatctacgtgacgcacgatcagacggaagcgatgaccatggcggacaggattgtggtgctgaatgccggacatattgagcaggtcggcaccccggaagagctgtaccgtaacccggataacctgtttgtcgcgggctttatcggcacgccggaaattaacacccttaaaggcgtgattcagcacggcgagattgtgctcaacaacggctaccgcttcccctgccccctccgctcacatattgaagggatggagatcatctgcgccacccgaccgcactatatccggctcggcgagtcagggatgccagcggaaatcgtgctgatagaaatgaccggggaaggacaggagatccgggtgcgtatcaacgatcaggagctgatcgtggtgtcccatgaaaagctggatatcaacgtgggtcagaaggtcttcctcaccgtagacgcggaaaaaatgttcttgtttgatgcccagaccggtaagcgcctgcggtcatag

SEQ ID NO: 120192 - DNA, 1212 bp, Enterobacter cloacae
atgaccgttactcaagccgctgatttatcgttcacgtcccgcattctgggcatgctgtatggcgtggcgttcggtgatgtcttaggcggaccggttgagaaactctccgcccggcaaatcgcggagaaatatggccgcgtcacctccatccaccagcgctggcaccggatggacgagccgtccgcacggcgcaacaaccgcgtacgcggcaacggtatcatcaccgccgatacgctgatgacgctctgcctgatggaggtttacagcgagctgggccgtcacgttgatgcgtgggatatgggggagtcttttgtgcggaagattgcctgggaaccgcgctgggtgccggaactggatcgggaagcgctggttattgagcgcctgttttatccggaaaaatggatcttccatcgtctgcaactggccgcctgcgatccgcgccagggcggcgtgggcaatatggtgaactgcggcgcagccatgtatgccgcccccatcggagctattaatgcctgcaaccctgaggcagcttaccaggaagccattaatttcacccaggggcatcagcagagctatgggctggaggccgccggggtcttcgccgcctgcgttgcagcggcatttattcctggcatcaccattgaggctatcaccaacatcgcattgaaactggctaaagacggcacccaccaggccatcgcggcaacgcttgaggtcgcgcatcgctaccgtggaaccgcatgggattatcaacaggtcgttgacgccctgcacgatgcgcttttgcccttctcaccgatgggtgatgacctgatgcacggcccggaaaaagcgggcgtcccgaccatggcctaccagccctcgcgtctgatgtcgattgaggaactgccaatggcgctggccttctgcctgctgcgcgaaggcgagtttcgcggcgcggtggaagacgccatcaattcaggccgtgataccgactctatcggggtgatgagcggcgcgattttaggcgcgctgcacggggaagccattgtcgaacctgaggtgctggcgggtattgatagcgccaaccacctggatctgcgtacggccgcgctgcgcttcagcgaatcagcacaaagcattatccagcaggatctcgctgcggcggcgctttaccgccagcacgtcatgccattattgcagccaggccacaccgccgggcgaggagagtaa

SEQ ID NO: 120193 - DNA, 1401 bp, Enterobacter cloacae
atgaaattattcacagcaatcgcctgcggcctgctgttatgccaggccgcctgggccgagccggtcactatccggattgtggaaaaagatctgctgaccaccaaccgcgaagatgtcgcgcatattcagcgaatcgagcaggcgctggcacgccagggacacgatatccacattgagatcgtcaacctgtcgtcttccggctactccgacgtgctgaacgtgatgctgctctccggcaccatccctgatctgatctatttcaacggcagcgaccagaagatggtcgaacagggcattcttgaagactggcgtccgtggattacgcaaacccgctatctgaaagaggcgctgtggccgcacaaccggcttcgcctgcaaaaccatccgaccctgctgtatgtctttcccctgcgcgcgcgccagccggtgatccgtgaggactggttacagaagagcggattcagcgcatcacccaaaacgctggcggagtacgtcacgctgttcaatgcgatccacgccggtgactacaacggcgacggtaagacggatagctgggggatcacctccgagaaagacctgcgcgatctcgacggttttatgaacccggcgtttggcattcacgccacctggctcaaggacgatcagggcaatctgatcaacgcccagataagcccgcaggagcggagcaagctggagttctaccattcgctgtatcagaaaggattgctctcctcccagtacatcaccaccaactgggagctaaaagaggatgagttttataccggcaaggttggcgtggtatccgtctcatcgccaggcaacgtcggcgtgtaccaggaaaagatgcgtcagatccatcctgacgccaccctcaccctgctcgacccacccgaaggcccggcaggtaaagggctggcggcgacagatgtttccatggaaacgcgcggctttgccatgtcctcgctctcgaaacataaaaaggaagtgatgatcctgctcgattttctggcaagcccggaagggcaaatgatggagcagatgggcttcgagaacacgcactacgttcgtaagggcaacacgataaacgtgacgccaaaaattaatgcctggtatccgcggtttatccaggccgccaactggaagccgccggtggagtggcggacgcccgcgatgctgcgctatatcgacaattcacaacgttattttacggcggataacgcctttatcttcccggcgtcgtttgccgccgccatcgactcaaccagcagtatttataaccagtgggcgtaccagtttgtctctggcaaagcgtcatttgatcagtgggatcagtatgtcagcgcctggaaagccgcaggtggaaacgccatgaccgaatatgcagaggaaaaattaaaatga

SEQ ID NO: 120194 - DNA, 900 bp, Enterobacter cloacae
atgcgcatctcatcacgaagcaccccttttgagcgcatcgaatacgtgctcattctctcggtactgatgctgctggttgtcgtgacgctacaaccgatcctcaacctggtggcgatatccttctccagcccggcaaacgtgcccggtatgagcggcctggagattattccgcagggcttttcgctggacgtatggaagctgctgctgaccaacgaagccgtgctgcgcgggtttggcaatgcgatgctgattaccgtggtgggcaccatcatcaacgtagttttcaccgtgctgctggcctgggcgctggcgcaaaaacgcctgccgggacgccgctggctgtttatgtttgtcctgttcaccatcgtctttgagccgggcatcatccccgattttctggtgatgaaaaagctggggctactgaacagctactggtccgtcatcctgtatcgcgcggtcttcgcctggtacctgattattctggttcgcctgttcgaagagatcccggaggagctgctggaagccgccgaactcgatggcgcgaacccgttccagacgctgtggtacgtcattatgccggtcgccaaatcgtccattgccatgatcacgttattttacatggtgctgcactggaacgagtttttccgcgccatggtgtacctcaacgacccggacaaatggccgttgcaggtggtgctgcgtcagtttgtcgtcgagggcgataagctggcgatggtaggcgtcgaaagcatgtcgaactacaccgatgccagccagatcagcatcaaggcgctgaaagccgggatgatcaccttaaccatcgccccgctgattgccatctacccgattattttgcgcttcttcaccaaagggaccatgtccggcgcggtgaagggttaa

SEQ ID NO: 120195 - DNA, 978 bp, Enterobacter cloacae
atgaaagccctgacagaatctaaacccggcggcgcgataccgcaggtaaataacatgcctcaccagcaaacactatcccgcatggcacgttgccgccagacgttacgccggtggtggccgttctacgtgatggccctgcctggggttatctatttttttatctggcactatttacccatttgggaaaccaaaattgcgtttgagcagtaccgtattatcccgccgaatatctgggtcgggatgcagtattttgccacgctgatgtcatcccctgttttctggcaggtgatacagaacaccgtgattatcggcgcaatgaagctgatttttatttttccggttcccattatcgtggcgctcttgctcaatgaagtgcgctcatccggttaccgtaaatttgtccagtcggtgatttatctgccgcattatctttcctgggtggtgatcgccagtatcgcgattgccacgctctcgccggttgatggcgcggttaacgacatcattaaatcgatgggctatgacccgatcccctttatgaccgacagcggctctatccgctgggtactggtgttcactgaaatgtggcgcagcgcgggctgggattcattactttacatcgcggcgatcctcgccatcgatccacagctgtatgaagcggcggaaatggatggtgccgggcgctggcgcaaaatctggcacatcaccctgcccgctatcaccccgaccatcgccacgctgtttatcctcaacgtcgggctgttcctgagccagggttttgatcaggtcttcaacatgaccaacgacgtggtgaacggtcagatagacatcatcgacacctacgtctaccgcatgggcctgcgcaccggggagttctcgctggcgaccgccgcagggttattcaaaggcgtgatcggcatgatccttatcgtgctggcacataacgtttcaaaacgcctgacgggtaaaggagtctggtaa

SEQ ID NO: 120196 - DNA, 1239 bp, Enterobacter cloacae
atgctcaataaagaacggcattatgcaattttgacctggcttaacaggtacgaacgggcgacggtgaatcagcttgcgaaagtatttaacgtcaccagggaaacgattcgcagcgacctgaacttattagcgcaggaaggcggcattgagcgatgccacggtggggcaattatcaaacgccgtatttttcatacccaatcagtcaataatttagatagcaatatcattcatttttttgactccgcgcagtcaagaaaaacgatcaaatcccgacataaagggcgaaagatgaaaggtaaagtctgtattctgggttcattcaacgttgatattattgctaatgtcgatcgtttcccgcaaagcggagaatctattttctccgaaaataccattattggacccggcggcaaaggcgccaatcaggcgctggccgtaagcaaatgcaatgttaaaacccattttgtcggtaaggtgggtaacgatcagtttagtcagatggcctttgaacatctttcatcttctgctatcgacagcttcacgctttatcaggataaagatcagaaaaccggcaccgcgcttatttatgtttgtcaaagtgatggtgaaaatatgattgccatcagccctggggccaatcggtccattacagccgatgaagttgaagcgattacccctgaagtgaaaaactcagatatttttttaacccagctggaaaataatctacccgctacctttcgggccattgaaattgcccgccgtaacgggattaaggtggttttgaaccctgccccctggtcatctgatgtggttagctgcctgaagaacgtggactttctgaccccaaacgagactgaggcctcattgctgtccggcattcatatcgtggaccttgccagcgcgaaggaagccgccagagccattaaagcgaaaggggtaggtcacgtcatcatcaccatgggagcgaaaggcgcgcttatttatgacggtgagcaatttattcatatcccggcgctgaaagccgtatgtgtggataccaccggtgctggcgatgccttcaacggcgcattcgccgccgcgatggcgaaaggggaatccattattcaggcagcaaaatttgcctgtgctttcgcctctttggccgtcgaaaaagaaggcgcatcaaatatgcctgaatataaagatgtcctgacccgcctcgcgcaatataacgataaaaacattctcaccgagaaaatttaa

SEQ ID NO: 120197 - DNA, 915 bp, Enterobacter cloacae
gtggtgaagaaaaccaaaaacataaagtcctacctggacgagtacctgaaaatctgccagaaccgcaacctgtccccgtcgactatcaacggttatgaaaaatgcctgtctgcgctgtcagctctgcataaactccacgtgtcagaactgacgccagcggtccttaaaaactggatagccagccggaaaacaaagctgaaaacgaccaggaataacctttcgtttctgcgcagcgccatcgatgaagctgttacggatggcctgctgaacattaacccggtaaccctagtcagcgccagccggtaccacgtgatcgacagcagcccaaacgccgacgattacgaggttgacccgttcacgccagcggaaaccctcgctatttaccagagctgccggtacccggaatgggaaaacctgttccgatttgctttcaataccggtctgcggagctccgaactgtgcgcgctgcgctggcctgatctcgacaacatcgcgaacacagcccacgttcaagcggccagtgtcgtaggggtacttaaaggcaccaagacaaaagccggtacccgtaaggtggagctgaacagtgaggcgctggcggccctgcaggcgcagaagcaatacacctttatgaaaagtgagtttatattcagcgatccgaaaacgggagaaccctgggcgaacgccgacgcgatccgtaaaaaagcatgggtgccgaccctgaaaaaagctggcgttcgctatcgtaacccgtaccagacgcggcacaccttcgccaccaagcatattagccagggcgttaacctcttctggcttgccggacagatgggccacaaagggccggaaatgatattccgcaactacggtaaatacctagctgaatatgacggtaaaaccgcgatttcagccgctctgtag

SEQ ID NO: 120198 - DNA, 1473 bp, Enterobacter cloacae
atggttagctttcacaaaaaagaattttcattgttcagtgcgtggatattctcgctcataataatatcgatcggatactacccactgatcaatgacaggctctatctggttgatgatatcactaggtcaattaaaggatactttgggtggattgaattaggcagaccactaacagaatggcttgctatgttcttgagcaccagttctgaccgccttgccgacattacacctttgcctcagttatcgagtattgttgcgttatcttatttaacaattcttttacttaaaaatacattccataaaatcaccattgggaatgttctaatatgtataactgtagcagtaaacccactgttacttggtaatatgttgttcaggtttgattcattatcaatgatattgtccatgttgttacctgttctagcgtgggatttgctaaacaaaaacaggactatatatgcgctagcatcacttattgcatgtctttctttttaccaaccagccattgcaatattcccgatattggtaataactacatttattcaatccaaaaaacacaacaacaaaaacatagagtacataataaaatctgctgggctaaccgtagtgtcttgcgttttatactatttcgttgttgtacttaataccattaaatccactgaaaagagggcagacttaactactggattagcaagtaacatttacataggaattaagacctctatttcaacagcattgcaatcttatggtcacgtcgctgctatattaatagcagtagcaacgttagcttttatcattgtatacgcaaaacatattattgtagtagttaaagagggcgcggggaattcaaggtttttaaacctttcactaatggtatttgctccagttgtaatattaatttgttctgctggagtaaatctgattcttagtaatgggtactatccaacgcgagttttatttccaatagcgtttatagttttcctagcccttgccatccccgccacattcaatgatttctttaatcgtatcgcagcatatttatctatcgcactgatattctcatcaacatcagtgatttatgccactgcatcttcactttatcatcagcaacgctacgattcatatgtattattttccttaagcgaaaagctttcacttttaaaatcaaagaaaaatacatacatattcggcgcaacagactattcagaggcgtcaaaaacttcaaatagagtattcccaatactagatcacataaagaacaactactatgacatgacattaagtcagtcattagttaacaatgggattaggaacataaagttctctggcaaggacaggcagatttcctatgaattagagaaaatggcttgcaatggtgagatgaatcttatttactccatgcctcaatactccattttcgagaatgataaaaatttactaatttatctcggcgggagcatctgtaataaatga

SEQ ID NO: 120199 - DNA, 915 bp, Enterobacter cloacae
atgaaaatttctttggtcgtgccggtgttcaatgaagaggaagccattccaatcttctataaaactgtacgggaatttgaaggtctgcagcagcatgatgttgaaatcatcttcatcaatgacggcagtaaagacgccacagaatcaatcataaacgcgcttgctgtagctgaccctcttgtagttccgctgtcattcactcgcaacttcggtaaagagccagcgctgttcgccgggcttgacaatgcaaccggtgacgcgattatcccgattgatgtagacctgcaggacccaattgaggtcattccacacctgattgagaagtggcaggctggggcagatatggtgctggctaaacgctctgaccgatccaccgatgggcgactcaagcgtaagaccgcagagtggttctataagctgcacaacaaaatcagcaatccgcagatcgaggaaaacgttggcgacttccgcctgatgtctcgaaatgtggttgaaaacatcaagctgatgccagagcgcaaccttttcatgaaaggagttttgagttgggttggcggccgcactgatgttgttgaatatgcccgcgcagaacgtgtggccggggattctaagttcaatggctggaagctgtggaaccttgcattagagggcattacaagtttctcaacttttccactgcgcatgtggacgtatatcggtttgttcgttgccggcatggcctttatgtacggagcgtggatgattattgacaccatagcattcggaaatccagtaagaggctatccttctatattggtatcaattttgttcctcggcggtgtgcaattaatcggtattggagttctcggcgagtacatcggcaggatttatattgaggttaaaaacagacctcgttatattttgaagggaaattaa

SEQ ID NO: 120200 - DNA, 363 bp, Enterobacter cloacae
atgttaaagttatttagtcgctacatttcagtaggcgtaattaacactgctatgcactgggtatgcttcggcgcgcttcttcatttcttcgaagctactcaggctgttgcaaacgtctccgcattcttcattgcggttacgtttagtttcttcgctaacgcaagatggacgttcaaatcacaggcaacgtcagggcgttatatcgcgttcgtcgcattcatgggcatcatggctggaatgacagggtacatcgcagatgcgattggtgcgtcgcctattttaaccctcttagcgttctcaggattcagtcttgttgccgggttcatatactcaaaattcattgtctttagggatgcgaaatga

SEQ ID NO: 120201 - DNA, 240 bp, Enterobacter cloacae
atgttcgttgaactggtttatgacaaacgtaatgtggaggggctcgaaggggccagagagattatcctggcagagctgacgaagcgagtgcaccagattttccctgatgccgaggtgaaggtgaagccgatgcaggcaaacgccctgaatagcgatgccagcaaaagcgatcgggaaaaactgaaccgtatgctggaggaaatgtttgaagaggccgatatgtggcttgtacaggattaa

SEQ ID NO: 120202 - DNA, 1221 bp, Enterobacter cloacae
atgaataaggaagtcgcaccaacaccgcgtccgacgtttaaaagaacgttgcgacgaatcagcatgataagcgtcattataacgatgacgtttatatggttgctgctgtgtttcgcttccgtggtgacattaaagcaatacgcgcaaaaaaacctcgaacttaccggcgccaccatgagccacagccttgaagcctctctggtgttcaacgatgccgtggcggcaaatgaaacgctggcgaccctcggcaagcaggggcagttcgccgtggcggaagtgcttaacgcacatcataaacggtttgcctggtggtcatggaacccggcggataataccgacacgctgggcgcgctggtcaaccggtggttgttccctgttcctgtcgcacagcccatcatacataacggcaatgtgattggcgaaattcgtctgaccgcgcgagacagcctgattagccactttatctggctctcatttgcggtcctcaccggctgcattctttttgcctctgccgtcgcattgaccatcactcgctcgctacatcatggcatggttgttgaaatgcaaaacatcactgacgttgtgcatgacgttcgcactaaccgcaacttctctcgccgggtaacggaaggccgcattgaagagttccaccagtttggtgaagacttcaacagcctgctggatgaaatggaagagtggcagctcaagctacaggcgaaaaacgctcaactgttgcgtaccgccatgcacgatccgctcacggggcttgcaaaccgcgccgcgtttcgcaacaacattgcggcattaatgaacgacgcttcagcaaaaaccaattctgccctgctcttcctggacggtgataactttaaggttatcaatgacacctggggtcatgccgcgggtgactgcgtactgatcgaagccgccaaaaggatggtcgagtttggcgaaaaacgtcatcagtcttaccgtcttggcggcgatgaatttgccatgatcctttacggcgtccacaccgcacgtgaggtcgaatttatttgcgctgctctgtcgcagcaatttatccgtccgtttgatctgcataacgggcacacagcatcaatgtccctcagcattggctttgctctggcgtgggaaaatgcctccgttgaagcattactggagcaagccgatcgcaatatgtatctggtcaaaaaccagcgttcgaaaacaatatcctga

SEQ ID NO: 120203 - DNA, 294 bp, Enterobacter cloacae
atgcagacatttgaaaaattaaaagccatcaggaaagccgaagggttaactcagacaaaattcagtgaaatgagcggaatagctttaggtacgatcaagaattacgaaagtggacaaaaggagccagggttaagtgttgtgcttcgagtgaccaacgctcctctttttcagaaatacaccctttggttaatgacggataaaaccgccccgcaagctggtcagatcgcaccggctttcgcgcacaatgggcaagagccaacaaaatcagaccactccgagaaaaagattggttaa

SEQ ID NO: 120204 - DNA, 273 bp, Enterobacter cloacae
atggaagcaaacgactacgttatccagtatccgcttgacgcggtacaccctgataaattcgcggaattgctgggaaaacctcgcaccgcagtagtagcaatgattgaaaaaaacaaactgccggtcattgagtttcgcgacccggcaaaaccaaaagcgcgtgccggtgacaagcttgttttcattcctgagttcaatcgcggcgtgcgtgaggcgttttataaccgcccggctgaacaacgtgatgcatggttgttgtggatggggttatga

SEQ ID NO: 120205 - DNA, 1473 bp, Enterobacter cloacae
atgtcagaaagtttgagtgaaatcagagcttcaacagtgaatgagttgctagacaaggttaggcagaacaattacgggaagtatttattaaaagctaaaattggacggatccgcggattttctggggaagatatttcttttgaatttccggttacagctttagtcggccctaatggcagtggtaaatcttctgtcctcggtgttgcggggtgtgcttataaagaaattaaacctagtgttttcttccccaaaagtgcaattggtgatgaaagcatggcaggatggaaggttgagtacgaaattatagacaaaagtgtaaatccaagacaaacagtccgtagaaccagtagttttaggagcgccaaatgggcgagggatgaagttgtatcaagggatgtgtatttctttggtatcgaacgtactgttcctgctggtgaaaaaacaaaatataaaaaattaactcgatcctcttaccaacacacagggagtttatccaccctgagtgcaggagttgctaagcagattgaacatatcttaggaaaggatgtttctgcatttaatgttactgatatcggtcatgatgagaagttttttgtaggcaacaataatggtagccgttattcagaattccatttcggagcaggtgaatcatcaattatacgaatggtgtcagaaattgagaatgcatctgataacagtttggtactcattgaagaaattgaaaatggactgcatccagtagcaacaagacgaatggtcgagtatttgattgatgtcgctaaacgtaaatcgattcaagcagtgtttaccacccatagtgactatgccctgatgccattaccgcaagaggctatatgggcatgtatcgacggtcgcctcagaaaaggaaggttaacagttgagtcattgagagctatatcaggcagggttgacaaaaaattggcaatttttgttgaagatgagtttgctaaatgttgggttgatacgattctgcgggaaagattaaaaggcgattatgatcagctagaagttcatgctgttgctggtgatggtaatgcagtgtcaatccacaagtctcatactgcgaatccgtcaattaaatttaaatcactttgcattattgatggtgattcatctcagaaaaatagtgatgaggatggtattcttagattgcctgggactcagccagagcgtagtgtgtttgacaatatattggataatatcgagcccatattggcaatactaacggtatcttgtcaattgccgccagaatcacaagaaaaagtgagggcagtagtcgaatctgtttccagaacgaatagagatcctcatcttatttttaatcaaattggcatggggttaggttttgtatctgagattatcattcgtggcgcgtttttaagtctttggacacgacaaaatgaaagctattgtgatgatttagtgagcagggttaaagctcttcttaattga

SEQ ID NO: 120206 - DNA, 1176 bp, Enterobacter cloacae
atgcttttttataaatactcatcgattgataatctcagcatatcaatgcttcgcaatggggaggtcttttttgcttctcctaacgaattaaatgacatccatgaatgtaaaccacaatttatctttaatgctaacaaagaagtttgggaaaggtttgtttattatttaattgtccaagtgtgtttaaaactcaatttagaacataattccccgcttgctatatcgctccttgcattcaaggataaaattttgcggtctttacttaatggtaaaaaaacaagaaccctcgaccatcaatctctgattaatgatttttcagatgcattcgccagactaacgatcaacgaacttgattttaaggatgcgcgtaaagcaatgcaggcattaagtgcatatctaaatcatgattttgaggtgcaattaaacgacaataattacctgacatccttttcaaaaagcgccacaaacctcactatgtggggtcattacggaaatgctgaaaaaggttttgcgataatttatgaaacaatagatgggaacattacattaaaaagcaatctaaggatttttacatcatataaaaaaaccagcgaacattgtatttcgatgtatctatcaacagaatgcagcacccccattttcgatgtaatatataaatctagaccggtccgcgctaatgggttcggaaagattatttctaaatttttctatagcgaccttgaacgggaagcttgctatccagaacatttgctctcatgtctgaaagcctatggtgaagaagatattggcagagtgaagtattcagactggaagtacgagaaagaacttagggtacgactgcctgtcaatcgcgaacttgcagcaccattacgtagtataaaaattgacgccaaacacatcaagggtgtgatttttggttcacgaacatcaagtgacgatagagagaaagtcctctccgcttgctatcatcttaaggctacccaaaatgaaaaacatcatatctacgtttatcagaccagaagcacacccggtcattataaattggatgtagtgaccttgggtatggtatcagacctgcaatatgacaaacttccgtttcttactaaatttactaaagaaagcgccattcagaaagaagaggccgccaaaatccttgaatcaataaaattgagttag

SEQ ID NO: 120207 - DNA, 222 bp, Enterobacter cloacae
atgttccactgccctaaatgccattacgccgcccacgctcgcacaagtcgctatttttccgatacgacaaaagagcggtatcatcagtgcacaaacatcaattgcagttgcacgttcgtcaccactgagacggtcgagcgctttatcgtttcgccgggtgaagtagtaccagcgccgccgcacccaacgcagtcaggccagcaacaaatccactggatgtga

SEQ ID NO: 120208 - DNA, 414 bp, Enterobacter cloacae
atgtttaataaggaaattaatttgaaacccttcaaagcggtagttttgtttgcccttaccctgacttccttcaccgcactggcaaatgatacctctaccctgaaaaagtccctgaagccatggcaacccgtagaggtctcgaaaagtggcgacacattgacggttgttttaaatgagaaccagataacatctgatgtgtatgatgctgttatcagctcaggtgcctgtatggatatttggacaaaagacgtccctgcaaaatatcttcaaacggttaaggagcttcgtatcctcaataagcataaagctcagggctatgttttggagaaaccgctaaatacctgcaatgaaatgggtaaagagcagcccgaaagagccaaagttataatgcttgcaaacactcatcttttttga

SEQ ID NO: 120209 - DNA, 1452 bp, Enterobacter cloacae
atggctgatataagaagtaaattgaaaagtaagtactctccaagaaataaatatgctaattttggctcggctctgagaagtatagatattaaaggttttcgaggtatagaggatattactctgagcttggattttcctgtgacggcaatttctggtttaaatggcgcaggtaaaagtactcttgggcaattagctatttgtgcatataaaaaaccggtaacagcacaagattataaacggctttatataaaagactttttccccgtatcaaaagctgatccgagtccatttaaaatggattcaagtgtcatttataaatatgaaaccaatgaccctaatagaactcaagatgtaaccgtttcacgtataaaatcttcttggtctggatataaacgtcagccggagagacattgttattatataggttttactgtatacattccaaaagttgagcgtcgtgatctcagtgtctatgggggaagggatttcgatttgacagtgagaaggaatgttgaccaagagataatatcaaggatggctaaaattatcggtcatccatatgacgatgttgcatttcagggaatatcgcatagaaaacgagagacagaaatagggatggttgaaagacttggatattcatattcagaaaataacatgggctttggcgaaggtcgggtgctttataccgttgatatgttagaaacatccccggaacagagcttatttgttttagaagagccagaaacgtctcttcatgaaagtgcgcaatatgaatttacgaaatatcttatggaggtttgtgagcggagaaaacatcaaattattctttctactcattctagtgttattttaaatgcattgcctccagaggctcgtaaattattgattcgtgatgaaactggcgtggatataaaagacggcatttcaacaacgcacataagatcaatactctcagacggtcattttaaagggctgcatgtttgtgttgaggatcattttgctaaggtactacttagccaagtaataaggctgaaaaggcgagacatcctcaaatccattcagattactgatgttggtgataaaactgccgtaagaaaggcagtagagattttgagtaaatctggactaaatgctattgcagttagggatgctgatgtaggtgaggatcctagagggaacttattttcttttcctggcaatcgtcctccggaagttgaggtttaccaacatgctgctgttaaagaatttttacagcaagaatatggaattgattttgattggctaatacaaagaaaaggcgttgaagatcatcacttctatacaaaaacaatttcagaagaagtggaatgcgaggaggaagtggtgagaatactagctattaaaaaatacatagatgttcttggggatcagtttgatagcttggttgataaaattgtcgagaaaatagtttag

SEQ ID NO: 120210 - DNA, 312 bp, Enterobacter cloacae
atgagcggtaagcgttatcctgaagagtttaaaactgaagcagtcaaacaggttgttgatcgcggttattctgttgccagcgttgcaacacgtctcgatatcaccacccacagcctttatgcctggataaagaagtacggtccggattcttccactaataaagaacagtcagatgctcaggccgagatccgccgtctccagaaagagctgaaacgggttaccgacgaacgggacatattaaaaaactgtccatgggtcaaaccctgtcctgagtctcagaaactccccggagaagttggcaggctaatttaa

SEQ ID NO: 120211 - DNA, 1341 bp, Enterobacter cloacae
atgaaaaaatcctcccgaatgtctattgtccatcctcatgctgcgggcgttgatattggcgctgaattccacgttgtcgccgtaccgcctgatgctgacgccgagccggtcagaacttttcaaagtttcaccggcgaccttcatcggatgtccgattggctcaaaacctgtcacattacgaccgtcgccatggagtccacaggcatttactggttgcctgcttttgagatccttgaagctgcgggtttcaatgtgatccttgttaatgccagagacgcaaaaaatgttcccggtcgcaagactgatgtcaacgacgcacagtggctgcagaaactgcattcatttggtcttctccgggccagtttcagacctgaacacgacatttccgtactcaggtcttatttgagacaacgggaacgcctgactgaataccgggctgcgcatatccagcatatgcagaaggcgttgatgcagatgaatgtgcaattacatcatgccgtatcggatatcactggcgttaccggtctttcaatcgtcagagctattgtcagtggtgagcgcgatccttcaatattgatccagtatcgtgatgtcagatgtaagaagacgcctgaagtacttcagcaggcactgacagggaactggcagcctgagcatctttttgaacttgaacagtcggtggcatttttcgatttttaccaggaaaagatctgtgagtgtgatgatcaaatcgaaacttcattattgcaactcagtaccgaaattaaagagccggaaggagtattgccccccgccagacatcgtacaaaacaacccaatcagctttcctttgatgtcagaccgttactctggaaaattaccggagcagacctgacacagatacatgggtttggaccttatctggcactaaaatttgttgccgaatgcggtactgacatgagtcgctggccggatgcgagccattttacctcgtggctatgtttgtctccggggaacaagatctccggtggaaaagtactgtcctcgaaaacgcgtcgttcatccagtcgaatcgctgccgcactcaggctggcagccacaacaattggtcggagcgataccgcgttaggcgctttctatcgtcgattatcatcccgtatcgggaaagcaaaagcagtcactgcaacggcaagaaaactggcaatactgttctacaatgccctgaagtatggtcagaaatatgtcgatcctggcgcggattattatgaagaacgctaccgtagtcgcgtacttgatggacttaagcgaagagcaaaatcactgggttactctctccagcaagatcctgaattatgcgtgtga

SEQ ID NO: 120212 - DNA, 930 bp, Enterobacter cloacae
atgaattccatctttaccgaagagaatttgctggccttcaccaccgcggcacgttttggcagttttagcaaagcggctgccgagctgggcgtaaccacctccgccatcagttacaccatcaaacgcatggagaccggactggacgtggtgctgtttgtacgcaacacgcgcagcattgagctgaccgaatccggtttttatttttatcgtaaagcgaccgacctgctgaatgactttcatgccatcaagcgcgggattgataccatttctcagggcattgagacgcgggtgcgcatctgcataaaccagcttttgtatacgccacgccataccgcgcgtttgctccaggtgctgaaaaaacagtttcccacctgccagatcacagtgacgaccgaggtgtataacggcgtctgggattccatcattaataatcaggccaatatcgccattggcgcgccggatacgctgctggacggcggcggcattgattacaccgagataggggcgatccgctgggtatttgccatcgcgcccacgcatccgctggcgttcgccccggagcccatttccgaaagtcagctgcgtctgtatcccaatatcatggtcgaggacaccgcgcataccatcaacaagaaggtgggctggctgcttcacggtcaggaggcgattctggtgccggacttcaacacgaaatgccagtgtcagatcctgggggaaggtattggctttttaccggaatatatgacgcgtgaggcggtggaggaagggctgctggtaacgcggcggatcaataatccacgtcaggattcgcgcatgctgctcgccacgcagcatgcggcgaccggtcaggtcacgcgctggatcaaacagcagtttggcccggaaggcgtgctgacccggatctacagtgacttactgtggcgtacctag

SEQ ID NO: 120213 - DNA, 1203 bp, Enterobacter cloacae
atgacgtatcgcagcaaaatcgccgtcgtctttctgctcggctttttccttgatttgataaacatgtttattgccagtatcgcctttccggcgatggctcgtgctttcaataccacaccttccgcgcttgcctgggtaagtaacggatacattgccgggctgacgctagtcatccctttcagcagtatcctgacgcgccgcgtcgggccgaagcgcgttatcctgctctcactgcttctctttagcgcggcctccgttgcggcgggtctctcatcttcgctggaaagtctgattgcctggcgagtcgtacagggcgccggagggggtttactgatcccggttggtcaggctctgacctggcaacaatttaagcctcatgagcgggccagactctcctcggcggtgatgctggtcgcactgcttgcccccgcgtgctcaccggctgtgggcggtatgctggttcagacattcagctggcgctggatattttttgccaccctgcccgtcgccattgtcacctttgctttggcctgcgcgtggcttaaaacagaaccgtcgccgataaacaccaccaggacagtaaacctgtctttgctgacggatccgctgttgcgcttatccatgcttatctatgtgtgcgtacccggcatttttatcggcgtgaacgtaacgggcatgtattacctccagagcgaggccaatatgacacccgccgcaacgggcatgcttatgctgccgtggtctgtggcttcgtttttggctatcaccgcgacaggacgctatttcaaccgtatcggcccccggccgctggtggtcatcggttgccttttgcaggcgacgggcattctgcttttagttaacgtcggcccggcaatgctgctacctgccgttgcgtttgcgctgatgggcgcggggggaagcctttgcagcagtacggctcagagcagcgcgtttttgacgatgcgaccggaagatatgcccgatgccagcgcgctatggaatctgaatcgtcagttgagcttttttgcgggcgctctgctgctggcgcaggcgctgagcttcatgcaggattatctcgcgccgctggccgcctggcacgggatgtttgtttttgccgcagtcatcaccctgctgcccgtactgtacgtctaccgtcttaacaacacgcagttacttgcgcaactgcaacaggagcaaccatga

SEQ ID NO: 120214 - DNA, 2760 bp, Enterobacter cloacae
atgaccaactacagcctgcgcgcgcgcatgatgattttgatcctcgctcctaccgttctcatcggtttgctgctgagcattttctttgtggtgcatcgctataacgatttgcagagacagcttgaagatgccggggccagcattatcgaaccgctggccgtctccagcgagtacggtatgaacctgcaaaaccgtgaatccattggtcagttaatcagcgtgctgcaccgccgtcattcagagattgtgcgcgctatttccgtttacgatgagcataaccgtctgttcgtcacctcgaatttccatctggatcccacgtcgctgaaaatcccggatggtacccccttcccgcgtcatcttacggtgttgcggcgcggcgatatcatgatcctgcgcacgccgattatctccgaaagctattcacccgatgaatccgcccagtccgatgcgaagtccagcaataatatgctgggatatgtggcgctggagctggatcttaagtcggtacggctccagcagtacaaagaaatattcatctccggcgtgatgatgctgttctgcatcggcatcgcgctgatcttcggctggcgactgatgcgcgacgtcacggggcctatccgcaacatggtgaataccgttgaccggatccgccggggtcagctcgacagccgcgtggaaggctttatgctcggcgagctggatatgctgaaaaatggcatcaactcaatggcgatgtcgctggcggcttatcacgaagagatgcagcacaacgttgaccaggccacctctgacctgcgcgaaacgctggagcagatggagatccagaacgtggagctggatctggcgaaaaaacgtgcgcaggaggcggcacgtattaagtctgagttcctggcgaacatgtcgcacgagctgcgcacgccgctgaacggggtgattggcttcacccgtctgacgctcaaaagcgagctgaacccgacccagcgtgaccatctgcataccattgaacgctcagccaacaacctgctgaccattattaacgacgtactggacttctcgaagctggaagcgggcaagctgattctggagagtattcccttcccgctgcgcagcacgctggatgacgtggtcacgcttcttgcccactcatcgcatgataagggtctggaactgacgctcaatattaaaaatgacgtgccggataacgtcattggcgacccgctgcgcctgcaacaggtcattaccaatctggtgggcaacgcgattaagttcaccgagagcggcaacatcgatattctggtcgaaaaaagggcgctcagtaataacaaagtccagattgaagtgcagatccgggataccggcatcggtattccggagcgcgatcagacgcgtctgttccaggctttccgccaggccgatgcgagcatttcccgtcgtcacggcggaacgggcctggggctggtgatcacccaaaagctggtgaaagagatgggaggcgatatctccttccatagccagcctaaccggggctcaaccttctggttccatatcaaccttgatcttaacccgaacgtgcagaccgacggcccggtcaccggctgcctgaaggggatgcgtctggcctatgtggaaccgaacgccgcggcggcgcagtgtacgcttgatgtattaagcagcacgccgctggaggtcatctacagtccgaccttctccgcgctggcgaacgatcattacgatatcctgttgttggggattccggtgacgtttaccggagaactgaccatgcagcaggaacgcctggcgaaggcggcctcaatgacggactacctgctgctggcgctgccgtgccacgcccaaatcaacgccgaagagctgaaaaacgacggagcggcggcgtgtctgctgaaacccctcaccgccacacggctgttacctgcgttgaccgaatattgccgtctgacgcatcagtccctgccgctggaaaacgacgaacataagctgccgatgacggtgatggccgtggacgataacccggcgaacctgaagctgattggcgtgctgcttgaggatcaggttcagcatgttgagctgtgtaccagcggcgccgaagccgtggaacaagccaaacagatgcagttcgacctgatcctgatggatattcagatgccgggcatggacggcatccgcgcctgcgagttgattcgccagcttccgcaccagcagcagacgccggtgattgccgtgacggcgcacgcgatggcggggcaaaaggagaaactgctgggtgcgggcatgaacgattatctggcgaaaccgatcgacgaagagaagctgcacagcctgctgctgcgctacaagccggggcacattggcgggacatacaccattacagctgaatcgccggagatcagcgttaaccagaatgccacgtttgactggcaactggcgctgcgccaggcggcaggcaaacccgatctggcccgcgatatgctgcaaatgctggtggacttcctgcctgagatccgtaacaaggttgaagaacagctggtgggtgaaaaccccgaaggactgctggaagccattcataaactgcatggcagctgcggctacagcggcgtaccgcggttgaaaaatctctgccagttgcttgaacagcagctccgcgcgggtacgccagaatccgatctcgaaccggagttcctggagctgctggacgagatggacaacgtgacgcgggaagcaatgaaggtgttggggagctaa

SEQ ID NO: 120215 - DNA, 1356 bp, Enterobacter cloacae
atgagtacattaagccacgcggcgagcagcgctgagaagcgcaccaacgcccgctactggatagtggtgatgctgtttatcgtcacctctttcaactacggcgaccgtgccacgttatccattgccggctctgagatggcaaaggacatcggacttgatccggtaggtatgggttatgttttctccgcattttcatgggcctacgtaatcggccaaatccctggcggctggctgctggaccgctttggttcaaaacgggtctatttctggtccattttcatctggtcgatgtttaccctgttacagggcttcgtggatatcttcagcggcttcggcattatcattgcgctctttaccctccgcttcctggtgggcttagcggaagcgccatcgttccctggcaacagccgtattgtggccgcctggttcccggcgcaggagaggggaacggcggtagccatctttaactcggcgcaatactttgcgacggttattttcgcgccaatcatgggctggctgacgcacgaagtgggctggtcgcacgtcttcttcttcatgggcgggctggggatcgtcatcagcttcatctggctgaaagtgatccacgaaccaaaccagcatccgggcgttaacaagaaagagctggactacattgctgaaggtggggcgctgatcaacatggatcagaaaacccagaaagctaaagttccgttcagccagaaatgggggcagatcaaacagctcgtcggctcacgaatgatgatcggtatctatctcggccagtactgcattaacgccttaacctacttctttatcacctggttcccggtttacctggtgcaggcacgcgggatgtcgattctgaaggcggggtttgtcgcctccgtgccggccatctgcggcttcgtgggtggggtgcttggcggggtcatctccgactggctgatgcgtcgtaccggttcgctgaatattgcgcgtaaaacgccaatcgtgctcggcatgctgctctccatgaccatggtgttctgtaactatgtcagcgcggagtggatgattatcggctttatggcgatggccttcttcggtaaaggcattggcgcactgggctgggcggtgatggcagataccgcgccgaaagagatcagcggcctgagcggcggtctgttcaacatgtttggcaacatttccggcattgtcaccccaatcgctatcggttacatcgtcggcaccactggctccttcaacggcgcgctgatttatgtaggcgtccatgcgctggtggcggtactcagttatctggtgctggtgggtgacatcaaacgaatcgaactgaaacctgttggggagcgcggatga

SEQ ID NO: 120216 - DNA, 786 bp, Enterobacter cloacae
atgacgcttgagatcctttatcaggatgagtggttagtggcggtgaataaaccgtccggctggctggtgcaccgtagctggctcgatcgcgatgagaaagtcgtggtcatgcaaaccgtgcgcgatcagatcggtcagcacgtctttactgcccatcgtctggatcggccaacctctggcgttctgctgatggggctttccagtgaggcgggtcgactgctttcgcagcagtttgagcaccaccagatgcaaaagcgctaccacgccatcgtgcgtggctggctgacggattccgccacgcttgattatccgctggtggaggaactggataaaatcgccgataaatttgcccgcgaagataaaggcccgcagcctgcggtgaccgactatcgcggtatggcgaccacagaactgccggtggcgaccagcaaatttccgaccacgcgatacagtctggttgagcttttgcccaaaaccgggcgcaagcaccagcttcgccgtcaccttgcgcacctgcgccacccgattatcggcgacagcaagcacggcgatctgcgccagaaccgcagcgcggccgagcactttggctgtaaccggctgatgctgcacgccagcgagctacgcctgacgcacccgtttaccggcgaaccgctgactattcgcgcggggctggacgaggtctggatgcaggcgctgtcacagtttggctggctgggacaactccccgaaaatgaaagggttgagtttgccgcaggcaacgttcaggatgaacagcaagcgcaataa

SEQ ID NO: 120217 - DNA, 999 bp, Enterobacter cloacae
atgatacgtttcgcagtcatcggtacgaactggatcacgcgccagttcgtcgacgccgcccacgaaaccggcaaatataagctcaccgcagtctattcccgcagccttgagcaggcgcagagttttgcgaatgactacctggttgaacatctgttcacctcgctcgatgagatggcgcaaagcgacgccattgacgcggtctatatcgccagcccgaattctctgcacttcccgcaaacgaagctgttcctcagccacaaaaagcatgtgatctgcgagaagccgctcgcctcgaatattgaggaagtggaagccgccattgcgcttgcccgcgaaaaccaggtggtactgtttgaagcgttcaaaaccgccagcctgccgaacttcctgctgttgcagcaatcgctgccgaaaattggcaaagtgcgtaaagcctttatcaactactgccagtattcctcgcgctaccagcgctacctggacggcgaaaacccgaacacctttaacccggccttctcgaatggctcgattatggatatcggtttttactgcctggcctctgcggtcgccctgtggggtgaaccgcacggcgtaaccgccaccgccagcctgctggaaagcggcgtggatgcacacggcgttgtggtgctggactacggtgattttagcgtgacgttgcagcactcgaaggtcagtgactccgtactgccaagcgaaattcagggcgaagacggctcgctggtgatcgaaaaaatctccgaatgccagaagctaagcatcgttccccgcggcggcaaagcgcaggagctgacgcagcctcagcatattaacactatgctctatgaggcagaggtcttcgcccgtctggtagaagacaacgaagtgaaccacccggggctggcgatcagccgcaccacggcgaagctgcaaacggagatccgccgacagactggcgtgatcttccccgcagacggcgtgaatgtggaagccgtcgcgtaa

SEQ ID NO: 120218 - DNA, 1242 bp, Enterobacter cloacae
atgagcacacaatcacgcggtctgttcgcgcgcctggcgcagggcagtcttgtaaaacaaattctggtcgggttggtactgggtattctgctggcgatggtgtcaaaacctgccgcggaggccacggggctgctcgggacgctgtttgtgggcgccctgaaggccgtcgccccggtactggtgctgatgctggtgatggcgtcgattgccaaccaccagcacggacaaaaaaccaacattcgccctattctgttcctgtatctgctgggaaccttctctgctgccttaacggccgtggtgtttagcttcctgttcccgtccacgctgcacctgaccagcgcggccggtgatatcaccccgccgtccgggattgtggaagtccttcgcggcctgctgatgagcatggtctctaaccccatcaccgcactgatgagcggaaactacattggcatcctggtctgggcgattggtctgggcttcgcgctgcgtcacggcaacgagaccacgaaaaacctggtcaacgatttgtccaacgccgtgacctttatggtgaagctggtgattcgctttgcgccagtcgggatctttggtctggtttcttcgacgctggccaccaccggtttcgatgcactgtggggctacgcgcagctgctggtcgtcctggtcggctgtatgctgctggtggcgctggtgatcaacccgctgctggtgttctggcagatccgccgcaacccgtatccgctggtgctgacctgcctgcgtgaaagcggcgtgtatgccttcttcacccgcagctcggcggcaaacattccggtcaacatggcgctggcggagaagctgaatctggatcgcgatacctattcggtgtcgattcctctgggtgcaaccgtgaacatggcaggtgcggcgatcaccatcaccgtgctgacgctggcggcggtgcatacgctgggcattccggtggatctgccgaccgcgctgctgctgagcgtcgttgcatcactgtgtgcctgtggcgcctccggtgtggcgggcggctcgctgctgctgatcccgctggcctgtaacatgttcggtattccgaacgagattgccatgcaggttgtcgcggtcggcttcattatcggcgtattgcaggattcctgcgaaaccgcgctgaactcctctaccgacgtgctgtttaccgcagcggcctgtcaggcggaagatgcacgtttagcgaagaacgccctgcgcagttaa

SEQ ID NO: 120219 - DNA, 1188 bp, Enterobacter cloacae; identical to SEQ ID NO: 119117

SEQ ID NO: 120220 - DNA, 351 bp, Enterobacter cloacae; identical to SEQ ID NO: 119116

SEQ ID NO: 120221 - DNA, 1287 bp, Enterobacter cloacae
atgaaaaaagtgcttttaagcgcagcaatctccgcgaccctgggccttaccgctttgccatcgatggcgcagaatgtggatttacggatgtcctggtggggcggcaatggccgtcaccaggtcactctgaaagcgctggaagagttccataagcagaacccggacatcaacgtaaaagcggaatacaccggctgggacggtcacctctcccgtctgaccacccagattgcgggcggcaccgagccggacgtgatgcagaccaactggaactggctgccgatcttctccaaaaccggtgacggcttctacgatctgaacaagatgaaggacgtgatcgacctgtcgcagttcgatcccaaagagctgcaaaccaccaccgtggacggcaagctgaacggcattccgatctcggtgacggcgcgcgtgttctacttcaatgacgaaacctggaaaaaagcgggtattgcgtacccgaaaacctgggacgagctgatggcggccggtaaaaccttcgagagcaagctcggcaagcaatactacccggtgatcctggagcaccaggatacgctggcgctgctgaattcgtacatgatccagaagtacaacattcctgcggtggatgagaaaaccaaaaagttcagctacacaaaggaacagtgggtggagtttttccagacctacaaaaagctgatcgacagccacgtcatgccggacaccaaatactatgcctcgttcggtaagagcaacatgtatgagatgaagccgtggatccagggtgaatggggcggcacctacatgtggaactccaccatcaacaaatattccgacaacctgaagccaccggcgaaactggagctgggcagctacccaatgctgccgggcgccaccgacgcgggtctgttcttcaaaccggcgcagatgctgtcgattggtaagacgaccaaaaacccggaagcggcagcgaagctgattaacttcctgctcaacagcaaagaaggggttgatacgctgggtcttgagcgcggcgtgccgttgagcaaagtggcggtgcagtatctgaccgaagacggcaccattaaagaggacgatccatccgtggcgggcctgcgcctggcgcagtcgctgccggcgaaactcaccgtctcgccatactttgacgacccacagattgtggcgcagttcggtacctctttgcagtatatcgactacgggcagaaaaccgtggaagagacggccgctgacttccagcgtcaggcggagcgtattttgagacgtgcgatgcggtaa

SEQ ID NO: 120222 - DNA, 891 bp, Enterobacter cloacae
atgaatgaaaacaagctgctggggctcgcatggatatcaccctatatcatcgggctgataatctttacggcattccccttcgtctcatcgtttttcctcagctttacggattacgatttgatgagtccgccggtgtttaacggcatcgaaaactatcgctacatgtttaccgaagacacgctcttctggaaatccatgggcgtgacctttgcctatgtatttttaaccatcccgttaaagctcgcctttgcattaggaattgcctttgtcctgaactttaaattacgcggcatcggctttttccgaacggcctactatattccgtcgatcctcggcagctccgtcgccattgccgtactgtggcgcgccttatttgccattgatggtctgctgaacagctttatcggtgtatttggctttgatccggtgaactggctgggcgagccgtcgctggcgctgatgtccgttaccctgctgcgcgtctggcagttcggttccgcgatggtcatcttcctggccgcgctgcaaaacgtaccgcagtcccagtatgaagcggcaatgatcgatggcgcatcgaaatggcagatgttcatgaaggtgaccgtgccgctgattacgccggtgatcttcttcaacttcatcatgcagaccacgcaggcgttccaggaatttaccgggccgtacgtcattaccggcggcgggccaacctattcgacctatctgttctcgctctacatctacgacaccgcgttcaagtatttcgatatgggctatggcgcggcgctggcgtggatcctgttcctggtggtggccgtcttcgccggtatcgcctttaagtcgtcgaaatactgggtgttctactccgccgataaaggaggcaaaaatggctga

SEQ ID NO: 120223 - DNA, 1179 bp, Enterobacter cloacae
atgaaggctgttacccctgagaagagcgctccttccgggaacctttcccttttccgcatcgcctttgcggtgtttctgacctatatgaccgttggcctgccgctgccggtgatccccttgttcgttcaccaggagctgggctatggcaacaccatggtcggcattgcggtgggcattcagtttttagcgacggtattaacccggggctacgccggtcgcctggcggatcagcacggcgcaaaacgctcggcgttgcagggcatgtttgcctgcgggctggcggggggagcctggctgctggcggcgctgttgccgatagatgcagcgtataaattcgcgctgctggtggcagggcgtctgatcctcggctttggcgaaagccagctgctgaccggcacccttacctggggaatggggctggtggggcctgcgcgttccggaaaagtgatgtcctggaacgggatggcgatttacggcgcgctggcggcaggcgctccactggggctgctgatccacagccagtttggttttgcggcgctggcaggcaccaccatggtattgccgctgctggcgtgggcgtttaacggttcggtacgtaaggtgcccgcccataaaggcgagcgtccttcgctgtggagcgtggtggggcaaatctggcagccggggctcgggctggcgcttcagggggtgggcttcgcggttattggtacctttgtctccctctatttcatgagccgcggctgggcgatggcgggctttacgctgacggcctttggcggcgcgtttgtattgatgcgcgtgctgtttggctggatgccggatcgctttggcggcgtgaaggtggccgtggtgtcacttgtcattgagaccgtggggctggtactgctctggcaggcgccctccgcatccgttgcgctgctgggtgcggcgttaaccggctgcggctgctcgctgatcttcccggcgctgggcgttgaagtggtgaagcgcgtggctccgcaggtgcgcggcacggcgctgggcggctatgcggcgtttcaggatatctcatacggcatcaccgggccgctcgcggggctgcttgcaacgtcgtttggctatccttccgtcttcctggccggtgcggtgtcagcggtggtgggaattgtggtgacgctggtggcgtttcgcaggtcgtag

SEQ ID NO: 120224 - DNA, 507 bp, Enterobacter cloacae
atgaacctgagcgcaatgatttatcctgatacttttattattgagggagagattttcaaaggtaaaagaaactcccaaaagaaacaggtgttaattccatacactaatgaacccgaagtaattattggtcagcatattattcaaagtgtcggaaaaaatgagatcaagttgaaagtattagatatgaagatggttcaaggtggaacgctcaaaagaggtacaaaacatccacatatgctcactctcagcattgaaaacataacagaaaatgaacacaagtcacctactaaaagcagcacattccacattggctcgattaacggtgagcaggttcaagtaggtgaaagcaaccatatgcttgttaatatcagtattactgaactggttgagaaggttgctaaatctggagatccacaggctaaatccgtgttgaaacaattgctggaaaatagcactgttgccagcattgttggtgcaggtgcctcagcgttgttgaatttactgtaa

SEQ ID NO: 120225 - DNA, 1365 bp, Enterobacter cloacae
atgacggtacaactgacagctgtagaaactgtatctgatgctctgttcacctgttcttacctgtgggcgcatggcaagcagtacagtcgcagcgatttggataaagccctccaccagcataaggaccccactacccgttacggaaagctggtggctcgcctcaaccagatagcagcaatgccgtatgaggagctttgtgatgccgggtatctcgacacggaccgcaaacaaatgattaccgcgcggcgttctgtgctggtggaagagataggcgaaggggaaatgaatgccatgctgtctgacgtgcagcgcattcaccgggtcttccctgatgctggtgcaaagttcaggacaaagctgcctctctctcgcggttctgagggctttgatatccgtcaggactatatccttaaacattttctgccagcgcaatcactgtgcagcatttacggtcccagcggttcgtataagagttttctcgctgtatcgtgggcctgtcacattgctgcgggtctgccatgggctgggaagaaggtcacttccggcgcggtgctgtatgtggttggtgaggggggcgtaggcgttccccggcgtataaaggcttgggagcaggtgcacggcatacaggcagacaacctttggctggtcaatcgtccggtgtttcctgtgcgcgagtcagaggtaacggaagtgcttctggctgccagacagattgaagctgaatgtggtgtgccggttcgcatggtggtgatcgatacgctggcccgttgttttggcggtaacgacgagaatgatgctcgtgatatgggggcatttattgaagggtgtgacgttatcaaacagaaaacgggtgcaacggtgctggtagttcaccactccggcaaagatgaagggaaaggcgctcgcggttccagtgctttccgcgctgcgcttgatactgaatttaacgttaagcgtgaaggggatggaaaggcgcttattctgacctgtaccaagatgaaagacgcggaggagccagagcgtaaagcgtatgacctgagaacggcagagctttacaccgatgaagatggtgagcttgtttgctctctggttgtgcacgatcagccgagagaggctaaagaagttgagcctgaattggccaatgtctcccgtcttagcgataaccaccatgcactatggcaggcagtacgcagccgaacagctaagggggagccatgcactatctccgttattaaagacgatctgcgtgcaacactgggggcagataaagtgagaaagtcattcccgcgctggctggacaagctggagagtgagcaaattattcgcatcgagggtgagaacctttacccagtaacagtcgagtaa

SEQ ID NO: 120226 - DNA, 369 bp, Enterobacter cloacae
atgatcagcaatgtgaagtttaacgaacttgctaaccgcgttgatctgctggttgagaaggttttgcgccttgaggctcaggttaaatcacttaccgatagtcagggcggagaaatccctccgggtatgacgccagtagcaacactggctgctgaatacggtatctcaaccaaaaaggctgaggagctggcgaaaaacacaggggtgatgctggttaagctgaaatctggcgggttcgttgcgcctgatgaaaagttcagggaagcggcgcggctggtgttgcgcagtgctaagcgcaaatatggctctgcgtactggttccatcctctgatcggcaaattccagatgagcggaggcataccaaaatga

SEQ ID NO: 120227 - DNA, 228 bp, Enterobacter cloacae
atggataacttttacacctaccgcagcaaaaaagatttgctgttactggcgcaagaggttgctgcgctcatgtcatgtgctgcttacctttcaactatcaagggggaggcggagcgtatccatgtaatgagtttaacgcacctggctcagcgcctttctgacgaactggcaaactcactggatatttctactttttcagaccctgaaacgcaggaggcaagaccatga

SEQ ID NO: 120228 - DNA, 186 bp, Enterobacter cloacae
atgcgtgaattaaccaataaaagtgcgtcaatagcctgtgaactggctgcgttgttgatggttgtcgaagagtacgacgttgatcaggttgagcgtgaaaaccttatcagtctggccagacgagtatcggatcaacttgcggcaagcatggtggagcagaatgaaacgggagcgctcaatggataa

SEQ ID NO: 120229 - DNA, 858 bp, Enterobacter cloacae
atgcgggtgataaataaaacaaaggcgaccttgcagggtcgcccaagtagtcacatcaaatctaaacaggatcagcataccaggccttgcgctggtggtcaaagcctgagcgctcctgtgattgcaggaactgcgccattggcgcggttaaggtgtacggcattggcgcataccccatttccccaaatctggggagaactggatcggcgtgcggggtgtactgcaatgcagcataccccggaggaactccgtagtttcgaccgttacccagattttgggtatcagcttttcggctcaatgcctcgctgctgtaactctttgcggattattcgctttatccatgctgatacagaagcgtcaccatcttgcgccagagcctgtttaattccttcttctaggtttggttctacgcgtaatgcgatctgcttgttacctttggctttaatttctatggttgacatttggttgacacctgattactttgaaatggtaatcaagtgtatgacaggtgcataccaaaaagcaacgccccggactgttagagcagtaccagggcgtctaaccaaaccgttaatcggagtaacagttatggctgatcaacagcatacccaaactcgcccggaatttacatggttattcctggcaaccccagaccacaccccaaaatgcacacctgtagtactccgctttgatgctgatacggaagataaagcccgcgctgcattccccggctgggatttggttttcgctgccaaaatccgcgcccagtctccttgtcgcgttgcgtttttcgattacaccacccgccgtggctgggagttcgatagcgcagctattcaggaggtgcgccatgcgtga

SEQ ID NO: 120230 - DNA, 771 bp, Enterobacter cloacae
atgggaaatttacctgagcttgtacccgtctcgcctggcagtattggcggtcagtcggtttcatctgttagcgccaggagtctccattcctttcttggtgtggggcgcgatttcacgacatggatcaaagggcgcattaatcagtatgggtttctggcgggcgttgattacatcactgttgaaaatctgagctcccccgttccggggagcgcaaaaaatcgccaacagattgagcatgactacatgataactatcgacatgggtaaagagctggcgatggtcgagcgcaacgataaagggcgagaggtacggcgctactttatcaactgcgaacgccaggctaagtctgtctctactctccctcagtctctcccggatgctttgcgccttgctgctgatctggctgaaaagtcccttcatctcgaaacccagctcgctatcactgccaccaaggcaagttttgtcgatcgcttcgtcgaggcgtccggcagcatgggatttcgggaggtatcgaaattgcttggggtgaaagagacccagctgcgccggttcctcattgatcagggggtcatgtatccactggccggaaagctgacgccttatgcccaccatatggatgctggcagattcactcttaagacaggcgagagcacgaacaacgggcacgcttttacgcaggcgaagtttactccgaagggagttcagtggctggctaaaaagctgatagatgctggtgtactggatgggggtaaaaatgcgggtgataaataa

SEQ ID NO: 120231 - DNA, 735 bp, Enterobacter cloacae
atgacaaaatcagaaattgattttagaaaaatgatagttggtacgtacataaacgaattgtttgttgatggtactgattccacatctgtttctattttgcgtgatgcgttcaaagccggtggttcagaaaattctgcccgcaaaatggttaatacaataattggctattttgaagactcggaaaagcccctggaggaatttctttactttattggtgtggatgctaatgaatctggtagcgatgaacaggtaatcaaaaccttactatatatggatgaaaaacaaaccccattcttggctgatgttccattgtcgggtgatggcatcactgttttaaatgccgctcttgcgttgcattttattggcatgaataacaatgcagataaccttgccaggattggcgttaaattgctaatggaaggggtttttagtgatgagatatctcttaaggaatttaatgaaatagctcagaaggcaatttcagaatctcaaagagaaaaggcaaaaaggccacgtagtccatattattcagaggtaattgaagtcattagactcacctggggaaaatatccttgtggtgcgaaaactgcgcttcttgatgctttagctgcccattatcatgggagggtaagtcggaatgcattggataattggataacactctctggcttgaggccaccaaaaccagaaaaatatacaagacttgaattagtattccccccattagccagttaa

SEQ ID NO: 120232 - DNA, 1458 bp, Enterobacter cloacae
ttgcaggataccctaatcgtttggtatggggtgtttgtggaaacattcaaattcactaaagctaaacttgaaagtctgccagctgcggaacgtggtcaggttgagtatggtgataccgtcgttaacggcctgcgtgttcgcgtgggcatcagtggcgttaagagcttctgcatctcccgtaaacgtaatggcaagttcatccgtgccacgctggggcgcttccctgatctcacgattgataatgccagggcaaaggctcttgagctgttgggggatgtagccaccactggcagaaacccgaatgttgaaaggcgtattagcgaaaaggcttccgtgacgcttgctgaggcactggatacttacatcgagagccgtgatgcaaggttaagcgcagatacagcaacgcaatatcgctccatcctgcaaaattactcaggtgactggatgaagcagccaatcgcttcgatcagcagggagcgggtggaggcaagacataaggctgtaactgatggttccgtgtggtttggcgctgacaaatcaacgctacgcgctggtgtaggaaccggtagtaaagcgcaagctgatctatgggcgcgagtgttgcgggctatataccgtttctctcacgaccattaccgagacgatcagggtaaaacccttcttcctgaccctcctacgatggtgctcagcactaagcgaaaatggcatggaacagtcaggaaaactgagcgtatccgtaccaatgagcttgccaggtggtttagcgctttagccagcgttcgcagcttggccgagcagggccgtgatgatattgctgctgcagtttgtgatgcagtggaaatgtcgatttttaccggattacgcaaatcagaaattttagagcttagttgggacagggttaatttaggtggccgctatttctggatagatgccacaaagaacggtgatccgcttgagctacctgtcacggagactcttttaaaactgtttcgtcgtcgagcaaaaatgaaagctgccgatggtgtattagttttccctggtgataagggagttatcaaggaatacaggcatattatcgaacgcataagcgctgccaccgtaccagaacttaaccctgatttgctccagcccatctcgtttaaatggcatgacggtcgtcgcactttcggcactgttgctgagctggtgggcgttggaaactacatcctgaaacgcctacttaatcaccgcacgatgagaagtgccgatgttacgcagggttatttgcatttcagcgccgatgaacttttggagccagcctcaagaatagagcgggcaatccttgaacatgctggaatgtctgaaaatataaaagatattaatactcagttaatggctgttttggaaagtttaaacgaagatcagaaaagaaaactaatcttcgagatttcaaatgataataaaggttataaatcatga

SEQ ID NO: 120233 - DNA, 1488 bp, Enterobacter cloacae
atgacaccacttctcgacgcgcgtgatatcagcaagcagttttcaggcgtaccggtcttaaaaggcattgatttcacgctgcttgcggggcaggtgcatgcgctgatgggcggtaacggcgcgggaaaatcgacgctgatgaagatcatcgccggggtagaaaccccggatagcggtgaactttcggtggcgggtgagtcttttgcacggcttaccccggcgcaggcgcacaggttaggcatttatctggtgccgcaggagccgctgctatttcccaacctgacggtgcgggaaaacatcctgtttcgtctgccgcgagagcgcgatcgggaaaaacgcctggcggaaaaactccggcagctgcaatgccagcttaacctcgacgctaccgccagcaccctcgaggtggcggaccagcagatggtggagatcctgcgcgggctgatgcgcaacgccagaattctgatccttgatgaacccacggcctcgctgacgcccggtgaaaccgaacggctgtttcgccagatccgcgccttgcaggatcttggcgtcgggattgtttttatctcgcataagctgccggagattcgacagctggcgagtcacgtctcagtgatgcgcgacggcgcggtggtgctcagcggcgaaactgcgcattttgacgataacgccctgatcgccgccatgacgcctgtaagccgggaagcatccctgagcgatacgcaaaagctgtggctggcgctgccgggcaaccgccgcacccaggcgcaggattttcccgtgctgcgcgtggaagcgctcaccggggagggctttatcgatctcagccttgagatttacgccggggagattgtcggtctggccgggctggtggggtccgggcgcaccgagtttgccgaaacgctctacggcctgcgtccggttcgcggcgggcgggtgtggctggagagccaggagatcaccgccgatccggtcagttcacgcctgcaaaaagggctggtctatctgccggaagacaggcaggtgtccggcctgtttctcgacgcgccgatccgctggaacaccgtggcgctgaacgagccgtcgctctggcagcagcgaaagcgggagtctgcggtagtggaacgctatcaccgggcgctggggatcaagctcaaccatgcggatcaaaccgtgcgcacgctctccggtggtaatcagcagaaggtgctgctggcgcgctgtcttgaggccaatccgctgctgctgatcgtcgatgaaccgacgcgcggcgtggacgtatcggcgcgcgctgatatttatcagctgctgaaaagcgtggcggcgcagaacgtggcggtgctgatgatctcaagcgatctcgatgagtttcccggcctcgcggatcgggtgctggtaatgcaccagggcgtactcagcggcgagctgccgcgccaggccgtcagcctcgaccggatgatggcgctggcgtttggagggcaatcatga

SEQ ID NO: 120234 - DNA, 219 bp, Enterobacter cloacae
atggatcctctgcttctggcatctgtcggtcagaatgacatcatgatgtggtctgctattattgacatcctccccgccctaaagggcggggaggatgtcaactatgagtgttgcctgaaatgtcgccagcccccggtacagcagaagtatctcgggctttctgcgtttgctcctggtgggtatggcccccgcaagcgggggttattgctaactgggtaa

SEQ ID NO: 120235 - DNA, 828 bp, Enterobacter cloacae
atgggatacgacgcttccggtgttgttgaagcaaccggaccagaggtgacgctgttcaggccaggtgaccacgttttctatgccggtgtgctcgatcgccagggagccaacgcagagtttcagctggttgacgaacgcattacggggataaagccggcagcactaagttttgaagctgcagcgtcggttcctctgaccggtctgacagcctgggaaatgttatttgatcgtctgcagttgtcagtgaacggagatgctgatcagaccctgttgatgcttggcggtgcgggcggagtcccttgtatggctatacagcttgcccgcactctgagtcgggtgaacatcatcgggactgcctcccggcaggagagtgtcagagcggttcgcgggtttggtgcgcattatgtcctggatcattcatgtgcgcttgcgccacaggttgccagccttgctggactccctcccattacccggattttctcaacgtacaccacgccatctgcctgggaaaatatggccgaaattattgccccacaaggccgtatcggactcatcgacgaccctgaaccactggatctgcgtttgatcaaatttaagagcgtttctgttcactgggaggcaatgtttacccgccccatgcatgctactgcggacatgtctaaacagcatgatattcttaacaaactctcatgcatgctggattccggtaagctcaaacctccgttgctggcagagtatggcaggctgaatgctaaagcacttcgccgggctcatgaggacatggaaaataaaaatgtgaacgggaaaattgttttttcagggttctga

SEQ ID NO: 120236 - DNA, 426 bp, Enterobacter cloacae
atgagcaacattaccatctatcacaacccggcctgcggcacttcacgcaacacgctggagatgatccgtaacagcggtaacgaaccgaccattatttattatctcgatacgccaccgacccgtgatgagctgattaaacttatttcagatatgggaattacggtgcgtgcattgctgcgtaagaatgttgagccttatgaacacctgggccttgatgaagagaaattcagtgatgagcagttgattgattttatgcttcaacatccgatcctgattaatcggccggtagtcgttacgccgcttggcactcgtctttgccgcccttcagaaatagtgctggatattctacctgaaggtcagaaaggagcgtttaccaaagaggacggcgaaaagatcattgacgaaacggggaagcgggttaagtaa

SEQ ID NO: 120237 - DNA, 1368 bp, Enterobacter cloacae
atggctggacaaatcagcctgcacctcctgctgaggcaggaaaacatatttacaaaatcatatatgatggggtctgagatgcttttggcagggagtatatttttactgacgctggtactggtgatctggcaacccagaggcctgagtattggctggagcgcgagtatcggggctgtgctggcgctgggaaccggtgtcatccatatctctgatattcccgttgtctggaatatcgtctggaacgcgacagcggcatttattgcggtcatcatcatcagcctgctgctcgatgagtccggcttctttgaatgggccgcactgcacgtctcccgctggggtaacggacgtggccgcctgctgttcacctggatagtcttgctcggtgccgctgttgctgctttgttcgccaatgatggcgccgcgctgatcctgacgccgattgtgattgcgatgctgctcgcactggggttcagccagggcacgacactggcctttgtcatggctgcaggatttattgcagatacggccagcctgccactcattgtttctaacctggtgaatatcgtctcggcggacttcttcgatctgggctttacgcagtacgcctccgttatgatccccgtggatgcggcagcgattgcggccacgctgatcatgctgcatctcttcttccgcagggatattccggcaacgtatgacgtttcgctgctgaagacgcctgccagtgtgataaaggatgcggcaacgttcagggcgggctggattgtcctgttattgctgcttgtcggtttcttcgttctggagccgctggggatccctgtcagcgcgatagcagctgctggcgcagcagtactgtttatcgtggcgaaaagaggtcatggcatcaacacagggaaagtcctgcgcagtgcgccatggcagatcgtgattttttcgctgggcatgtacctggtggtctatggcctgcgcaatgccgggctcacggagtatctgtctggtgtactgaacctgctggcagaaaaggggttatgggcagcaacgttcggcaccggcttcctgaccgcgttcctgtcgtcggtgatgaacaatatgccgacggtgctgattggcgcgctgtcgattgacgggagtacggcgactggcgtcgtcaaagaggcaatgatttatgccaacgtgattggctgcgatttaggcccgaaaatcaccccgattggcagtctggcaaccctgctttggctgcatgtgcttgcccagaaaaatataacgatcacctggggttattacttccgcacgggcattatcatgactctgcccgtgctgtttgtcactctggccgcgctggcgttgcggctttccatcactttgtaa

SEQ ID NO: 120238 - DNA, 321 bp, Enterobacter cloacae
atgctacaacctgttcagcttttcaaaatcctgtcggatgaaacacggctagccatcgtcatgcttctccgtgagtccggagaattgtgcgtctgcgatatctgcgttgccacctgcgaatcgcagcccaaaatttcgcgacatatggctatccttcgcgaggctgatctggttcttgaccgtcgggaaggcaaatggatccactatcgtctgtcaccccatattccggcgtgggcagcagagacaatcacgacgacctggcagtgtctgcgcgaggatgtacgtgaatggctggacaaatcagcctgcacctcctgctga

SEQ ID NO: 120239 - DNA, 699 bp, Enterobacter cloacae
atggaacaatttccagccctgaatactgactgttttgatcaacatattgccgaacgtctgcacctgcaggagcccccacggattctgatcctgtatggctcattaagggagcgctcctacagtcgctttgccgcggaggaagcaggtcgcctgctgacggcgatgggcgcggaggtgaaattctttaacccctccggtttacccctgccggatgatgccccggatacgcaccctaaagtctccgagctacgcgggctggtcagatggtgtgacgggatggtgtggagctcgccggaacggcacggggctatgagcgcggtgatgaaggcgcagatcgactggataccgttgagtgaaggcgcggttcgtccttcgcagggcaagacacttgcagtgatgcaggtttgcggcggttcgcagtccttcaatgccgtgaaccagatgcgcattctgggccgctggatgcggatgttcacaattcccaaccagtcctcggtggcgaaagcctggcaggaatttgatgagaacggaaggatgaagccgtcctcatggtacgaccgtatcgtagatgtcgcagaggagttgtttaaaattacgttgctgctcaggggacaaaccagctaccttgcagatcgctacagcgaacgaaaagagagtcatcaggaactttcgtaccgcgtcaatcaggaaaaaatataa

SEQ ID NO: 120240 - DNA, 306 bp, Enterobacter cloacae; identical to SEQ ID NO: 102371

SEQ ID NO: 120241 - DNA, 1206 bp, Enterobacter cloacae
atgaacgatactgccaggaatgatcacagcccctgggctgtctttctgattttcttccgacttggcctgacatccttcggcggcccaattgcccatctgggttacttccgcgatgagtttgtgacgcgacggcagtggttgaccgagcgcagctatgcagatttggtcgctctgtgccagttccttccgggaccagcaagcagtcaggttggtatagcgctcgggctgtcccgggccggttataccggggcgctggcagcatgggccggcttcacgctaccgtcagcagttgcactgatcctgtttgcgctggggatgaccagttacggggatgtgatgccctctggtgtattgcatgggctgaaagtggtagccgttgcggtggtcgcgcaagctgtatggggcatggcccgaaatctttgcccggatataccgcgtattactgtcatggcagtggcaacctgctttgtgcttcttgtgccatcggcctggggacaggtgggagtaatcgtcactgcggctgtcactggcatgttactgttcaaacctcagcagacgacggtacatgatccgctgcccgtttcaatacggcgtcgcgtcggattgttctggctcacgctgttctttgtgctactgacagggttaccattgctgacggcgatattcccaaatccgacgctgttaatggtagaaactttctaccggaccggatcactggtttttggtggcgggcatgtcgtgctgccattactgcagactgaagtcgttccttctggctgggtcagcactgatacattcctggctggctacggcgctgcccaggccgttcctggaccgttgttcacttttgcagcctttctcggggcttcgatgaaccaggtgccttctggctggctgggtggtctggtttgtctgctggcaattttcgcaccgtccttccttctgattgtgggagcattgccgttctgggaaagtctgcgccgcaatatccgtacacaagcagcgttgcagggtattaatgcagccgtagttggccttctgctggcagctctctatcaaccagtatggacgagcgcagttctcgctccgcaagatttcggccttgcccttgtggcactggtcgctctgatgttctggaaactgccgccgtggctggtcgtagtgagttgcggtgttgcgggttggttgttgagtttagcactgtga

SEQ ID NO: 120242 - DNA, 579 bp, Enterobacter cloacae
atgtcacgagtttttgcctactgtcgggtctccactctggaacagaatacagaaaatcagcgccatgaaattgaagcggcgggttttgccatcagaccccagcggctgattgaggaacatataagtggttcggttgctgccagcgaaagaccagggttcatccggttgcttgatcgaatggaaagcggtgacgtattgattgtcaccaaacttgaccgactcggccgtaatgcgatggatatccgaaaaacagttgaacaactggctactttagatatccgtgttcattgtctcgctctcggaggtgcggatttaaccagcccggccggaaaaatgactatgcaggtgatttcagctgtggctgagtttgagagggatctgctgattgaacgcacacattcagggatttctcgggcaagatcagccgggaaacgcttcggtcgtccgcccatcttgagcgaggagcaaaaaaaaatagtgtcagagcgccttaattccggggccagtatcagtgcggttgccagagaatttaataccacccggcaaaccatactccgggtaaaagcaggacagcaataa

SEQ ID NO: 120243 - DNA, 1542 bp, Enterobacter cloacae
ttgaaagtccagtctgatttgtgggccgagtatgcatcaagagaggtcacccgctgggaacatctggctgaactctaccgctacctggaattatccccttttaaccgggcgctgcaaaaaacctgtattcgccacctttatccccacgccatgcggacagacagaggttttttacttgcggaggaaatgctctcctggctccacaataataaggttattttcccctctgttgaagtgatcgaacgaaccctggccgaagcaacaacacttgccgacagggcggttttttctgcgcttaccgcgcagcttgaaccagggcataaagcggcactggaccgtctgttggtatctgagggtgagcaaccttcacggctggcctggctgctccagcctccgggaaaaattaatggtaaaaatgtcctgcaacatatcgaccggttaaatgcgattgagtcgctggcactccctgacggcattgcactttccgttcaccagaaccgactcctgaaactcgcacgcgaaggcaggaaaatgagtagccgggatctggcaagattcacggatgttcgccgttatgcctcgctggtttgtatcatatcggaggccagatccaccctgactgacgaagttattgatctgcacgagcgtattctgagtagtctgttcagcagggcaaaacgtactcaggccgagcggctccagcaaacgggaaagctgattcagagtaaactgaagcaatacgttaccgtcggacaggcattacttaacgccagagagtccggggaagatccctgggccgcaatagaagacgtccttccctggcaggaattcatcaacagcgtggaagagacgcggttcctgtcacgtaaggacaacttcgacccgttgcatctgatcacagaaaaatacagtacgttgcgtaaatacgccccccggatgctgtccgtgttgcagttcagggctgcccccgccgcaatgcagctcagtgacgcattggataccgtcagagatatgtatagaaaacaactccgaaaagtaccgccttccgcgccaatcgagttcatcccggaaagctggagaaaggttgtgatcacccccaccggcattgaccgaaaatattacgaattttgcgtgctgaatgaactgaagggagccttacgttcaggtgacacctgggtaaaggggtcacgccgctacaggaatttcgatgattatctgatcccgtcagacgattttgaaaaatcactccgggataaccagttaccccttgctgttccggccgattgccatgaatacatcaagagccgtttgacgcttcttgcatcgcgtctggaagaagttaacgcgatggcgctggccggtgatttacccgatgttgatatatcggataaaggcgtgaaaattaccccgctggataacagtgtcccttcagcagcatccccttttggcgatctggtttatggcatgctccctcaccctaaaagggggccgcttggaaaacggaatctatggtcactcccgtttttgcaacaccgattttga

SEQ ID NO: 120244 - DNA, 387 bp, Enterobacter cloacae
atggcaaaacatttgaacaggagtgaaataaaagcaattaaacacattatactgacttgggacggtaaaatcacatggagtgatttatgtgaatcagtgtataagaatctaaacagaactatcacaaggcaatctttaagtgctcatgatgaagttgttgaagcatatagaataaagaaaagtttgtccaatttgaaaaaatctggtctaaagaaaccagctaacttaactattgcggcacaacaaataataaaccttaaagccgaaaacgaaatgttgaaaaaacagaacaatagatacaaagagcaatttagctattggcagtataatgcttacagacatggtctcactatggaacaattgaatagaccatttaataaaaaataa

SEQ ID NO: 120245 - DNA, 429 bp, Enterobacter cloacae
atggacaaaaacatcatcaatccagagtttactctagaagagcaacttatcattattgtcgataagtatatctcaaaaagataccagccaggcgataaaagtttctcataccagctatatctgctttttgttggctatcatttaaagtatttctacccaagacagctatacattcgctctaatcgtaacatagacaacattatgacgatgttcagttctgtatacaaatgccttacaagtactttgttgcagcgattgaacaataaggaggctgttatcagagagctaaactctctcgtgaactatattgacaacaatcaagaaaaagcagaagaaatctatacaatttttaaagctcagtatgaaatgagagttatagagaaagaaattactcacgaagttgtaaaagttagaaatttgcggctttaa

SEQ ID NO: 120246 - DNA, 702 bp, Enterobacter cloacae
atgataagaacagaatggttagagttagagccagaggttttaccactttctacacatagggggatgcttgaccagactcttttatttgaagctacaagcgttgatgaagtgaactggttgattaaaaatggtgttgatatcaaccaccgaaatttcgttggtaaaaccgcactgtggaaatcgggttattatgattatgaaattgaaataatagatcgattgtttgaagcaggtattaatccagatcttttaaattttgaaggtgagcatgttttatcgggaatgggttattttggacatcctgaaatatttatgaagcacaggggcaaaataaagtctactgacattcatatcagggatatacatttatcccacattgataaaatgaaacgaggtattgaaatacttctgggaaatggctttcaggtgcattatccccgctatatgaatattgaggacattactctctgggatgaagagcaggcatggtatcgaacagagcaagagaatattaacatgaaaatatactatatgaaaaaacgaaatgattacatcaaatttttagagtatctggacaaacaaaaaagagctataagattagttagtgtcagagcgaatagcaaggacattactctctttgatattaaggaaatgattgaaagacttcgattaatgaaaccagaattgtatattgttaagtaa

SEQ ID NO: 120247 - DNA, 231 bp, Enterobacter cloacae
atggcttatggaaaaaatcccttctcaaaatcaccactcccaacaggtgattttaaaacctctcaaaaaagacttaccgcagagataaaagaagtcgaaggtaaaaaagtcatttttatctactatgaagggactaatgatgtttatgatggtccagaagcgactcaatacactacacttgaagatgcacaaggtttctgtaacaattataataaacagctaaatatttaa

SEQ ID NO: 120248 - DNA, 192 bp, Enterobacter cloacae
atgaaagctctgaactcaagtattcccgaaaaagatcttttaagaatcgattatgtgaagaaagtaagttgcacagaagaagcaaacaatgtttataactgcattgtcgatgcctcgattagcaatatgaaacagacaaagcctgttaagcttgtgaaagctgatggtatctggaaagaaatacaacaatag

SEQ ID NO: 120249 - DNA, 387 bp, Enterobacter cloacae
atgaataaatttattgttacatcattttttattgcaatattttcaatttctggctgttctacatccggcaaccaaaaaatcaaaaatgaaacggcacagagtctacaatcaaaaataattaaaaacaaaacaactaaggcagagctagttgctcaacttggtgagcctgataccagaacgactcttgacgatggcaacgagcaatggagatatttcatgtataacaatcagttcaatgcctcgacttttatccctgttgttggtttgctaactggcggttcccagactcagtctaaaactctcgaaatcgacttcaatggagaaaccgtaagcaaatggacattctctactgataataacaatacaaaatctggcattcttaattaa

SEQ ID NO: 120250 - DNA, 1158 bp, Enterobacter cloacae
atgaagggtatgcagaagatcaaaaggggtaagagcttcgctggtgtcgttcaatatgcattgaaaccgggagcacatcataaaagtgatcccatcatcattggcgggaacatgttaggtgattcagcccttgaactgatcgctgaattcgatagcaccaagcatcttcgccaggatgtcgcaaaatcagtttggcacaactcgcttcgcttacccaacggtgaatcactaacgaatgaacagtggtctagtatcgcagatgactatatgaaacgaatgggattcagtgatacccatctccgttgctatgtcttacatgacgacgagggccagcatatacacattatcgccagcagaatcgacatagccagtgggaagctctacttaggtaggaacgaaaatcttataagcacgcggatcatcagtgaacttgaaatcactcataacctgacagtgaccatgacagcaccaaagcaaccgaagcgaagaaaggtttcccgcaatgaacagatgctttcagaacggactggccttccctcccccaaagaagctctccaacagatacttgataaaagtttatctgataagccggaccttctaactttcacaaaacgactggaagaagcagaagtcggctggacggcgaatgtcgcttcaaccgggaaaatgaacgggttctcattctcttaccgcgatatagctttcaaggcttcgcagttaggtaagggttactcttgggctaatcttcaaaagcaacttaactacaatcctgaccacttagaagctatacgagcgaccaagaaggctatccctgctcctgctcctgctcctgctcctgctcctgctcctgctcctgctcctgctcctgcaatagttttgaaaaccgctgagagaaaggaaagtatcggtaaaaaaattgcagaactggaactacggctcagagaagacaaacggaacgaaatcgtagaaaagatccttcaaaagaatgcagccaaacagcaaaagcatctcaggctcaccggctggattccctttttacaacggctcatagagcttctcagaaaatatggaaagagcatcctccacaaggttcctacaaacttctcagaagtctattcaacacatcatctgaaacctacaagaaaaattcgtttatag

SEQ ID NO: 120251 - DNA, 414 bp, Enterobacter cloacae
atggaaaaatctaaacatgacgatcagcatcgtgatcgatttaggaaagataaaaatctaaggttgttacgccattattgtatcagtgtccgtttgaatcaggcagagctagagcttttaaacaacagaaggggcaagcataaaaaaggggagtggttaagattaacctttttaaatcacaccccaaccgacatcccgttagtaaatgttgaagcttggaaaatgttgtcagacatatcgcaaaagctaaatcgaattgcgatccatatcgatggtaagagcaaagacagcaagcttacgaatacagaattgtttgcagtcagaagacaaattgtagagcttcgccagcacctgctaaatgctgacatatggagcaaatccgatgaagggtatgcagaagatcaaaaggggtaa

SEQ ID NO: 120252 - DNA, 573 bp, Enterobacter cloacae
atgaccacggacttcatgtatactggttttttatacagttatggtgggtggtgtatgcttaatggatttgctcgctatgctttgactgctagttcggttgccccagtttgcctgacattggcattcttagcttatattaatgataattataagattcttgtttcctcaattcttttggctgtcgtaagtgtggttttttgtgtctttataatcaagcaagcacaaaaatataatccggtcacattgaaaaacttagaatcggcatctccggcagataaggaaataaccaactatttcttgacttacttatttccacttatatctgggccgaccacttttatggattggcgattagccctgtttttttatttaagtcttttcttctacataaagcactcgtcttcgtatagtttcaatccaattttgtctatcatatttggattcaagttttatgaagccgaagatgacactggggtgagttttgttcttttgtcaacaaaacctcttaccaatgcgaagatcaaaggtttgagggtaaagaagcttactgaacatacctatatgattgtataa

SEQ ID NO: 120253 - DNA, 708 bp, Enterobacter cloacae
atggaactttttgcgattacagacagcgaaataccgactagaataattaagattgacatagatgctcccgcacaaacggtagtagaaaatctatttagaactcagaggagtgagtttataaatgaagatatcgaagaaatagagttttgtgcatcttataatgttcaggatggtgagatattttccatcaatccatttgatgacgaaataggcattattaatgcaatcgaacggcctgatgctgttccagtttgggaccccgatgatgtgtcagttcattatttcaaagcgttatttacgggtgagccagcttcgaatggtaatcctactcaagtttggcttcaatgtttcgatagacgacaaataattaataatgaaaaatcctttttccaagtagtaactcagcctggaaatagattctcagtgtccactcgtcctggtttttcgcttagtgatcgattaactgctattcttgtgggtgataaattattgttcaagagtttctttatgctccggcgattttttaacatggaagagtattttaatgaagctactagagaggatttagataactttatcggtaatgatatatttcatgtggaaaatgctgaagattttatgatgtttgcagattctgcaattaaaaagaaagtatctttgataataagttctggaatactcaacgatcagcctattgaaaaaaaataa

SEQ ID NO: 120254 - DNA, 372 bp, Enterobacter cloacae; identical to SEQ ID NO: 85999

SEQ ID NO: 120255 - DNA, 501 bp, Enterobacter cloacae; identical to SEQ ID NO: 85998

SEQ ID NO: 120256 - DNA, 3114 bp, Enterobacter cloacae
atggctaatttctttattcaacggcctgttttcgcctgggtactcgccatcattctgatgattgcgggcgggctggccattttaaaactaccggtcgcgcaatatccgaccattgcgccgccggcggttgcggtgacagcaacctacccgggcgctgatgcccagacggtacaggacaccgtcactcaggttatcgaacagaacatgaacggtatcgataatttgatgtacatgtcgtccaccagtgattccgctggtaacgtcaccattacgctgacgttcgagtcgggtacagatcctgatattgcgcaggtgcaggttcagaacaaactccagctcgccatgccgctgctgccacaagaagtgcagcagcaggggatcggcgtggagaaatccagcagcagcttcctgctggttgcaggctttgtgtcggacaataaaaacctcacgcaggatgatatctccgactatgtcgcttctaatgtaaaagatgcgatcagccgtacttccggcgtcggtgacgtgcagctgttcggtgcccagtatgcaatgcgcatctggctggacagcaacgcgatgaacaaatatcagctcacgccgctggatatcattaaccagctaaaaacgcagaacgaccagattgctgcgggccagttgggcggaacaccgtccgtacctgggcagcaactgaacgcctcaattattgctcaaacgcgtctgaaatcgccggaggagtttggtcgtgtgactctgaaggtgaaccaggacggttcaatggtccacctgaaagatgtggcccgcattgagctgggtggcgaaaactacaacatggtcaccaaaatcaatggccaggcagcaacggggctggggatcaagctggcgactggcgcaaacgcgctggataccgctgccgccatcaagagtaaactggcgcagttgcagcccttcttccctcagggcctgaaagtcgtgtatccgtacgacaccacacctttcgtgaagatctcaatccatgaggtggtgaagacactgtttgaagcgattgttctcgtgttcctggtgatgtacttgttcctgcaaaacctgcgggcaacgcttattccgacgatcgccgtgcccgtggtgttactgggcacctttgcggtactggctgcgttcgggttctccattaacaccctgacgatgttcgggatggtattggcgataggtctgctcgtcgatgacgccatcgtggtggtcgagaacgtagaacgcgtcatggttgaggacaagctgccgccaaaagaggcgacgcagaagtcgatggagcaaatccagggcgccctggtgggcattgccatggtgctttcggcggtatttatcccgatggcattctttggtggttcaaccggggctatctatcgccagttctcgctgaccattgtctccgcgatggccttgtcggtactggtggcgttgatattaacgcctgctctttgtgcaacgctgctcaaaccggtttccagcgaacatcatgaaaagaaaggtggtttcttcggctggtttaacgcgctctttgataagagtgtggagcactacagcaacagcgtaagcggcattttacgtaagaccggccgctatctgctggtttacgtcatcatcgtcggcggcatggcagttctgttcctgcgcctgccttcctccttcctgccggaagaggatcagggggtgtttatgacgatggttcagttgccggcaggggcgacgcaaatgcgtactcagcaggtactcgatcaggttcaggattattacctgacgaaagagaaagcgaacgttgaatcggtctttaccgtaaacggttttagctttagcggacaggggcagaactccggtatcgctttcgtcagcctgaagccatgggaagaacgtccgggcaaggaaaacggcgttgaggcgattgtcagccgcgcgacgaaagcgttcagccagatcaaagacggtcttgtatttccgtttaacctgcctgccattattgaactgggtaccgcaacaggctttgactttgaactgattgaccaggcaaacctggggcatacgcagttaacccaggcgcgtaaccagctgctgggcatggtgagagaacatcctgacttactggttcgcgtgcgtcctaatggactggaagatacgccacagttcaagctggacgtcgatcaggagaaggcacaggcgctgggtgtgagcgtgtctgacgtcaatcagacgatttcaacagcgctgggtggcacctatgtgaacgactttatcgatcacggacgggtgaaaaaagtttatgtccaggctgatgctcgcttccgtatgctacccggagacattaacggcctgtatgtgcgtagcgctaacggcgaaatggtgcctttctctgcctttagcagctctcactgggtgtacggttcaccgcgtctggaacgttacaatgggatgccgtcaatggagatcctcggtgagtctgcccctggcaaaagtaccggtgaggcaatggcgttgatggaaagccttgcgtcaaaactgccttccggcatcggctacgactggacggggatgtcttatcaggaacgactttccgggaatcaggctccggcgctgtacgccatctcactgattgtggtgttcctgtgtctggcggccctctatgaaagttggtcaattcccttctcggtcatgctggttgtgccgctgggggtgatcggcgcgcttctggctgcatcaatgcgagggctgaacaatgacgtttacttccaggttggtctgcttacgacaattggtttatcagccaagaacgccatactgatcgttgagttcgccaaggatctcatggataaagaaggcaaagggattatcgaagccacgcttgaagcctcgcgtatgcgtctgcgtcctatcctgatgacttccctggcattcatccttggtgttatgcctctggtcatcagcagcggtgctggtagtggggcacaaaatgcggtcgggacgggcgtgatgggcgggatgctgtcagccaccctgttggccattttctttgttcctgttttctttgtggttgtccggagacggtttacaaagcacaaggattaa

SEQ ID NO: 120257 - DNA, 300 bp, Enterobacter cloacae
atgagccagcgtacgaaagggatgctgcgcatggtcagccagacgtggctgaccatcgtcctggtctccgtgctgctgatcgcctcgaacgcggccattctgtggtggcagagtcagcagatactcgacaattacgtgagcatccgggagcagaagagcacgcaggcgatgctgtccgagcggaacagcggcgtgcagctctcgacctgcggcgagcagagacgccgctgcgtgagggtgaacccggaagcgggacggttcggagaggattcgagctggatgatactggcggggaaatag

SEQ ID NO: 120258 - DNA, 216 bp, Enterobacter cloacae; identical to SEQ ID NO: 81403

SEQ ID NO: 120259 - DNA, 915 bp, Enterobacter cloacae; identical to SEQ ID NO: 81402

SEQ ID NO: 120260 - DNA, 183 bp, Enterobacter cloacae
atgtggattgtcatccgtattatgatcgactccctcctgaaaaaagcgataattttcagtatgatgagtacccttctgctattcatgtggctgcgtgtattgatcaagctagcaaagaactcgacgaactattgtttggtggtggatatggggaaaatggtgaggggcatgcaagcccgataa

SEQ ID NO: 120261 - DNA, 246 bp, Enterobacter cloacae; identical to SEQ ID NO: 81405

SEQ ID NO: 120262 - DNA, 573 bp, Enterobacter cloacae
gtgggtcagcaactgctggctcagcaccggcagaatctgctggttcagcaggctgtcgatattgcgcgccccggtgtccggcagcaggcaggcatcggtcagtgcgtcgtacagactttcgtggatatcggtcttcataccgtagtgacggttgaggcgtttactgacctgcgccagcttcatttccacgatggtgcgcatcgctgcctgcgccagcggacggtaaatcaccgtctggaagcgcgccagcagcgcgggctggaagtggtcccgcaggacaggacgcagcagttcatgcagatccggctctgtcgcctccggctgttcctccagcatctgcatgatgaggtcgctgccgagattagaggtcatcagaatcaccgtgttgcggaagtcaatttcccgcccctcgccgtcgcgcatgacgccccggtcaaacacctggtagaacaggttcatcacgtcccggtgcgccttttccacttcatccagcagcaccacgctgtacgggcgcttacggacggcttcggtcagaatgccgccctgaccgtaacccacgtagcccggaggtga

SEQ ID NO: 120263 - DNA, 795 bp, Enterobacter cloacae
gtgtggctcctggtattccgaaaggttgatggtgataagggacttctcgccgccgaacagttcatcggccagcgccagggcggtttcggtcttgccggtgccgctcggccccacaagcaggaacacgccctgcgggccgttctccggcgccagaccggttttgctggcgcgcaggcgctgcgcaatggcattgagagcactgtcctgaccgacaacgcgtttcgccagactgtgctcaaggctcagcagttccgtctgctcgtccttcatcagggaagagagcggtacgcccgtccagtcggcgataacggtggcgacggtacgcgcgtccacatccagccccagcagcggggtattctgctgcacggcagtaagctgcatctgaaggtccgcaatctccccctgacgggagatatccgtgcggcaggcaagcagttcttccgtcagtttcagctcctggccgtactgggcttcccgttcgtcgagctgcaaaatgatggcgacctcttcctctccgatggcggccagacgttcgccgtgagcggtgttgctcaccgcgatatcctccagcaacgcctgcttctccatagtcagtgccgtgagctgcgccttcatgcgggtcagcggctccggcaccgtatccaggctcatacggacacgggcagaggcagtatccagcaaatccaccgccttgtcaggaagctggcgtccggtcagatagcgtctggacaacgtgacggcagctttaaccgcctcatccgtaatgtgtacgccatggtgctccgcgtagcgtga

SEQ ID NO: 120264 - DNA, 495 bp, Enterobacter cloacae
atgaatgcgcagcgccagtccttccacgagcgcggtcttacccacccccggttcgccgaccagaatcgggttgttcttgcggcgccgggaaagaatgtccaccatctggcggatttcattgtcgcggccatagaccgggtcgattctgccctcacgggcgcgggcggtgacgtcgagggtgaacctgtccagcgcattctgcaacgccgggttcagctctccttttatatccgcattcaccggacgaccgacaaactccacctcatcaccctgcgtaagctccgcttcctgctgcacctccgggcgttcatccgactgcgcatccagaagtccacgcaggcgctcaagctggctctgcgccagcgtcagcagcggccacaggccgtcgcagcgcagcagtttcggtttttccaccagagccatcaggaggtgaatgctgcggatatgctcttcctccgccagcgaggcgtgcagccaggcatcctgcatcagtga

SEQ ID NO: 120265 - DNA, 492 bp, Enterobacter cloacae
atggcaattccagtctatctgtggctgaaggacgacggcggcgcggacatcaaagggtccgtggacgttcaggatcgtgaaggcagtatcgaagtggtggcccaggagcacaacctgtacatcccgaccgataacaataccggcaagctgaccggcacccgtatccacaccccgttcctgttcaccaaggaaatcgactcctccagcccgtacctgtacaaggcggtgacgaccggccagaccctgaaatctgctgagttcaaatggtacagaatcaatgacgcaggccaggaagtggagtacttcaacacgaagcttgagaacgtgaagctggtgaaagtgaatccgaagatgcatgacatcaaggatcctgctttcgagaagcacaaccacctcgagcagattgaactgcgctacgaaaaaatcacctggacctacaaggacggcaacatcattcattccgattcctggaacgaacgcgccactgcgtaa

SEQ ID NO: 120266 - DNA, 345 bp, Enterobacter cloacae
gtgaactcgcttgtggggatcaaggcgaagcccggctggctgattgtggtcgcgggccataccgacagcaccggggatgaccagtccaaccaggtgctgtcgcttaagcgcgcggagtcggtgcgcgactggatgcgggataccggcgacgtgccggaaagctgttttgcggtgcagggctatggtgaaagccgtcctgtcgccaccaacgacaccccggaagggcgtgcgctcaaccgccgtgtcgaaatcagtctggtgccacaggcgaatgcctgtcaggcgccgggcacgacccatgcgtcatctcaggatgatggcgctgataacaatgtaacggagtaa

SEQ ID NO: 120267 - DNA, 1305 bp, Enterobacter cloacae
atggtctctccccagcacttccagcaacaggccgcctatgcggcctggtctgcggaatgtatcgcccgactgggtctctcccatccctggggggtgattaatgccactttcgaaccggatgtactgaagttgggccgtctacaggcccgtcatctgcacctccggttccctgacgggacattaatcgatacggataatgctgacgacctgccaccggtgctggcgcttgagagtgaaacacaggacgtggtggtggttctggctcttccgctgctgcgcgcgaatggtggcaactgccttaagcccgatgaggtggccgcgcgtcctgttcgctatcgccagcgctggcgggatgtccgcaacctttttggcgatgatacccgccagattgcagtgatgcggccagagctgacgttgcgatttgcccatcagaacaacagcgattacctgacctgtccggttgcccgcctgcaacaagattcgcaggggaactgggcacttgatgagacataccttccgccgctgttggcgttactgggcagtcgctggctgatgacccagctggagcaactgttgacgcaactgcgcgcccgtctgggccgcctgatggacatgcgccgggaaagtaatgagcgcatggcggattttgccgtagccgatgtttcattgttctggctgctcaatgccctgaacagtgctgagcccgtgctgggtcagtttcagcgccacccgcaaagcccgcctgagcgtctctatccggagctggcaaggcttgcaggcagcctgttgacattctcgctggagcatcaggtcagtgcgatcccggcatggcagcatgagcagctgaataacgtcttcccgccgctgtttgatttacttggcgatcttctggaagccagcctgccgtcgcgggtagtggcaattgagcttgagcatgatgaccggcttcacttctggcaggcccgtctgcatgatccacgtctgcgcgaaggggctgattattacctctccgtgcgttcaccgatgccggtggcacaattgcaggagcagttcccgcgccagtgcaaggtcggcagtcccgatcatgtcaggagtatcgtcaattcatcgcgggtgggcgtccctctgatgccgctgcgccatgtgccggcagccattccactacgtctggaaaatcagtatttcagccttgatgtctctcatcctctggccatcgaaatgttccagagcggcacctgtatgttttacgttccgggaatgctcgccgagcctgaacttgaactctttgcggtactgagaacatga

SEQ ID NO: 120268 - DNA, 690 bp, Enterobacter cloacae
atgaatgatcgtaaacgcgctactgccgcgttcattgatattgatgccctgttacaggacacctggctacaggtgatcagtctgcgtcacggcccgacattccaggacggggaaggtcgtacgctttgggagcgctgcattgatgatgtcgggcgtgtgcagcgagaactgaaagcgagcgaactcgatgaagccagctgccagcatattcttacggcacagtgtgcgctgcttgatgaggcggtcaaaggtcgcggtgtagcggatgacgcctgtatacagtggtatgacattcccttacagggatactttcttggcaccatggacgccggtgacacgttatgcgatcggatgcgtgatgtgctgcgtgaaccggctcctgaccacgccgttgtgacctgcttccagcgagtcatgatgctcggattcctcggcaacttccgctccctgaacgatcctgagcggcagaaactcatgaatgcactgaatgaatatgttgcgccgttcagctattcacaaccccatcccgttctggcggaaagccatgccggacgggggataggggggtggctggcatcatggcctatgcgcattggcctgagtgtggtggtggtcaccgcattatggtggggactggattgctggctggatcagacactgcttaccctgctgccgggagccgtgaaatga

SEQ ID NO: 120269 - DNA, 297 bp, Enterobacter cloacae
atgcggccaggcaagcggcagatcgccacagaccagtaccacgggctgacaataattggcttcaggcaggtcctccagacacagggtgaaatcgtgctgcacgcgacggcaggcgacagcccagaacgctatgatgagtcccagtaccgccagcaggacgagaacggaaaccagacgggatgctggcagaaaccacaggcagaccactgcactcagcagggcagcccagagcgcaagcccgcgctgttgtgcagggctcatttcacggctcccggcagcagggtaagcagtgtctga

SEQ ID NO: 120270 - DNA, 621 bp, Enterobacter cloacae
atggtcgccagcgttaagattccgagcgcaccgcgccaggttcgaccatgcggtgtcaggcctcgtccttctggcagtaacgggaggacaaaattcgggaacagggaaataaccgtactgtccgttcccgccggctgccagccagacacctgctgcatcgcagtatggcgggacaaccacgctgtccagacagaggtgaccatgcttccggtcaggatcggacccaatccccacagaaccgcaacaggttcaataacaggaatatcggggttttcatccataaggacagcctggacgtgctgttggaaccagctcatcaggctgttcatcagcacctgttgctgcatcgcaggcgttccgccagaattaacccattcagcaactgagccaggcgctgaagttccactccagacctttaccccttcccccaggatcgccgtctgccagagcatgtcattcatcatcgcactgccgacctgtccattcagaaccagtggcacagaatggccggttgctttacgcaatcgactaatctgccagcgcagggctagcaaacgactggtaaggcgctcactatcagggtgctgctgcggacaaacattgatcatcactgacagctga

SEQ ID NO: 120271 - DNA, 1341 bp, Enterobacter cloacae
atgaaaatttatcgtccgttatgggaagacggggccttcctggccccgcagcagttccagcagcaggcccgctgggatgcacatgtggccgacactgtggcccggatggcgctggcgcacccgtggggtgtgctgtgcgcggagttcgacgaaggcgcgctggccctttcacggctgaatgccacccggctttgcgtgcgctttgcggatggtacgctggtggacacagatctggcggataacctgccgccggtatgtgatttatcagcggcggggagtgatgcagttgaagtgctgctgtgtctgccactcctcagcgccaacggcggtaatctggatgacgggcgggacagtgcccgtccgcgccgctggcagtctgaacgggtgacggtgcaggaactggccgggcatgagcgcagtgaactgacggtacttcgtcatgctctgacgctgcggctgtcgacgcaggaaaacagcgcctggcttacctgcccggtggcgagactgatgcgaaacgcgcaggggcagtgggtactggagcggagctttattccgccgctgctctctttgtctgccagcccgttactgctcagcgaactgagtgatttgctgcaccgccttgcggcccggcgtaagcgcctgatggcaatgcgccgtgaaagcaacgagcggatggcggacttcgcggtggccgatgtatcactgttctggttgctgaacgccctcaacagcgttgagccggtactgacggagctgcaccaggcgccgtcccgccatccggaactgctgtaccgcgagctggcccgccttgccggcagcctgctgaccttttcacttgaacatgatgtggacgccattcccccctatcggcatgacgcgccggaaacggtgttcccgccgctgtttaccctgcttgatagtctccttgaagccagcctgccgtcgcgcgtgatcgctattgaactgaaacagggcgaagaccgggaaatctggcgcgggaagctgcacgacgcgcggctgcgtgaaggggccgatttctatctctccgtacgctccgccatgccaaaccacgaacttcagacgcgcttcccgcaactgtgcaaggcgggcagccacgatgatgtctctgaggtggtgaatatcgccctgagcgggatggtgattaaaccgctgagtcacgttccggcggccatcccgctgcgcctggaaaatcagtatttcgcgctggatctgtccaccgatgctgctcgtgccatgctggaagccgggaactgtaccttctatacgccgggctccctcggtgaggtgaaacttgaactgtttgcggtgctgcgctcatga

SEQ ID NO: 120272 - DNA, 654 bp, Enterobacter cloacae
atgaacgatgccgacattgacctgataaacaaaacgttttatccgggctggctgttggtcagccagttgcgcagcggccaggaggtaaaggacggcgaagcgctgtaccgacgggcctgccggtgggtgaacgccgcgcgtgaatcgctgaacgaagccgggttcagcaccacgtcctgcgaccatatgctgtatgcgtactgcgccctgatggatgagagcgtgctgaaccgggataaacaggatgacggttaccgccagtggcgaaaagacccacttcaggcgcggtttttccgtaccctgaatgcaggggaagagctatgggagcgtatccgtacggccctgcgcgaacctgcgccggatgtggcggtgctgacctgcctgtaccgcactctgcaactgggcttcaccggccagtaccgcacgcaggatgatgagcggcgtgaggatgtggtgcgcgcgctcagtgagcgcgtaccgccgtttgcgctgacccaggaaacgcctgtggtagtcagggcatcccgcctgcgcagcggacgccggatgtactggctgggctgggcggcgggcgtggtggtgctggcggcgctgtggttcaccttctcatcagtgctgtcgcagatggtggcgcagatagcggggcagggataa

SEQ ID NO: 120273 - DNA, 204 bp, Enterobacter cloacae
atgctgcgccagcagcggcagctgttctgcattttgcgcgtgtatgtaccagccctgacgggtttcacgataaacggtatcgggagggaacaggctggtcgtatcgccgcagaccagcaccaccgcaccctgaaaatcttccgggggcaggacatgctctgttaccggtatgacgaactggcgacgccgccaccgatgccatag

SEQ ID NO: 120274 - DNA, 492 bp, Enterobacter cloacae
atggccgattcattccagaatgaggtgcccaaggcacgcataaatttaaagctggctctgcatacaggtggcgcgcagaagaaaatcgaactgccgcttaaactcctcaccgtcggtgatttcagtaatggaaaagagaatcgcccattatcggaaagggagaaaattaacgtcaataaaaataacttcaacagcgtactttcggaatttaacccggaagtgaatctgacggttcctaacacaatggccggggatggttcggaagaaagcataaaactgaatttctccgatattaaggatttcgaacctgaacaggttgcccgccagatcccccagctccgcgccatgctggccatgcgtaatttattacgcgacctcaaatccaatctccttgataacgcaagtttcagaaaagaactcgagaaaattcttaaagacccggcgctgtctcaggaattacgcgacgaaatgagtgcactggccccgaaataa

SEQ ID NO: 120275 - DNA, 1536 bp, Enterobacter cloacae
atgtctgtgaatactgaaaccgcctccgcgcaggggcagaccaccgtactggaaaaagagggcgtttacgcctccctgtttgaaaaaatcaacctgaccccggcctccagcctgggtgatatcaatgcgtttctggatgacgccgcgctttctgacgctccggcgggtgaacgcctgacggcggcgatgcaggtgtttatggactgcatccgcaaatccggtcagccggtggagaagctcgacaaaacgctgattgaccaccatatcgctgagctggatttccagattagccgtcagctggatgccgtaatgcatcaccaggagttccagaaggtggagtccctgtggcgcggcctgaagcagctggtggacagcaccgactaccgccagaacgtgaaaaccgaaattctggatgtgtcgaaagaagatctgcgtcaggactttgaagacgcgccggaacttatccagagcggcctctactggcacacctataccgccgaatacgacaccccgggcggagagccgattggttccgtgatttcatcctatgaatttgacgccagcccgcaggatgtggcgctgctgcgcaacatctctaaagtgtcagctgccgcacatatgccgtttattggctctgtcgggccgaaattcttcctgaaagactccatggaagaggtggctgcaattaaggatatcggcaactacttcgaccgcgcggaatacatcaagtggaaatcgttccgcgacaccgacgacgcccgctacatcggcctcgtgatgccgcgcgtgctggggcgtctgccgtatggcccggacaccgtacctgtacgcagctttaactacgttgagcaggtgaaaggcccggatcacgagaaatacctgtggaccagcgcgtcgttctccttcgcgtcaaacatggtgaagagcttcatcaataacggctggtgcgtgcagatccgtggcccgcaggcgggcggggcggtgaaagacctgcctattcatctgtacgatctgggtaccggcaaccaggtgaaaatcccgtctgaggtgatgatcccggagacccgcgagtttgagttcgccaacctcggctttatcccgctctcgtattacaaaaaccgcgactatgcctgcttcttctcggcgaactccacgcagaaaccggcactgtatgacactgcggatgccacggccaacagccgcatcaacgcacgtctgccgtacatcttcctgctgtcgcgtattgcgcactatctgaagctcatccagcgcgagaacatcggcaccaccaaggaccgccgtctgctggagctggagctgaatacctgggtgcgtagtctggtgacggaaatgaccgatccgggcgatgagttgcaggcatctcatccgctgcgtgacgcgaaggtggtggtggaagatatcgaagacaacccgggtttcttccgcgtgaagctgtttgcggtaccgcacttccaggtggaaggcatggatgtgaacctgtctctggtgagccagatgccgaaagcgaaagcgtaa

SEQ ID NO: 120276 - DNA, 1158 bp, Enterobacter cloacae
atgccctggactgagacccgacctatgcaacgccttgattttatccgtgcctgccatgcaggtacggattctttttcagccctctgccgtctcttcggcatcagccgaaaaaccggttacaaatggcttcagcgttttgacccctctgacctgtcatctctctctgaccggtcgcgtgctccgcactcccactcccgtacagttcctgatgatatcgccgggcagcttacggccctgaggcagaaacaccctgactggggccccaaaaaactgcggatgtggctgctcaatcatcacgtcgattttaccgtccccgctgccagcactatcggcgatatcctcaagcgtgaaggcctggttccggataaaaagcgaaaacgcagaaccccgggcaatcgccagcccctgaccatcatcagtgagaacaatcaggtctggagcgctgattttaaaggcaagttcaggctgctgagccggaaatactgtcatcccttcaccctgaccgacaatcacagccggtatcttctgagctgccggggaacggaccgggagagcgagcccttcgtcaggcagtgcctgacggatgcgttcctggagtacggtctgccggaagtcctgagaacggataatggacagcctttcgcaggaacaggtatcgccgggttaagtcgccttgcagtctggctgataaagctgggcatcagaccggaacgtatcagaaaggggcatccggaagaaaacggccgtcatgagagaatgcaccgttcgctgaaaagtgcagtaaaacagggcaacacctttatgacgatggaagaacaacagcggtggttcagtgactaccgggaagagtttaactacgaaaggccgcatgaagccctggcgggtgcaacgcccggaacggtatggcagccctcaggccgacactgggatggcagggttcctgaatatgcttatccggaaggaggtacggtctacagggtgaaatcaagggggacactctatatggggaaaaaggggacggtgttcctgagtgaagcgctgactgatgagtacatcatgctggaagaacaggatgatggccttgaggccatcatctttaacggaataacgcttgcgtactacgaccgaaaaacccagagtgtgctccggatagactga

SEQ ID NO: 120277 - DNA, 153 bp, Enterobacter cloacae
atgactgagcaggaacagcagcggctgattagtgggctgataaagcagcgtgagtcatggcaaccagccagacagagagcgcataagaagcccgtagcaaagcgcatgagccagcgtgaccgggagcttatggaatgctttcgcaaccgctga

SEQ ID NO: 120278 - DNA, 357 bp, Enterobacter cloacae
atggcaagaccacccaaaccgccagcctaccttgatgagttagccgcgcagcagtggaaagcgaaggcaaagcaactggccgaacgcggggatctgactcccgccgactggaacaaccttgagcttttttgcgtcaactattcgatgtaccgcaaagcagttgaagaccttgccagccgtggattcagcattgtgaacagccagggtggcgagagccggaacccggcgctgagcgcaaaggccgacgctgaaaaaatcatgatcaaaatgtcgtcgctgctgggctttgatccggtaagccgccgccggaatccggtagaaacggaagaggaagacgagcttgaccgtctggaatga

SEQ ID NO: 120279 - DNA, 444 bp, Enterobacter cloacae
atgccgtggcaaccactacgccggtgcaatgagccgggatgtaataagcgggtaaggtccggcaagtgtgacgagcacaggcgggaagcgtggcgggagcaggatgccagacgcggccatcggcgcgcccgtggttactctgcctcatgggagaagtaccgcgctcagtatctgaaacgtcaccccctttgtgttgagtgccagaagctgggcctctacgttcctgcaaagattgtcgatcacatcatccctatcaatggcggtgatgatgttctgttctggccggagtggaaccaccagccgttatgccagacacatcataaccagaagaccacgcagcaggaccccatcaccaaagcgaatcgtaaagcagggctctacatcgagcaggaagagcgggcagcacagcgtaataactggatgtatgaggccagcgatgaatga

SEQ ID NO: 120280 - DNA, 153 bp, Enterobacter cloacae
atgaatgagaaagacgtggtgaatctgtatcagtcactggcccgatgccgtgatggctttgtgcgggcccgcaccagacgcaatgagcgccagccagtgaagcgcatgagcgaacgtgagcgggaggtgatggaatgcttccgcaaccgctga

SEQ ID NO: 120281 - DNA, 357 bp, Enterobacter cloacae
atggcaagaccacccaaaccgcccgcctatcttgatgagatcgcggcgcagcagtggaaagcaaaggcgaagcagctggcggagcgcggtgatctgacgcctgccgactggaacaaccttgagctgtattgcgtcaattactcgatgtaccgcaaagccgtggaagaccttgccacgcggggattcagcatagtgaacagccagggcggtgagagccgtaacccggcactgagcgcaaaagcggatgccgaaaaaattctcataaaaatgtcgtcgctcctgggctttgatccggtaagccgccgccgcaatccggtagaaacggaagaggaggacgatcttgaccgtctgggatga

SEQ ID NO: 120282 - DNA, 525 bp, Enterobacter cloacae
gtgaacggcgacggtgataaaaaatccaaagggttcctgtcttaccctcgcgcggccactgctgataaaacccgtccgttcggcacgctggagaagatggaagccgctgacgtttcctctgatggcctgatcgacctgctgtacaagctgaaagccaaataccgcaagaacgccgtatgggtgatgaactccaacaccgccgcaaaactgcaaaagctgaaaaacggcaacggggattacatctggcgcgatcgtctggttgccggttctcccgatacgctgctgggccgtcctgttcagtatctggaaaccatgccggatgcggaggcgggtaaagcgttcctcgcggttggcgacttcaagcgcggctatttcattgtggatcacaccactggcgtgcgtacccgtcctgacaacatcaccgaaccgggtttctacaaggtgcataccgataaatacctgggcggcggcgtggtggactccaacgccataaaggtgcttgagctttccggctccggttcctga

SEQ ID NO: 120283 - DNA, 189 bp, Enterobacter cloacae
atgaataaaattttacttatcgctgccctggaagagattgctagtcgcgagggccatgaacttaacgggcaggataagctggtaatccgcactaaaacagctatggtgttgggggctaaacagcggcaccgccaacgcatgaagtccccaccttatcagtggcgtaaaccggaaaaccccagacgataa

SEQ ID NO: 120284 - DNA, 615 bp, Enterobacter cloacae
atgcaacaggtattaactactatgaaaaccacgataaaactcagcggctcaatggctcagcgatttggcaggacacatcgccgcgcgttaacgtctgccaatgaagtattcagggcgctatctaacaccattgatggctttgatgcttacctgcgtgaggctcgggcaaaggggctggattttgttattttccgggatcgccgcaatatcggacacgaagagtttgaactcctggggccgggtgatgagctgagaattattccggtaatacgaggaagtaagcgggcaggtctgttccaggctgttctcggtgtagcattgattgctggtggtatagctcttggtccagcaggtgccgcactgattgggaagggcgctgcattaaacattggccttgttggagcatcaatggccttgggtggagtagtccagttactttccccgcaggtatcaggcctgcgaatgcgtcaggaacctgataacaaaccctcctatgcgtttggtggtcccgttaacacgacagcatctggcaatcccgttcccctgctttatgggcaacgggaaattggcggcgcaattatctccgccgggatttatgcagaagatcagcaatag

SEQ ID NO: 120285 - DNA, 228 bp, Enterobacter cloacae
atgcgcctggatattgacgcgctttttcagcggtttcgacagcaggcacatctggcgggcatcgtcgaacacgattcgggcctgatcccggcttaccgccgccgtgtagatatcctgctggcccttttccatcaccagaaaccagttagccagcatggcggccacggtggatttggcgttcttgcgcggcacctcaataaacgcgctgctgtacttccggcggcctga

SEQ ID NO: 120286 - DNA, 504 bp, Enterobacter cloacae; identical to SEQ ID NO: 52325

SEQ ID NO: 120287 - DNA, 234 bp, Enterobacter cloacae
gtggcgcagctcgtcgttgcttacacctttaccttcaacagaagtaccaggcagattgcgctgatcgtcggcgacggcctcaaggcgggtaatttcaacttcaagcgcatcagcctgggcgcggagttcatcgaactgtttgccctcttcatcgttcaggcttcgcttttcgctgtcagctttttccagcaaggaacgcatctgggttttgagtgcggctttctgctggcgtaa

SEQ ID NO: 120288 - DNA, 234 bp, Enterobacter cloacae
gtggcgcagctcgtcgttgcttactggctcgccttcaacggaagtaccaggcagattgcgctgatcgtcggcgacggcttcaagacgggtgatttcaacttcgagggaatcagcctgggcgcggagttcatcgaactttttgccctcttcttcgttcaggctgcgcttttcggtgtcggctttgtcaagcatggagcgcatctgggttttgagtgctgctttctgctggcgtaa

SEQ ID NO: 120289 - DNA, 297 bp, Enterobacter cloacae
atgaccatgcgcccgtggctggcgaacttcgaacaacaaatcaaatctgcgctgctggtggcctccccggttccgggaagccgctatcaggtggagtttgactctgctgaccttctccgcgccacgccaaccgagcgttacgccacttatgagcgaggcatcaagaacgggatcatgaacccgaacgaagcccgtgagcgtgaggggatgccgccgcgtgacggtggtgatgagtttagccaggcatggaagcaggaagtgaagatcagtaaggacggcaaggaaggtgacgcatga

SEQ ID NO: 120290 - DNA, 225 bp, Enterobacter cloacae
ttgatacaggcgtacatcgatgcggcgctggaggtttgccagaagcatatcggcaagcggtttgataacgggctggagtttacgccagctatcaagattggctgtctgatgtacgtatctcagctgtacgagtaccgcacgatgattggtgataccgacgccaaagagataccgatggctgtctctgcgttgtggtctgtctatcgtgatgtgggggtgtactga

SEQ ID NO: 120291 - DNA, 798 bp, Enterobacter cloacae
atgattttgaatgatatcgcaatcattgcgctggcaggctttactaccggtattaccaccgtgctttttggctttggcggcggctttgtcgtagtaccattcgtttatcaactaatgctacggcagaccgaactggcactaaacgccatgcatatcgcggttgctacctctacatcggtgatgatatttaacgcgggctgggtcacctatcgaaactggcgagcttgcgagctttcatcgcaaatgttattcccgttactatggtttatagccattggggctatcatgggttcctgtctggcaggaatatttagtgagagtgttgttcgcgcgctgttcattttctacatgctggcaacaatcagcgattgtttgttgcgtaagggttttctcggaggaagttctctgcgtcgcttgtcacttcctgtagtaacaggcggcggagtgaccattggtatgatagccgcattgcttggcgtgggcggaagcgtaatgacggtacccctgttacggcgccatggttatgcgatgcgtgaatgcattagtgcttctaatccgctttccctgcccgtcgcgctatgtggtgccgtgacgtatgcagttattggctggcaaactattcctgtgaatggatttctcggttttatcaacctgaaaattttaggtatgttggtactaacaggctgggcaggaatagtttttagccgtcgggttatacctgctgtacctgatatttggcacgcacgaatctatgtcatgctgctgttcctggtgttactggcgatgctatttcagtaa

SEQ ID NO: 120292 - DNA, 804 bp, Enterobacter cloacae
gtgcgcaacgtaaagattgaagaggtcgagcagctagatcgtgaagtggtagcgataggcaatgactatgtgcagggatttatgctgccacagcacaaacatcgccgcgcgcagctgctatatggcgcgaccggattaatgcatgtcataacccaggatggagagtggattgttcctccacaacatgctgtttggatcccacccgaaactatgcacgccgtcaaatttgttggcgtgaccactcgcagtctgtatatagaaccagatttcgtgaatgccttcttaaaatatcctcgttgtgaagttattagcgtatcgccattattacgtcagctattgcttgagtcagtggatttaccgccactgtatgaaagcacgcgtgaccgtgcactgataaatctgatgatattggagctggcggctatgccggttcgcgaattcgatattccgctgccgcgacatccggccctactggctctttgtcaggcgtttttactcaatccctcaatccatgatccagcagagcgctgggcaaatgcgctgttcatgagcgacagcacctttcgtcgccatttccttaagcaaatgggcatgtcattttctgtctggcgccaacgagcatgcgtggttagcgcgctggcattgttaataacgggaaaacccgtaaatgaagtagccttgactcttggatacgataatgcatcatccttcgcaacgatgttccgccgtgtcacaggacagccaccttcgtattatcacccggcattattcaaaaagttccacgggacagggcaccgatcatag

SEQ ID NO: 120293 - DNA, 492 bp, Enterobacter cloacae
atgataaataaaatactggtcagtgcctgcctgatgggccttaaagtccgttataacgggaaagagaaagcgcagatgactcatcaacttgctcgctggcaacaggagcagcgcctggtgatccactgccctgagttggctgcggggctacctgttccgagaccacccgctgagattatgtctgctgagggtaaagacgtaatgcgtggacaagccagaataattgaaaacaccggaacagatgttaccgggcattatcaacttgcagcctggctggctctgcgagcagcacaagaagcaggatgtactgctgctttgttaactgatggtagtccaacgtgcggaactcagtttatctacaacggttctttcagtaatcagcgtaaatcgggtatgggagtggcagcgtcattactctccgagcatggtattgcggtattttcagaaactcagtttgcggagcttgtgaactggattgaagaaagggaatga

SEQ ID NO: 120294 - DNA, 1338 bp, Enterobacter cloacae
atgaagatgaaatgcaataacaggttactcagattatctgcctccctgaccttaatttcgttggtggtgactgcggctaatgcaaataacggccaggcggggatatctcccgttgcggcaatgacgatgaaagaaagtattcttttcgctctcgatcgcgacccctcggtgagccagcaggcggcacagctggggatcggccaggcacaaatagacgaagcgcgcagtggctggatgccacaaatagccctgaacgggagtacaggtcacagccagaccaccgattcaagcggctcgttgcgaaattccgcagcctggggcctgagtctgacgcagctggtgtacgattttggcaagaccaacaacagcatcagccagtcttcagctcagcgtgacagctatcgctaccagctgatgagcacgatgtctgccgtcgcggaaaaaacggcgctcagctatgtggaagtgaaacgctacagcgatctgttgcaggcggcaaaagagaacgtgcaggcgcttaaaaacgttgagcagctggccaaactccgcgccgacgctggcgtaagctccacctctgatgagcttcagacccgcacccgtattgccgggatgcaggcgacggtagagcagtacaatgcatccctgaacagcgcccgcgcgcggctggcggtattaactggcatacaggctgaacgctattcaccggttccgggtggtctggccgtggagccggattctctcaatcggattgattattcactgatcccaacggtgatggccgcgcagaacatggagcgttcagcccagtacggcgtagaaaccgcgaagtctcagcactggccgaccttaagcctgaaagggggccggacccggtatgagtcggataatcgcgcgtactgggatgatcagatccagctcaatattgacgcaccgctttatcagggcggcgcggtctcggcgcgcgtccgtcaggccgagggcgcaagggcaatggcatcgtctcaggtcgatcaggcccgttttgatgtcctgcaaaaagcctccgtcgcacaggccgactggaccggggcgcgtggacgaatggaagccgggaaacgtcagctggaaaatgcgttgcgcgcccgcgatgtctacaaaaatgaatataccctgagcaagcgcagcattaacgatctgctcagcgtggagcaggatgtctggtctgccacctccgcgaaaataatggctgaatacgatggctggagtgcggcgattaattacgcctccgcggtggataatctcatgccgcttatcggaatagagaaaaacgctgccgcgaaattacctgatttaagttaa

SEQ ID NO: 120295 - DNA, 606 bp, Enterobacter cloacae
atgattgtactaaagagctttttattcttcgttggcgcagcggccgcttgcgcacttattgtactttgtctttgggttgatatgcggtttgtcggccatgatattccggaattatcactgaccgaaattatgcaggaaacggtattagcgactattgtcgttctccattttcgtctggcgaaaatggacgaatccatgcgttactgcaatattctggtgggtggatttttcctgacaatgctaattcgtgagctggacgcgctttttgatctcatttctcatgggagttgggtgtggttcgcgctgattaccgctctgctggcgttaattcgccccgttatgcattttcgtgctaccctggaacagctggcaaaatatacccaatccccctggtacggtattctgttgagcggcctgctggctgtactggtcttctcccgcctctttggcatgcaggtgctgtggcacgccatcctggagcatggctatatgcgtgtcgtgaaaaacgccgtggaggaaggttcggaatcgttcggttatatgctgtgcctggccgcatcccttggttattacgttacctttcccgctcacgcacgacaaaaataa

SEQ ID NO: 120296 - DNA, 789 bp, Enterobacter cloacae
atgtctgccatggatttatccaaaatgggcactgccaaagtggtgctgaataccagtgattgcaatcatatagttatagaaaagtggcctgtcagcgatgttgagtgggccttttatctctacgcggcaacagagcttaaccaggcagggattgctactccaacgcttttctctgctgatgccaccttacgccagttaaaactagagtatattccgtataaggttgatcagaccgcggtggcaaatgattatgccatagctatgctggggcgcctgcatcgctatcctgcaaattctgaatggctctatcatacgcatacgtggacagaaacagcgcttgaaaacgctctcatgcttttggcattacctgaattaaatgtccggcagcttcgacgatttcagcagaatagtaatgcgttattcgcctgccaaagcctggtttcaggcgacagcaacgcaggcaactggggaagaagagaaaacggtaatttagttctttttgactgggaaaggtttggcaaagggagtcctgctattgacctggctcccctcataaggggaatggggacaaaacaagaatttatagaccttgcagaacgctattgccagctatcctcccatcaaaatatcagggagctggccagagaaattgcagttgtcaaagcctggattgtcacggaagtgattgtcctgcttcatatgcggcgaaagagtacttttcccttgtatctcaactggtacagagagcatcttcccgcctggttagacaacgtggaaaaaatgttatga

SEQ ID NO: 120297 - DNA, 1452 bp, Enterobacter cloacae
gtgaacactctcaaccgtcgtgatttccccggtgcgtgctaccctgaacgtatcatccagtttggcgaaggtaacttcctgcgcgcgttcgttgactggcaaatcgacctcttaaacgagcataccgatctcaatgccggtgtggtgattgtgcggccgatccagagcgattttccgccgtcgctgagcacccaggaaggtctgtataccacgattattcgtggtctgaatgagcagggagaagcggtaagcgatgcgcgtcttattcgttccgtaaatcgtgaaatcagcgtctacagccagtacgatgaatttctgaagctcgcccataacccggacatgcggtttgtcttctccaataccacggaagcgggcatcagctatcatgcgggcgataagtatgacgatgcgcctgctgccagctatccggccaaactgacgcgtctgctgttcgaacgctttacccactttaacggggctgcggataaaggctggatcattattccttgtgagcttatcgactacaacggcgatgccctgcgtgaactggtgctacgttatgcacaggagtgggcactgccggcggcattcattgcgtggctgaatgatgctaacactttctgttcgacgctggttgaccgcattgttaccggctatccgcgtgatgaggtggcagagctggaagctggtctgggctatcaagactgcttcctcgacacggcagaacatttctatctgtttgttattcaggggccaaaatcacttgcagcagaactgcgcctggataaatactcgcttaacgtcctgattgttgacgatatcaaaccgtataaagagcgtaaggtggcgatcctcaacggcgcgcacacggcgctggttccggtcgcttttcaggccggcctggatacggttggggaagccatgaacgacgcggaaatttgcgcgttcgtagagagagctatttatgaggagattattccggtcctggatctgccgcgcgacgagctgcactccttcgccagtgccgtaacggggcgtttccgtaatccgtacattaagcatcagctgctgtcgattgcactgaacgggatgaccaagtaccgcacccgcattctgccgcaactgctggcagggcagaaggcgaccggcaaactgccagcacgtctgacctttgctctggcggcgctgattgcattttaccgtgccgagcgcaacggtgagcgctatccggtgcaggacgatgcgcactggcttgaacgttaccagcagttgtggacgcaacatcacgacaaacaggtcactacccgtgaactggtatcgtcggtgttaagcgtgagcgaacactgggaacaggatctcactctggttaacggactggtagaccaggttgcgctggatctggatgcgattttaagcaaaggcatgcgcgatgcggtgaaaccgctctgctaa

SEQ ID NO: 120298 - DNA, 441 bp, Enterobacter cloacae
atgacgctaaccgtacgtcctttatgcacagatgattacccacaatggcgaccgctgtgggatggctatacccatttttatgagtgctaccttgacgagtccgttaccgcggccacctgggacagggcgctcgcagattcatcatctctgttttgccgtgtcgtggagaaggacggccgcgtcatcggcttcgccatgtgcgtcctgcatgaagggacctggtcaaccgcgcccgtttgctatctggaagatctgtttgttgacgctgccgaacgtggcgcaggggcgggtaaagcgtttatcgacgccctgatcgatgaaggcaagcgggaagggtggtcaaaactctactgggtaacccgcatgaacaatccggcgcgtaagctgtatgatcactatggtgaagccgacgattacgtccggtaccgaatctcgctttag

SEQ ID NO: 120299 - DNA, 741 bp, Enterobacter cloacae
gtggagcatattgatcacatccttgtcgtcgatgacgacagggatattcgtgaactgattgtcgattacctcgtgaaatccggttaccacgcctctggcgcggcgaacgggaaagagatgcgcgtagtgctcgacaaacagcatatcgacctggtggtgctggacgtgatgatgcccggcgatgatggcctgacgctgtgtcgacagctgcgcagcagcaggcataaggatctgccgatcctgatgctcaccgcgcgcaacgaggacacggaccggatcctgggactggagatgggcgccgacgattatgtggtgaaaccgtttgtggcccgcgaactgctggcgcgtatcaaagctatcctgcgtcgttttcgtactatgccgcctaatcttcaggtgaccgaggcagggcgcctggtggtgttcggtgaatggcaactggataccgtggcgcgtcatctgattgataacgaggggatggttgtggcgctcagcggggcggaatatcgccttttgcgcgtattcctcgatcatcctcaacgggtgctgacccgcgatcagctgctgaacctgacgcagggacgtgatgccgagctgtttgagcgttcgattgatctcctggtgagccgcgtgcgacagcgcctgaatgaagatgcccgcacgccggcctacattaaaaccgttcgcagcgaaggctacgtttttaccatgccggtgaccatcgtcgaggccaatgaatga

SEQ ID NO: 120300 - DNA, 1011 bp, Enterobacter cloacae
atgaaggctgctgttgtcactcaggatcatcaggttaatgttacagagaaaaccttacgcgcgcttaaacatggtgaagcgctgctgaagatggagtgctgtggcgtatgccataccgatctccatgttaagaatggtgattttggcgacaaaaccggggtgatcctcggccacgaagggattggtatcgtcaaagagattggtcctggcgtcacgtcgctaaaagtaggcgaccgtgcaagcgtggcgtggttctttgaaggctgtggccactgtgaatattgtaataccggcaacgaaacgctgtgccgtgacgtgaaaaacgcgggttactccgttgacggcggcatggcggaagagtgcatcgtaaccgcggattacgcggttaaagtcccggacgggctggactccgcggcggccagcagtatcacctgcgccggggtcaccacctacaaagcggtaaaagtctctgacatcaaacccggccagtggattgcgatctatggcctgggcggtctgggcaacctcgcgctgcaatacgccaaaaatgtcttcaatgcgaaggttatcgccattgacgtgaatgacgagcagctggagctcgctgccagcatgggcgcagacttaaccgtgaactcccgcagtgaagatgcggcaaaagtgattcaggagaaaaccggcggtgcgcatgcggcggtggtgacggcagtagcgaaagcggccttcaactctgccgttgacgcagttcgcgccggaggccgcgtggtggctgttggcctgccgccggaagcgatgagcctggatattccacgtctggtcctggatgggattcaggtggtgggctctctggtgggtacccgtcaggatctgctcgaagccttccagtttgcggctgaaggtaaggtggttccgaaagtcacgatgcgcccattggaagatatcaacgccatctttaaagagatggaacagggccagatccgtggccgtatggtgattgatttacgttcttaa

SEQ ID NO: 120301 - DNA, 1203 bp, Enterobacter cloacae
atgaaaaagcagattttaattgtgggtagtgggttttccggtatgtgggctgcggtcagcgccgcgcgcctttctgctctggagggtaacaatagcctcagcattgccgtgctggcccctgttgcggaattgcgcgttcgcccacgcttttatgaagagaacgtgtcgatgatggtcgcgccgctgaccgaactgtttgctgagctgggtatcgcctttattgcgggcgaagcacaacgtattgatacctcgtctaaaaccgttttgtatcgcgattcaaacggcgcgattgctgacgtcgcctgggaacgtctgatcctcgcaaccggtagccagactaaacgtcctcctgttgccggtctggctgaatacgcctttgatatcgaccaactcgactccgccaggttattcgagcaacatcttgattcgctggtttcgcgcccctccaccccggagcgtaataccgtggtcgtgtgtggcggcggctttaccggcatcgagctggcaacggaactccctggccgactccgcactcgcttcggcacccatacaaagactaaagtaatcgtagttgaaaggggtgcaaccattggcgggcgttacagcgaggcgctgagaaacaccattgaagaagcaagcagcgcgctgggcgttgaatggcgtttaaacagtgaagttgaagccatcgatgccagcggcgtaacgctgaaaaacggagaacgcattgccagcgccactgtagtgtggacggcaggggtagaagctaaccccctcagcctgcaaattgacggggaacgcgacactcagggacgccttatcgtcaccgacacattgcaggttcctgcgcatccggaggtttacgcgacgggtgatatggcgcatgccaaaacggacgatgtgggcaacacggcgctgatgacctgccagcacgcgatccagttggggaaattcgccggacacaacgcagcggccagcctgttaaatgtggagccgtacccttaccgtcaggtgaactacgttacctgtctggatttgggtagctggggcgcggtatacaccgagggctgggaccagcgcattaaatccgtgcgcgaggaaggcaaaaagatcaaagttgccatcaccaacgaactgatttacccgccagcagcagacaaagtggttgcttttgccgccgctgacccgctggcgaaattcgtgtag

SEQ ID NO: 120302 - DNA, 681 bp, Enterobacter cloacae
atgactcattacctgaacgtgtttttctatgacatttatccgtacatctgcgccaccgtctttttccttggcagctggctgcgctacgactacgggcagtacacctggcgcgcctcgtcgagccagatgctcagcaagcgcgggatgaactgggcttcgaacctgtttcatatcggcattctggggatcttcttcgggcacctgttcggcatgttgaccccgcactggatgtacgcctggtttttacccatcgcggttaaacagcagttagccatgattgcagggggcatttgcggggtgctaacgctgattggcggctctatgctgctgatccgccgcctgttcaaccagcgggtgcgcgccacgtccaccacgccggatattatcatcatgagtatcctgctgcttcagtgcatccttgggctgtcgaccattcctttctccgcccagtatcctgacggaagcgagatgatgaagctggtgggctgggcgcaggggatcgtgacgtttaaggggggctcgtcggaaatgctgagcggcgtcgcgccgatcttccgcgtgcatctggtgctggggatgacgatcttcctcatcttcccgttcacccgcctggtgcacgtgtggagcgcgccgtttgagtacttcacgcgtcggtatcaggtggtgagatcgcgccgttga

SEQ ID NO: 120303 - DNA, 363 bp, Enterobacter cloacae
atgtcatggaacaaagatggcgcaatatcatatgcgaaatcacacgcgcagcccagcagcacgggtaattgtgctcgttacgtaacagaagcgatcagagcgggtggtcgattaaaactccccaacacgcgtctggcaaaagatatggggcgcacattagtcaatgcaggctttcacctggtatatgatcaaccccatgctggtgacgtcgcagttatccaaaatatagttggtcatgatagcggtcacgtttgtatatacgatggtcaacagtggatcagcgattttgtgcaacgcaccatgtatcctgggcaggcttaccgcaacatacaacctcattacgaactgttcaggcatgattaa

SEQ ID NO: 120304 - DNA, 2103 bp, Enterobacter cloacae
atgccccgacccattccactcgaacgttatcgcaacatcggtatctccgcgcatatcgatgccggcaaaacaaccaccactgagcgcatcctgttttacaccgggatgagccacaagctgggtgaagtacacgatggcgcggcaaccaccgactggatggcgcaggagcaggagcgcgggattaccattacgtcggcggcggtaagctgtttctggcctggtatggacagaggctttgaaccgcaccgcatcaatattatcgacacccccgggcacgtggatttcaccattgaggtggaacgttccatgcgtgtgctcgacggcgcggtaatggtctatgactccgtcggtggcgtgcagccgcagtcggaaaccgtctggcgtcaggcgaataaatatcatgttccgcgtctggcattcgtcaacaaaatggaccgcccgggcgcagatttcttccgcgtggtgcggatgatgcaggagcggctgaaagccaatcctgtcccgattgtgatccccgtgggggcagaagaacacttcaccggcgtggtggatctcatcaagatgcgcaccattctgtgggacgatgcgacgcagggcatggcatttagctacgcgccggtgcctgacgatctgctgagtaccgcccagacgtggcgagaaaaaatggtctcgtctgcggcagaagccagcgatgagcttatggataagtaccttgagacgggcgaactggatgaagcggaaatcatcaaaggactgcggatccggactatctccggtgaaatacagcccatgctgtgcggcagcgctttcaagaacaagggcgtgcagcgcatgctcgacgcggtgattgaattgatgccgtctccactggacgtgcccgctattgatggggtagacgaagacggacagcacgccgagcgccacccaagcgatgatgaaccgttctcggcgctggccttcaagctgatgagcgatccgtacgtcggccagctgaccttcatccgcgtctattccggcatactgcgtaaaggcgacgcggtgtacaacccggtgaagggcaagaaagagcgtatcgggcgcatcgtgctgatgcatgccaacgatcgccatgaggtggacgagctgcgcgcaggggatatcgcagcctgtgtcgggctgaaagacgtcaccaccggtgacacgctgaccgacccgaatgcggtgatcacccttgaacggatggagttcccggatccggttatttcgctggcgattgagccgaaaaccaaggccgatcaggagaaaatggggatcgccctacagcgcctggcggcggaagatccgtcgttccgcctgcacacggacgaagagtccggtcagacgattatctccgggatgggcgagctgcatctggagatcatcgtcgaccgcatgaagcgcgagtttggcgttgaggcgaacattggtcgtccgcaggtcacctaccgtgaaaccctgcgtaaagcggtgaaggatattgaaggtaaatttgtccgacagtccggcgggaaagggcagtacggtcatgtggtcctgagccttgagccgttagcagccgggagtggttttgtgtttgaagatgccaccaaaggcggggtggtgccgcgggagtacatcccgtcggtggaaaaagggttgcgagaagccatgaatacgggtgtgctggcgggctatccggtggtggatgtgaaagcgaccctgacgtttggttcttaccatgacgttgactcctcggagatggccttccgcatggcggcgatcctcggcttcaaagagggcgcacggcgggcggacccggttattcttgagccggtcatgcacgttgaggtggaaacgccggaagagtatgccgggaacattatgggcgatctctcctcccgtcgcggcctggtgcaggggatggcagagcagtacggcagccagattattcgcgctgacgtcccgctggctgagatgtttggttatgccaccacgctgcgctcgatgtcccaggggcgcgcgacgtatacgatggaattccatcattttgcggaagctccgcggaatgtggcggatgagattattgcgaagcgtgtgaagagttaa

SEQ ID NO: 120305 - DNA, 510 bp, Enterobacter cloacae
atgcgcgaacaatttcgtgacgtttcgccggaagatgccgatcttcagcccattatcgaggggctttttggtgaatacgctgctcgttacggcgactacttttcaaaggatgcggaagtcgagctgacagagtggtacctggcgccgcaggggctgtttatcgttctggagcgcgatggcgagatcatcgccaccggggcgtataagcccttcgacgaacataccgcagagatcaaacgtatctggacgaataaaacgctgcgccagcaggggctggccgcgcgcgtggtacaggagctggagcgccgggcggtgctggcgggctacagccacatctacctgaccacggggtttcgtcagccggaggcggtgcggctctatctcagccaggggtatcagccgcagttcgatctcaaccgcgacccggaagagtacagccagccgccgttcgacggtcggctgcgtttcaccaagacgctgatccgcgaagcgctcagcaaaaccgcataa

SEQ ID NO: 120306 - DNA, 300 bp, Enterobacter cloacae
atgtgtggacgttttgcacaagcacaaacccgtgaagaatatctggcttacctggttgatgaagccgatcgcaacatcgcatacgacccggaacctattggccggtacaacgtcgcgcctggaaccaaggttctgctgttgagcgaacgcgacgaacaactgcacctcgatccggtgctctggggttacgcgcccgggtggtgggataagccgccaccgattaacgcgcgcgtcgaaaccgcggccaccagccgaatgttcaaacctctggcagcatggccgggcgatctgttgtgctga

SEQ ID NO: 120307 - DNA, 291 bp, Enterobacter cloacae
atggcagcgatcggcagcacgcctttcaaacgtggagatgaagcagagggatttctgattgtgacgtctgcagctgataaaggactggtcgacattcacgaccgccgccccttggttctgtctgcagaagcggcacgtgagtggatgcgtcaggacctaggcggtaaagaagctgaggagatagcagccgacggcgctgtgccagccgacaagtttatctggcacgccgtgacgcgtgccatggggaatgtgaaaaaccagggtccggagctagtcaaggcatcaaaatag

SEQ ID NO: 120308 - DNA, 885 bp, Enterobacter cloacae
atgaatcttcgtgacgtcgaactgttcatcgttcttgcggaaacctgcaatctttctcaggtcgggcgcagacttggcatgagcgcgatgagcgtgtcgcgacatctcgcccagctggaaaaggatttaggcgcgcgtctgtttcagcgcacgacccgcgcggtgtcgctgaccagcgagggtgaagaatttcttccctatgccagaaccatgatggaagcagagcagggcgcacggattatgttcagcgaggacgctggcggggcgtcaggcctgctgaagatcacggcaccctccggcatcggccggcgttacatacttcccctgctgcctgacctcatggaacggaatccaaagatgaaaatcgatctcaacctcagtgatgacgtggtggatatcgtgggtcaggggtacgatgtggccatcagggttgccccgctcagggattcgaacctgattgcccacagactcagcagcaacccccgggtcctctgtgcctcacctgcttatctgtcccagcacgggattcccaccactctggcagaactgaccaatcatcagtgtttgagaacggcaatggtgtctcagtggacatttgtgaaagatgggaacctactcagtcatttatttgagccacggttcatttgtaacaatgtagaaggtgtccgaagtatgtgtaaggccggagcgggcctggcacaactaacaaaagcagatattcactctgaactggcaagcggagaactcgtcgaaatatcacttaatgatgctgattgccacatgctggcaatatgggcgctgtttccgacaaagcgctacctgccatgccgcgttactgtctttctagatgctttaaagtcttcgctgaagagacttatgtcatga

SEQ ID NO: 120309 - DNA, 1095 bp, Enterobacter cloacae
atgcgccacgcatcattattcgaagccacatttattaaccgcactctgttccgcaatcgcatcatggttgcccctatgacgcgtatctccgcgtctgaaaccggcgtaccgggcgaaaagatgcaggattactactcccgctttgcccggggaggtttcggcgccatcatcaccgaggggatctacattgaccaggcgtggtcacagacctatgcgtttcagccaggcatcgtgaatgaagaacagatctgcggctggaaaaatattgtcgaaaaagcacatcagcgcggtgcacgggtcatagcccagctcattcatgccggcgcattgtctcagaaaaatatctaccgtccggactctgccggtccttccgccgtgaaacctaaagggcagcagcttgagttctactatggttccggggaataccgcactccccggacactcagtgaagagcagatccgcgacatcatctccagctttgccgacagcgcggagctcgccgtcagtgatgcaacatttgacggcgttgagatccatgcggcgaacgggtacctgcttgaccagttcctgacagactataccaaccagcgtattgatggatggggcggttccctggaaaaccggctggccattacgctggaagttatccgtgccgtgcgcggtaaaattggcgcagaaaagacgctgggcgtcaggatttcgcagggaaaagtaaacgattttcatcataaatggaaagaaggtgaggacggtgccaggaaaatcttcggtctgctcgccgatgccggcgtggactatatccatgtgaccgaatacaaatcctggctgcctgcattcgagaacagcgacaagagccttgttgagcttgcccgtgaagccgctccggagaccatcatcattgctaacggtgggctggatgacggtgaaacggcagaaaaattactggatatgggcgctgattttgtttctatcggcaaggcagcattagcaaatcctgactggccacgaaaggtccgttgcggtctcccgcttcacgatctgcctgacgatattctttcaccggttgcagacatcaaggaaaaagaacgattttaa

SEQ ID NO: 120310 - DNA, 882 bp, Enterobacter cloacae
atgactgacaagacgaaaaagacgatcaggattttatttccacagtggcagggaggcaatcaggagctctacggatttggtgcccggctgctgcactggctctctccagagacgcgcgctcctctgcacaccataagcataccggaattcaatccggacacgccagaacctgaagaaggtttgctttatcgccagcagttactcagccagcatgatgaggccttggctatcctggaaaaggaagagccagatcatattgtggtgtttggcggtgactgtcttgttgaccaggctccctttgcctggatgaacgacaggcacaatggtgacatgggtgtactgtggatcgattcacaccctgatgtgaaaacaccagtcgactttaccaacggccatacaatggtgctgggaaatcttttgggcggtggcgatccggagttcgcttctaaagtgaagaccccggtgaagccctctcgcgttatgtatgccggtctgattgaagaggggctgactgagcaggagacagcctttatcaacgcacttggtctgcggatagcccgaccgggcgagctttacgagaacagcgacaagattactagctggataaaagaacagaatatccgcaaacttgctgtgcatctggatctggatgtattgaatccggacgtcttccgttcactgctgttcgccgaacccgagcctgagtttgactggcaggcggtgtatccagtaggaaaattaaatctcgcccagacgcttagaataatccgtgatgtatctgctgaaaccgaaatcgtgatcattggtattactgagcatttgccttgggatgcctggaatcttaaagagtttcttaagaagattcccatcatgaacgagtga

SEQ ID NO: 120311 - DNA, 168 bp, Enterobacter cloacae
atgaaaaaaagaaatttcagcgcagagtttaaacgcgaatccgctcaactggtccttgatcagaactacaccgttgcagctgcggccagtgctatggacgtggggctttctaccatgacgcgatgggtaaagcagttacgggatgaacgacagggtaaaataccttaa

SEQ ID NO: 120312 - DNA, 537 bp, Enterobacter cloacae
atggcaaccctgagaggtttcagaatgggacgctggcttgccggcagactcatgaaagaactgggactggttagttgtcagcaacccacccactttctcgatttgttcgccaggaaaccggtaggctgggcaatgtcattctcaccggacagcaagctaaccatcaaagcgctggaaatggcgtgggaaacccgaggtaaaccagcgggagtgatgttccccagtgaccagggtagccactacacaagcaggcagttccggcagttattgtggcgttaccggatcaggcaaagtatgagccgacgcggaaactgctgggataacagcccgatggaacgcttcttcagaagtctgaaaaacgagtgggtgccagtgacaggctatataaactttagcgaagcagctcatgcgatcacagactatatcgtcgggttttacagttcggtaaggccgcatgactataacggtgagttacccccaaacgaatcggaaaaccgatactggaaaaactctaaagccgtggccagttttagttga

SEQ ID NO: 120313 - DNA, 315 bp, Enterobacter cloacae
atggaatatcaaaacctgcgatttgttttcatgcctaggatgcgcaagggcaagcagaaagcctactactctttatcaagcatcggtgcgagattcaacgcagctgtaaaacgtgctggtattcgccgccggaatccgtaccatacgcggcatacttttgcctgctggcttttatctgccggcgctaacccgtctttcatagccagccaaatggggcatgaaaacgcgcaaatggtttatgaagtctacggtgcgtggattgaagaaatgaatggcgaacaggtgctgatgcttaacgataagctcgcacgctaa

SEQ ID NO: 120314 - DNA, 984 bp, Enterobacter cloacae
gtggcgaatgtaaaaattaaatcaaagttaacaaatgaaagtgaaagtaaacaaacagtcccggtcaaaatcttcaaaataactgacatcccggatgtgatggagaaaaaaggttggtcagtgtcagcacgtttcatgcgaaaatggttcaatgatccatattacgaaatgtcacgtgaagagaagctaaataaagttgatgtgaatactgtggacaaaagtcacatcattgaagatttggactttgactggttactaacgtcttcgttacgaatcaagccaatttacgatgcttttgtggagcaagtatcgaatgtcattgagtataatgactatttggggcgaaaaaaacaaatctcacaacagttgtctaatggcctttgttatatcattaacagattggatgaattaggtctttttattgataatgaaataaaggactgttatttaaataatggcaatctgtcagcaatagagcttgataaaacaagtcaatttaactttataaaaattggtagtacattgtgggaaaaagcaacagataccctggatgatgtgtatggtgctcttggttctttcataatcaaaattgcgtttacagaacttaatgtcacgaaagatactgatggttttatgaggttagaaattaaagagcttggattgtacgttagggatacctacgagtttatgaatgatggtgatgatcaaccgttaggctattggggagagaatggtgtcatcaaaccagggattataagtgaactattgaaaaaagaatatattgatgaaggtgactgtagatactttagagttactaactcatcttttgtgagataccgggaaaaatataagggcgaaaataaaactggagattttttcgtatactcgacggtgaaaaaaatccctacgaacattatcatttatttgaataaggtagatatggaggaatatatttactggaaagaggtgaatataaatgcatag

SEQ ID NO: 120315 - DNA, 540 bp, Enterobacter cloacae
gtgagggggaacatacggctctggtggtcattccgttcacgttatgttccttgctactctgtcacgacatggccggtgaacgtgccagggtggctcagtcgccaccaccctggcgacccgggcttccggcggaaaatcgccgcttcgcggtgtcttcggcttattccttccggcttatcggggacgggcggaggtaacatccctgtaaagcccgccctctcggcgcatccctgcgcctcgccccggcctacaggaaacgcctcagcgatttacagccggaccgaggcatcgctgaaagccctcagttattctgaggcaacgttatcgcttttgctttcaaattgctggggaaccctctccctttggggagacggcagggtgaggggggttattcaggcaatcctgcacgcatccgcttcccagcgataccccacgccgtacaccgcgcgaataaacgactggtcggcgtccagcgcctccagcttgcggcgcaggtttttgatgtggctgtcgatggtgcggtcggtcaccacgcggtaa

SEQ ID NO: 120316 - DNA, 1416 bp, Enterobacter cloacae
atgaccgacctacccagtaacgttcgctggcaattgtggatcgtcgcgttcggcttctttatgcagtcgctggacacgactatcgtgaacaccgccctcccctcgatggcgaaaagcctgggggagagcccgctgcacatgcatatggtgattgtcgcctacgtgctgacggtcgccgtgatgctgcctgccagcggctggctggcggataaagtcggcgtgcgaaacatcttcttcaccgccattgtgctgtttaccaccgggtcgctgttttgcgcccaggccaataccctcgaccagctggtgatggcgcgcgtgctacagggcgtcggcggcgcgatgatggtacccgtcgggcggttaacggtgatgaaaattgttccgcgcgcgcagtatatggcggcgatgaccttcgtcaccctgcccggtcaggtcggcccgctgcttggcccggcgctgggcgggattctggtggagtatgcctcctggcactggatcttccttatcaacctgccggtcggtattatcggcgcgattgccaccctgacgctgatgccgaactataaaatgcagacccggcgctttgatttctttggcttcatcctgctggcagctggcatggcgacgcttaccctcgcgctcgacgggcaaaaagggctggggatctcctctctgtcgctcgccctgctggtagcgctgggtgtcaccgccattctctggtatctgtggcatgccagaggtaacgctaacgcgctgttcagcctaaatctgttcaagaatcccacctaccgtcttggtctgttcggcagctttgccggacgcatcggcagcggcatgttgccgtttatgacgccggtatttttacagattgggatgggcttctcgccgttccatgccgggctgatgatgatctcgatggtacttggcagcatggggatgaagcgtattgtggtgcaggtggtgaaccgctttggctatcgccgcgtgctggtggccgccacgatcgggctggcgttggtctgcctgctgtttatggccgtggcgctgctgggctggtactacatcctgccgctggtgctgttctgccaggggatcatcaactccatgcgcttctcgtcgatgaacaccctgacgctgaaagatctgccggacgagctggcaagcagtggtaacagtctgctgtcgatgatcatgcagctctccatgagcgtgggggtcacggttgccggattgctgctcggcatgtacggtcagcaccatctcagcgccgacacccccgtcgcgcatcaggtctttttatacacttacctcagcatggcggtaattatcgctctgcccgcttttatctttgccagagtgccgaatgacacgaccaaaaacgtcgtgatccgacgcggcaaaaggagtgcaccatga

SEQ ID NO: 120317 - DNA, 1086 bp, Enterobacter cloacae
gtgaaaattcttgtgacgggtggagccggctttatcggctcagcggttgtacgacatattattactaatacccatgacgaagtcgtcaatgtggataaactgacgtatgccggcaacctcgagtcccttaacgatgtcagcgccagtgaacgttatgtttttgagcatgcagatatttgtgataaagcggctatggatcgtatttttgctgaacataaaccggatgcggtaatgcatctggcggccgaaagccacgttgaccgttccattactggcccggcggcattcattgaaaccaacattgttgggacgtatgtgcttctggaagctgcacgtgcttactggtcaaccctcgatgacgcagcgaaaaaagcgtttcgcttccatcatatctccaccgatgaagtgtacggggatctgccgcacccggatgaacatccggcatccgcagacctgccgcttttcactgaaaccacagcctacgcgccaagcagcccgtactctgcctccaaagcatccagcgaccatcttgttcgtgcctggctgcgcacttacggcttcccgaccatcgtgactaactgttcgaataactacggaccgtatcatttccctgagaagctgatcccacttgtgatcttgaacgcccttgacggtaaagcgttgccgatttacggcaaaggcgaccagatccgtgactggctttatgtagaagatcatgcgcgtgcgctttacaccgttgtgactcagggcaaaccgggtgagacttacaacatcggtggtcataacgaaaagcaaaacctggacgttgtgcacactatttgcgatctgctggatgagatcgtcccgaaagaaggctcgtaccgcgaccaaattacgtatgttgccgatcgcccaggacatgaccgccgctatgcgattgatgcgcataaaattggggtggaactgggctggaagcctgaagagacgttcgaaagcggaattcgtaagaccgtggaatggtatctgagcaaccaggagtgggttaataacgtaaaaagcggtgcttataaaacctggatcgaacagaactacggggaacgtcaataa

SEQ ID NO: 120318 - DNA, 900 bp, Enterobacter cloacae
atgaatattcttctgttcggcaaaacagggcaagtgggctgggagcttcagcgcgcgctggctccacttggcaatctgattgcgcttgatgtgcattctaaagattactgcggtgatttcagcaacccggaagggattgctgagacggttcgtaatattaaacctgacgtgatcgtcaatgcagccgcacacaccgcagtggataaagcagagtcggaacctgagtttgcgcagttactgaatgcgacaagcgttgaggctatcgcgaaagaagctgcaaaaatcggcgcctgggttgttcactactccacggattacgtcttccccggtgatggcgaaaccccctggagtgaaacggatgcgacggcaccgctgaatgtttatggtcagacgaagctggatggcgaaaaagcattgcaggataattgccctaatcatctgattttccgtacaagctgggtatatgcaggtaaaggcaacaattttgctaagaccatgctacgtctggcgaaagaacgcaaagaactttccgtcattaacgatcaggtgggtgccccaacaggcgctgagctgttagccgactgtaccgcccacgccattcgtatcgcgatggtgaaaccagaagttgccgggctttatcatctggtcgcttctgagacgacaacctggtacgactatgcggcgctggtgtttgaggaagcccaaaaggcaggcgttgagttggcgattgaaaagctgaatgctgtaccaaccacggcatatccaacgcctgcgcgtcgcccgcataactcacgcttaaataccatgaagttccagcagaacttcaacctggtattaccagcatggcatgttggtgtgaagcgtatgctggctgagcttttcacggcgcaatccatttaa

SEQ ID NO: 120319 - DNA, 879 bp, Enterobacter cloacae
atggctacacgaaaaggtattatccttgccggcggatccggcactcgtctctacccagtgaccatggcggttagcaagcaactactgccaatttacgacaaacccatgatttactacccgttgtctacgctgatgctggcagggattaaagatattctgatcatcagtacgccgcaggataccccgcgctttgagcagttgctcggtgacggcagccagtgggggttaaaccttcaatataaagtccagccaagcccggacggactggcacaggcctttatcattggcgaagagtttattggtgacgatagttgtgcgctggtgctgggcgataatattttctatggtcatgacttgccgaaacagctggaagctgcaattggtaaaggtgacggtgcaacggtatttgcctatcacgtcaatgaccctgagcgttatggcgtggtggagttcgataaagatggcacggcaatcagcctggaagagaaaccgctggagccgaagagcaactatgccgttacgggactctatttctacgataacgatgtagtggaaatggcaaagaacctgaagccttctgcgcgcggtgagctggaaattactgacatcaaccgtatttatctggagcagggtcgtctatctgttgcaatgatggggcgcggctatgcgtggctggatacaggaacccaccagagcctgatcgaggcgagcaactttatcgcgacaattgaagagcgtcagggattgaaagtgtcctgcccggaagagatcgcgtatcgaaaagggtttattgatgcagagcaggtgaagaaactggctgagccattgaaaaaaaatgcctatggccaatacctgttgaagatgattaaaggttattaa

SEQ ID NO: 120320 - DNA, 537 bp, Enterobacter cloacae
atgaacgtaattaaaactgatatccctgatgtgctgatttttgaaccaaaagtatttggtgacgatcgtggatttttctttgaaagtttcagccaaaaagtatttgaagaggcggtaggtcgaaaagttgagtttgtgcaggataatcattctaaatcttgtaaaggcgttttgcgtggtctgcattatcaactggaaccgtacgcacagggtaaattggtgcgttgtgtcgctggggaagtatttgatgtagcggttgatattcgaaaatcttcacctacttatgggagctgggtagggttttatctttctgctgaaaataaaagacaattatggatccctgaagggttcgctcatggtttctacgtgataagtgacactgcggaattcgtatataaaacaaccaactattatcatccggatagtgatcgtggtataaaatgggatgatacaacgattggtattaattggcctttaagtgaaaaacctagcttatcagtaaaagatgctaatcagtcgaattttatcgatctatga

SEQ ID NO: 120321 - DNA, 1128 bp, Enterobacter cloacae
atggactctggtcttatatttctttttatcgcaattggcggaaatttacttagtgggacagagatggcaaaggttgttgtcgctcagtctattgccttagtatgtgtattattttgttcttgttttacaacacagtatctattgctaagatataaaaaccaaactcatagttattggttaaagttgtttttattctttgtggttattactgctgctattattgttgtttggttcaagtcacctctgatactgtcactttttgttataggtattgtctctgaattttttaaacgttattgctattatactgataagtcattgatatctggttgcgcaatgatctcaacagccacgatatttacagtaatgatgcttttggcatggtttaaaataataactttcgattcgactagctatgtttatttctattgcctagcaaaatttctcccttttttaatagtggttccgtttttcttcaaaagcaaagaaaaaagcaaagcccatgctgtgtgtaatgatcctttcaagcatataattcaggattctttgaagctgggaggggtattctcaataatcacgatcatttattgggtcactaaccaaggcttttttatccttttcaaaaatgaaattccagcaaatgaattagtaaagttaagaattactcaaaatgtattcggcattgtaacaatgttgataacattgtacgattcaatatttctcaaaagtaatatcaacaatgatgagaaaatatttatctggaaaaaatattttcattttatatttgttgctataggtttgatcattgtcaattacttaatactctattttctttctataaccatttatattcacattgatgtttttgaatatgccttttatcttgctatgggacaattattttatttgttttcacggatgcctattttaataatgaagttaagatataatctcacactgatattaatattgtacttagtgtctctgtttatatcatttgcttatcttttgttaaataaaaacaatagtgatttccaatacattgtagagtcgatagcactcgccaatttcctaatatttgttttctcattgatcatcgtttctaaaaaggaaaaacaacatgggtaa

SEQ ID NO: 120322 - DNA, 837 bp, Enterobacter cloacae
atgggtaagtatactgaggcattttttgctctgtcgactgagttcaaagatcgattgttagcaattggaaaagataaagtgcctgttaattattacactcgacataataattggggtgatcagcttaacaaatatttgattgagaaaataacgaagaaaactgtagtaaaaaataatttcaaacaatcacctcatatacttgcgatcggtagtgttttgtccagtgcatcgtcaaaaagtataatatggggaagtggttttatatccaaggatgccccgttaaaaaccaaagatttagatattagatctgtacgtggtgttttaactcgtaatcgtctgaggaatgaatttggtatcaattgcccagatgtgctgggggatcctgctgtgttgcttcctctgttctatgatgcgaaacacattaccaaaaaatacaaagtgggagtaattccacattacaaagataaagaattgcctgcggtacagtcattactcaaaaacggttgtgttttggttgatattcagaatgatattgaaccatttattgataaaatgaatgagtgcgaattcattatttcctcctcactacatgggttgatagccgcagatacttatggcatacctaatctttgggttgcttttagtgacaaagttcttggaggtgaatataaattctgtgattactatagtaccactgataacaatgcgccgaaggtatgtatcgttagcggagctggcaattattcgcttgaagatttattagcaaagtgtcgttgtaaccaatttactcgtagtaaagaagatttgcttaaggcgtttcctactgaatatcgataa

SEQ ID NO: 120323 - DNA, 1056 bp, Enterobacter cloacae
atgctaatagcactactcgcaatattacttttgctacaattcctttcgttatatcttgaaggtaataaagtaaattctcaggttttaaatagatttttatcattttttgtatttcttacacttctggtgctatttttattcaaaaatgaatattttggtgctgataccaagaactatctaaatgaatttacggactattgtttaaatccagaatcttacactggcttagactatacctataaaataatctttaaccttttgaattttttaatggccgaaagatgtgaagtgaattggataatttggctatggccgtattttgttattagcattattttcattacaacgctggtatttaagcttgataaactgataataataacgctcttctcttcatttattggtattgaattattaacaaatgccatgaggcaagggttttcaattgcaatactttttttatctttttcattttatttcaaacgacgctatgtttcttttggagtcctggctgcactatctctactttttcatcaggcatctgcactaattattgttatatttataatatcaaggttaaattataagttaatcgttccatcaatggtaatgggtatattcttattatttggaacggcatatctagattttgtgccaggtgtattaagtttcaaagcttcaatttataaatatatgccatatgccagtgatgattttatcgtaaggttaattagtctaataaatttaatgctaactttttttgtttatttgtcctttgcaagaaagttcttagtaaaagatgtccttacattaaatgttattattaacatagttgctatatgctcaatagtttcaatcgtgccatatttaggctttagagtggtttacggagtatatcctttatttttattaatgacgtatattagcgttaaacggtatagtcaacaatcgtacaaatttctttcatatgtgacatgtggtaacatctttattaccattttgtggttatgtggttcggctcatatgcgtgcaataccttttgtgagtataatatga

SEQ ID NO: 120324 - DNA, 819 bp, Enterobacter cloacae
atgaaaacaagagaatttggtatctctgttgtaattccatcttataatagaattgatactttacttagagctgtagattcaattgattcttgtcaaaaagaaaaggtggagattatagttgtagatgattgctcagattttgatatttattcggtgttacagcgttataataaaaataatattccaattcgtatttttaaaaatagcacaaataaagggccacaggtctccagaaatgtagggattaggcgtgcttcatttgagtttgttgcgttcctcgactcagatgattattttagccctgataagattgactggcttttacaaattttagcgaatcaagacattgatcttttatatcatgccgttgatggttgcgaaaagtacaataaaatctcaaatttatggtttaaaacttttggtaaattactccattttcgctggtttatatgtctccttaatccatgtgtaacgcctagtgtggtgattagagttaaaaaatgcctttttaatccaacattaagatattcggaagattatgcatttcttttatcatatgtagaatccacaactagggttaagtattgtgatagcgtgcatactacggtaccacgagcaattggtactactggcggggtgtctggtaatttaattaaaatgcgtaaaggtgaaattaaaggtaaggaaaatctacttcggaaaaacaacgtatcacatattttccagtatgccctttctttaatttttgtcagtgctcgtgtattatctgatttaatacgaaaaagatataatttcaaagactttatcaaatcaaattga

SEQ ID NO: 120325 - DNA, 1083 bp, Enterobacter cloacae
atgcgtaatgagaatgcaaaaaaaaatatcgatatcattgggattgtgggggtgccggcttgttatggtggttttgagtcacttgttcaaaatcttgttgatcatcaaagtgaaaaaattaattatacgatttattgctctggaaagtcttataagtcaaaaagtaaaaattataaagacgctcaacttaaatatgtaccattgaaggctaacggcagttcgagtatcccttatgatatattctcactgatgagatccatgttctgtaagcctgatgttgttctcgtgctaggtgtttcaggttgtatttttttgcctctttttaaattcttttcttcagctaagattattacaaatattgatgggcttgaatggcgacgtgataaatgggggaaatttgcaaaatggttcttgaaatattcggaaaaaattgcggttcattattctgatactataattgcagataacgaagcgatatcaaactatgtgttaaaagaatatggagttaaaagtagtgtgatagcttatggtggcgatcatgctatcgggaataaagtagtggctcaagataaggataattattactttacagtttgtcgcatagagccagaaaataatattgaaatgatccttgaagcattcagccagacaaatagctgctttaaaatggtaggtaactggaattcaagcgcgtatgggcgtgaactaagaaatcgatatagtcctttcaaaaatattgaattgctggatccgatatatgacatcaacattctctttgagtacagaagtaagtgtcgaggatacattcatggtcattctgctgggggaacaaatccttcattagtagaagcaatgcatttcaatacggctatttttgcgtttgattgtgatttcaataggtattccactgagaattcagccttttactttaaaaattctaaagaactagttaacttgttggaacaacgatcacaggtgctccacacagctgaagatgagatttgcgcaaataaattaaagcatattgcggaccaacgatatacttggattaatgttactaaacaatatgaagatctgtactga

SEQ ID NO: 120326 - DNA, 1068 bp, Enterobacter cloacae
atgagtcagaagtatctctttatcgatcgtgacggcaccatcatctcggagccacccagcgattttcaggtcgatcgtttcgacaagctggcgtttgaacccgacgtgatcccggtgctgctgaagcttcagaaagcaggctataagctggtgatgatcaccaaccaggacggtctgggcaccgacagcttcccgcaggcggactttgacggcccgcacaacctgatgatgcaggtgctgacctcgcagggcatcgtcttcgacgaggtgctgatctgcccgcatatgcctgccgacgagtgcgactgccgcaagccaaaattgaagcttgttgaacgttatctggctgaagaggcgctggataaagccaacagctatgtgatcggcgatcgcgtcacggatatcacgctggcggaaaacatgggcattgcgggtctgcgctataaccgcgacacgctaaactgggcgatgattggcgagcagctcaccagacgcgaccgctattcccacgttgaacgcaacaccaaagagacgcagatcgacgtgaaggtctggctcgaccgcgaaggcggcagcaagatccacaccggcgtcggtttctttgaccacatgctggatcaaatcgccactcacggcggcttccgtatggagatcaccgttaagggtgacctgtatatcgacgatcaccacaccgtggaagataccggcctggcgctgggcgaagccctgaagctggcgctcggcgacaagcgcggcatcaaccgcttcggctttgttctgccgatggacgagtgcctggcgcgctgcgcgatggatatctccggacgtccgcacctggaatataaagccgactttacctaccagcgcgtgggcgatctcagcaccgagatggtggaacacttcttccgctcgctttcttacactatgggcctgacgctgcacctgaaaaccaaaggcaaaaacgatcaccaccgcgtcgagagcctgttcaaagcctttggccgtacccttcgccaggcgatccgcgtggaaggtgacgccctgccctcgtcgaaaggagtgctgtaa

SEQ ID NO: 120327 - DNA, 930 bp, Enterobacter cloacae
atgaaaccgctgctggatgttcttgttattctggatgcgctggaaaaagaggggagctttgccgccgcctcggcgaagctctataaaaccccttcggctctgagctacaccgtgcaaaagctcgagagcgatcttaatatccaaatccttgaccgcaccgggcatcgcgcgcgtttcacccgtacagggcagatgctgctggaaaaagggcgtgacgtgctgcatacggttcgcgagctggaaaaacaggccgttaagcttcaccagggctgggaaaatgagctggtgattggggttgatgatacattccctttctccctgcttaccccgcttattgaggcgttctatcagcgccacagcgtcacgcggttggtttttatcaatggcgtgctgggcggttcctgggaggccctgacgcagggcagggcggatatcatcgttggcgcgctgcatgagcctccccagttgagcgaatttggttttgcgcggctgggtgttctggagcaggtttttgccgttgcgcctcatcacccgctggcgaatgaaccggagccggttacccgacgcgtcattaaaaactatcgtgccattgtggttggagacagttctcgccccgagtgcggtatttcatcgcagctgctggatgagcaggaggccatcaccgtttttgattttaaaaccaagctggagctgcaaataagcggcctggggtgcggttaccttccccgttatttagcgcagcggtttattgacagcggagcgctggtggaaaaacaagttttagcgcagagcagtaacgaatcggtatgggtgggctggaatgaacagaccgccggccttgccagcgcctggtggcgagacgaaattttagcaaatagtgctatcgcgacagtttacactcaggcagatgatggtaaatcaaccagttag

SEQ ID NO: 120328 - DNA, 1359 bp, Enterobacter cloacae
atgtcgcataacgcaactccaaacacctctcgcgtggaattacgtaaaacgcttacgttgattccggttgtcatgatgggccttgcctatatgcaaccgatgacgctgttcgatacattcggtatcgtttcaggcctcacggacggtcatgtgccgacggcttacggctttgcactgattgcgatcctctttaccgcgctcagctacggtaaactggtgcgccgctatccgtctgccggttccgcctacacctatgcccagaaatccatcagcccgacggtgggctttatggtgggctggtcttcgctgctcgactatctgttcgcgccgatgatcaacattctgctggcaaaaatttattttgaagcgctggtgccatcgattccatcctggatgttcgtcgtggcgctggtggcctttatgacggccttcaaccttcgcagcatcaagtccgttgccaactttaactccgttatcgttgtgcttcaggttgtactgattgccgtgatcctcggcatggtgatttacggtgtgttccacggtgaaggcgcgggcactctggcgagcagcaagccgttctggtctggtgatgcgcatgtgatcccgatgattaccggggcgacgattctgtgcttctcctttaccggttttgatggtatcagcaacctgtctgaagaaacgaaagatgcagagcgcgtaattccgcgtgcaatcttcctgacggcgctgattggtggcctgatctttattttctcgacctatttcctccagctgtacttcccggatatctctcgcttcaaagatccggatgcttctcagccggaaattatgctctatgtggcgggtaaagcgttccaggtcggcgcgctgatcttctccaccatcaccgtactggcgtccggtatggccgcgcatgcaggcgttgcgcgtctgatgtacgttatgggccgcgatggcgtattcccgaaaagcttcttcggctacgtgcatccaacatggcgtaccccggcgatgaacatcattctggtcggtgcgatcgcgcttctggcgattaactttgacctggtgatggcaacggcgctgattaactttggtgcgctggtggcgtttacctttgttaacctgtcggtgatctctcagttctggatccgtgaaaagcgtaacaagacgctgaaagaccacttccagtatctgttcctgccgatgtgtggtgctatgaccgtgggcgcgctgtgggttaacctggaagagagctcaatggtgcttggcctgatttgggcaggtatcggcctggtttacctggcctgtgtgacgaagagcttccgcaacccggttcctcagtacgaagacgtcgcgtaa

SEQ ID NO: 120329 - DNA, 624 bp, Enterobacter cloacae
atgatttttagctctcctgaatttatattcattttccttcctgttacgttattgatatatttttctttgaataaggctcgtaagcacaaattggccaaaattagccttgttcttgcaagtctctatttttatagttattggagcttagaatacctccctttaatggttggatctattatatttaattattctgttggcgtcctaatatccagtaaaactgggagagctaaaaagtttttcttaagtgtaggtgtgattagtaacctagccatacttggatattataagtacgcgaatttcttcctggataatataaacgctttatcaggaagcgatttccatactatgtcgataatattgccaataggaattagcttctatacctttacacaaatagccttcttggtagataactataaaggttatgttaaagaattcgatattattaattatactttatttgtgactttttttccgcatctgattgctggtccgatattgcatcacaaagaaatgatgagtcagtttaagtcaaaatggacctatgccatacgatacagacatattataatgggagtgatgatatttggtgtaggcctttttaaaaaaaacaattattgctga

SEQ ID NO: 120330 - DNA, 699 bp, Enterobacter cloacae
ttgtttaatatatggctgcctataaactttaactctccatataaagctcttgatatacaggatttttggagacgttggcatattaccttggggcgttacctgagagattatctctatatacccttgggcggcaatagatgtcccactttcagggtttacatcaatcttttcataacatttgttttgggggggttatggcatggtgcgagttggatgtttatcatttggggggccttacatgggctcgccttggctattcatagagcctggaaaacattaggcatgagcatgcctaatcctcttgcatggatagttacattcttgtacgttaatacagcatgggttttttttagagcatcatcgatacaagacgcaattaatattttgaaagccatgattgatattgattcgattagttctgtccctataaatgatatactgattaaaaacctttccgcgttaggagtcctcgcagataatatggcagattttgtgcctctgggggttgccgcatatgtgacacaaatgatggcaatattatttggtttctttattatatctagaaaaaactccatcgaaatgtttacatcttcgcgcttgggctaccatacagtaatgaaaacagcttttgttacagtgcttggtctttatatgacattacacacaactagtgcggttttcttgtattttaatttttaa

SEQ ID NO: 120331 - DNA, 1062 bp, Enterobacter cloacae
gtggttattgtttttatttctctattgatcgttcctgcaattaatttaacgcttgggcgaaatgctatgccaaaatctttcccggaaaccttcaaaaaactctataatctggatataatcgagtcatttatcggttatgcaggatatgcaattggcatgtcatctgacccaggtaaggtggttgtagggcatgacggttggttgtttttgggggatgacatatcatccccaataacgacaaaaatccggggtgtggacgataaaataaattcaacaataaatgcaattcacaacaatatgtatgagtggaataatttctttaagcgatgcggagtgaaggaatttagaattataattggacccgataaggacagtgtttatagtgaaaaaacacccgcttggaataggcaaagtgataaaaaaatactaaaaacattaactgcggggcaaaatcttctatttgttaatacctacgatgctttcaaaattgctaaatcaaagttcattatgccaatgtatttccataccgatactcactggaatgagttaggtgcggtagttgcattcagtgctttggttaaaactcttgatggatctgatcttaattttcatgctgaaccaaccgaaaatgatttctatcttaaacatagccgggccggtgacttagctgcatttcttcgtattaataaatttatcgaggatcaagttgttttgcacaaagataagtctattgataatttaattataaagaagtatgattttgaatcgggtaagcttatatcaaaatcaaaattttcacaaattggcgctccttcatcaccagtgctgtttatttcaaatggagcgttaaataatgtaaaagtactatggttacgtgattcatttggcacagcgatgtctccatttatggtgcaggcgtttaaggaaacgctccaggttcattatggaaaagttgatgcttcaacaataaaaaatcttgttaaagcttttagacctgattatgtgtttataactggagttgaaagagatgctttgtcagcattttatagaaagtctttgtaa

SEQ ID NO: 120332 - DNA, 1167 bp, Enterobacter cloacae
ttgaaacgccgtctgtttattgctgtttctttactcgcttcgagtatttcatccgcgctggctgccgagccgctggatttttcacctcagccgcctgccatccaggctggctcctgggtattgatggattacaccacgggtcaaatcttaacggcgggcaacgaacatcagcagcgcaatccggcgagcctgaccaaacttatgacggggtacgttgtcgatcgcgccattgatagccaccgcatcagccccgatgacattgtgacggtcggacgtgacgcctgggcaaaaggcaatccggtctttgacggttcgtcgctgatgtttctgaaggagggcgatcgggtttccgtgcgcgatctcagccgcggcctgattgttgattccggcaatgatgcctgcgtggcgctggcggatcacgtggcgggcggtcagccgcagttcgtcaggatgatgaatgactatgttgaaaaactgaacctgcgcgatacccacttcgaaaccgtacacgggctggatgcaccgggtcagcacagctccgcctacgatctcgccgtgctttcccgggccatcattcacggcgagcctgagttctaccacatgtacagcgagaagagcctgacctggaacggcatcacccagcagaaccgcaacggcctgctgtgggataagaccatgaacgtggatggcctgaaaacgggacacacctcgggcgcgggctttaacctgattgcctcagcggtggacggtcagcgtcgactgattgcggtggtgatgggggcagacagcccgaaaggacgtgaagatcaggcgcgcaagctgctgcactggggacagcaaaattttgatacggtgcagatcctgcataacggtaaaaaagtgggaaccgagcgcatctggtacggcgataaagagcagatcgcgctgggcacggatcaggacttctggctggcattacccaaatcggaagtgccgaacatcaaggcgaaatacgtgatggataaaaaagagctggaagcgccgatcgccgcgcatcagcgggtaggggagatccagctgtacgatcgtgacaaggtggtcgcgcactggccattggttacgctggaaagcgttgaaaagggtgggcttttctcccgtcttggcgattatctgcatcataaactctga

SEQ ID NO: 120333 - DNA, 1419 bp, Enterobacter cloacae
atgcgcacgccctggtatgcaaaacgtaagagttatcgagttctcttctggcgtgaaatcaccccccttgctgtgcctattttcctggagaatacctgcgtcctgttgatgggcgtgctgagcacattcctggtgagctggctcggtaaagaagctatggccggggtagggctggcggacagtttcaatatggttgtgatgtccttctttgccgctatcgatctcggtacgacggtggtggtggcgtttagcctgggtaagctcgatccgaagcgtgcccgcgaagcggccagacagtcgctgatgatcatgaccctcttttcgatcatccttgcggcggttatccattattacggcaaagaaattatcgactttgtcgcgggagaagcgaccagtgaggtgaaggatctggctctcacctacctggaaatgacggtgctgagttatccggcggctgccatcgcgctgattggtagcggtgcgcttcgtggagcagggaataccaaaatcccgctgctgatcaacggcggcatgaacatcctgaacatcattatcagcagcgttttgatttatggcgtcttttcctgggaggggctgggctttgtcggcgcgggtttagggctgaccatttcccgctatattggtgcggcagcgataattggcgtactgatggcgggaattacgccatcgctgcgcctgacgctgaaaagttatttccgtccgcttaacttcgccatcatctgggaagtgatggggatcgggatcccggccagcatcgaatccgtgttgtttaacggcgggaaactgctgacgcagatgtttgttgccgggatgggaacagacgtcatcgccggcaactttattgccttctccattgcctcactcattaacctgccgggaaacgcgctggggtcggcgtcgacgatcatcaccggcagacgtctcggaaaggggcagatagggcaggcggaacggcagcttcggcatgtcttctggctttcaaccattggactgacggcgattgcgtggggaactgcgccttttgccgggctgatggcctcgttctatacgcatgaaaacgacgtgaaagaggtcgtgaaggtgctcatttggctcaacgcggcgtttatgccaatctgggccgcgtcctgggtacttcctgccgggctgaaaggggcgcgcgatgcccggtttgcgatgtgggtctccatgctcggcatgtggggctgtcgcgtcgtggcgggctacacgctgggggtgatgttaggtatgggcgttgtcggcgtctggctggggatgttccttgactgggccgtgcgcggcgcgctgttctactggcgcatggtgagcgggcgctggctgtggaaatatccgcgaaaaaaaccggagcaggaggtttcggaaacggcaagtgcctga

SEQ ID NO: 120334 - DNA, 924 bp, Enterobacter cloacae
atgattcgatttgcctcgttcgtttttacgcttggtattctggttcccgctgcatctgctgtaacctaccccctccctccggagggcagccgcctggtgggggcgccgatcaccatcaccgtgcctgagggcaatactctgccgctcgaagcgtttgcagcgcagcacggacaggggttgagcaatatgctggaagccaacccgggggtggatccgtttttaccgcgagccggaacacagctggtggtaccccagcagtttattctgccgccaacggtgcgcgagggaattgtggtgaacgtcgcggaaatgcgactttactattatccacccggcagcaacacggttgaggtgctgcctattggcatcggtcaggccgggcgcgaaacgccgcgtaactgggtaaccgccgttgagcgcaaacaggaaggcccaacctggtcacccacgccaaatacgcgacgcgcttacgcgaaggaagggaaaacgttgcccgcgttcgttcccgccgggccggataacccgatggggctgtatgccctctatatcggcaggctgtacgcgatccacggtaccaactcaaatttcggcattggtctgcgcgtcagccagggctgcattcgcctgcgtaataacgatatcaaatacctgttcgataacgtttcggtggggacgcgggtacagcttatcgatcagcccgtaaaagtgaccacggagccggacggtagccgttgggtagaggttcatgagccgctttcacgcaatcgcgcggaatttgaatcgacaaataaggtgccgctgcccatttcagccgcacaaaggacgcagctgataagtgaaggggcgggcgctgaactggaacggcggtcggggatgccggtgaagcttgctatgactggtagcgcttcgcttgccgggccttga

SEQ ID NO: 120335 - DNA, 486 bp, Enterobacter cloacae
gtgctggaacagtgcggtctgcggacccgctcccgaagcgtacgccatcctcacaaaataatgtctgcacagacggccccctctcccttgagggagagggctggggtgagggggaacatacggctctggtggtcattccgttcacgttatgttccttgctactctgtcacgacatggccggtgaacgtgccagggtggctcagtcgccaccaccctggcgacccgggcttccggcggaaaatcgccgcttcgcggtgccttcggcttattccttccggcttatcggggacgggcggaggtaacatccctgtaaagcccgccctctcggcgcatccctgcgcctcgccccggcctacaggaaacgcctcagcgatttacagccggaccagagcatcgctgaaagccttcagtcgttctcaaacaagttttttgcttcgggttaaaagttacggaagcttactctccagcggattcttactcaggtaa

SEQ ID NO: 120336 - DNA, 1362 bp, Enterobacter cloacae
atggcacaagtcattaataccaacagcctctcgctgatcactcagaacaacatcaacaagaaccagtccgctctgtcttcttctatcgagcgtctgtcttctggtctgcgtatcaacagcgcgaaagatgacgctgcgggccaggctatcgctaaccgcttcacctctaacatcaaaggtctgactcaggctgcacgtaacgctaacgacggtatctctctggcacagaccactgaaggcgcactgtctgaaatcaacaacaaccttcagcgtgttcgtgaactgaccgttcaggcaactaccggtactaactctgattctgacctgtcttccatccaggacgaaatcaaatcccgtctcgacgaaattgaccgcgtatctggtcagactcagttcaacggcgtgaacgtgctggctaaaaacggcaccatgaaaattcaagtaggtgctaatgatggtcagacaattgccattgatctacagaagattgattcctcaaccttaggtcttaatggtttgtcggtatctaaaaactcgttgaatgttagcgagcctgttactcaaattaataacgccgcaaataccgcacctctgaaggttgacctcagcgctgtagctacagatttaggcgttgatgcgtcgtccttaacgttgagtaacgttttagacaaagacggtaacgcaaccaaaaactatgttgtgaagtcaggaaacgattacttcgcagcgtctgtagaccgtgcaactggtaaagttgcgcttaacaaggccgatgttgagtatacagatcctgcaaatggtcttactactgctgctacacaagcaggtcagtttgttaaagtttcagctgataaagatggaaacgcaacggcctttgttactttccaaggtaagaattacgcggcaaaagcagcttcacttgttgatacaggggatgcaactacagcagcacaaggtaccgctgcgactactaataaagtaacgcttcaactcagtgataaagctgcagtgattggcactggtacagctgcaaacccacagttcccagccacttctgctacagctgaatttgctggcactgctacgaacgatccactggctctgctggacaaagctatcgcgtccgtagacaaattccgttcttcactgggtgcggttcagaaccgtctgagctctgccgtaactaacctgaacaacaccaccaccaacctgtctgaagcgcagtcccgtattcaggacgccgactatgcgaccgaagtgtccaacatgtctaaagcgcagatcgttcagcaggccggtaactccgtgctgtccaaagctaaccaggttcctcagcaggttctgtctctgctgcaaggctaa

SEQ ID NO: 120337 - DNA, 123 bp, Enterobacter cloacae
atgatcaaaacattgttctccggcgacaagctctcgaacgtacaggatatgaactacggttggcaagaggcatctaaaaccgcaatggcgctggatttgaccactgggagcattacgggatga

SEQ ID NO: 120338 - DNA, 651 bp, Enterobacter cloacae
atgtcacgatggaatattgccgcggctcagtatgccccgcggcacaactgtgttgatgagcacgtaaaacatcacctgcactttattgccgaagctgcctggcatgggtgcgatttgatcgtctttccggagctttcgcttaccggcccaggcggaacatccttacccccacctcctgacgatttgcagcttgcccccctccttcacgccgcccagtcacgtttcatcacggtgattgctggtattacgctccagcaacacggccagcgccagagaggactcgcgcttttcacccctaacctgtcgaccatccggcgttatccgcagggcaacggtgcgggtgttattcctggcgataaaaggttaaccatcgtggataaccaggctgacgccccggaactggacccggaggcaacgctgttcaccagcagcctggccgtgggcgagcaccgctggcgacaatcgatcggttcgttacaacgcttcgcgcacaagtacgccatcgcggtattaatggcgaacgcgcgcggcggtagcgcgttatgggatgaaaaaggtcagctgattgtacgtgccgataagggagaactgctgctaaccggttctttaggccaacagggttggcaaggcgatatcattccattaggctag

SEQ ID NO: 120339 - DNA, 1086 bp, Enterobacter cloacae
atggcgaaaaggccagtacgttacgacgctaacctgccccgtaacctgacctatcgtaaaagagacagactttacagctggcgcaatccggtgaccgggcaggagatttctcttggccggattgatcgcaaggatgctgttgcccaggccattgaggccaacaactacattgaccagaattaccttccctcttctctcctggatcgcataaaagacgtgcccactttcacagtggccgcatggctggagcgttacgaggtaattctcgaacggcgtgagctgaaaccaaacacgatgaaggtcaggcgaaaccagatcgccaccattaaggaagagttcggcaaaattcccctcgcttctgtcacgacaaaggacatcgcctcattccttgaagcgtacattctctgcgataaaaagagcatggcttccgggctcaggtctgtgctgatggacatcttcagggaggcgattgtagaaggacatgtcgacaggaacccggcagaaccgacgcgaacgccgacaccgaaagttaagcgagagcgcctgttgctcgaacaatttaccgtcatccgccaggccgcgttaactcattctgactgggcgcctaacgcatgcgatctggcactagtcaccggccagcgtcgtgaggatatttcactgttcaggttcagtgacattaaagacgggaggcttttcgttacgcaggagaaaacaggtcacaaactggcgcttccccttgatttgaggctagacgtcgctgggcttgtgttgcaggatgtcattgatcgatgccgggttaacaacccttccgacttcatgctttactctcctgtccgccgcgggggaagaaagccggggccgctgactcctgacggactcacccaggcctttgcagagataagggattcgaccgggttaaaattcggacctaacccacctcctttccatgagatcaggagcctggcgagtaggctctacgaaaaggagcgcggagaagaatttgctcagcgtttactcggccacaaaaatttaacaatgaccaaaaaatacctggacgcacgcggtgcagagtatgttatggtttag

SEQ ID NO: 120340 - DNA, 210 bp, Enterobacter cloacae
atgatgcaccactacggtaccacaccgctcattcgccagtgcgtcacgccaggcatgatagcaatgcatgaaggccgcacctatcgcgtctcagcagtcattcaggagcgcaaatgggtgtacctgcacaccgatgcagaaatcatccgcctcagtgactgcgtgattgacgtccttctggacggtcacggcaaccctatccagcactaa

SEQ ID NO: 120341 - DNA, 159 bp, Enterobacter cloacae
atgacagtcacccacaacggcaagcagtacacagccaaaaagctcaacgataacgagtggcagcttacttcgttatcggcaccgcgcgacaagctgacgcttaaccgctggcagatgcatatcgctggcctcctgaaacaggttgaggtgaaggtatga

SEQ ID NO: 120342 - DNA, 222 bp, Enterobacter cloacae
atgagtaagaaaaacgacggtggctacgctttccctatggaggcgacagatgccacagcttggagggattgcaatcagggaatgacgttgcgcgactacttcgcggccaaggctatgcagggtcgattagcgaatcctgactggttgtgtagccatgaccgcacggcaaccgaagcataccacatagctgacgccatgctccgcgcccgggagacatcatga

SEQ ID NO: 120343 - DNA, 210 bp, Enterobacter cloacae
atgaaatacacccacaaaaatcattttggtttcgcagctcaggtatggagttgccagttaggtactacccaaggccttgggaccttccctaccgcgaagcgggcgaacatagcagcaagattatttaagcattgggaaaagaaatatccaatcaacgaaataccaaagaaaccgactcatgtagatgcattgaacgccttcggcttctaa

SEQ ID NO: 120344 - DNA, 351 bp, Enterobacter cloacae
atgtctagcgttgcaaactggtcatacacagccacggcgaccatctggcgcaaactggaaggtaatgacgaatacggtgatccgctgggctatgccgaacctgagcaaatcctctgtgattacgagggcgggctcagtaagaggttagccagcctgggtgcagaaatagtcgtgaagaataccgtctggacggagttcgcgctggcggccgccggtgattacctgctgattggcgtatcgaccgaagctgacccggttgtcgctggtgccgacgaggtgaagcaggttatacgctatgccgatacattcgagcgccttgcggatgattacgccatcctgacgggagtgtag

SEQ ID NO: 120345 - DNA, 465 bp, Enterobacter cloacae
atgggcataaaagtgaagggcatcagccaggcgaagaagcacctgaacgatgtcatcaacgacgttaagggccgtaaggtaattcgcgcgttgcagtcggcgatgatgcttataggcacccgggcggcatattacaccccgatcgacacctcaaccctgattaatagccagttccgcgaaatcgacgctggcggggttctcatcaccgggcgcatcggttactcagccaactatgccgcgtacgtgcacgaagcgtcaggaaagctgaaaggccagccgcgcgcgcacttcggcgtgaccagtaaccggtctgagttcggcccgcagaaaccgaaagaattcggtggcgggacaggaaagggcaactactgggatccgcatggtgagccgcaattcctgaccaaaggcgcaaatgacgagcgcgataacgttgattcggtgatgcgcaaggagctttcgctatga

SEQ ID NO: 120346 - DNA, 384 bp, Enterobacter cloacae
atgacacccatgatgcacgagcgggtgcgcaacatgttcggcgacgccgggctaactaccggtttcacggtgcagcagctgatgtacgacgacccgggagatctgtcgaaggcgatcatggtgttcaggcctaacggcgggtcgaatattcggactgacctcggctctgagtatcacgtcctggtcgacgtcgtaggtgcaaaagataagcgcaaagacgcactcaatgccgtacagcgcatcgtcgattacgtccaggccaaccccatggctgacgagtgtgtcggctacatccagaacatgggcgccatccccgcgccggtgctcacagaagaagggcgaatagtcttccgactccagttcgcctgcacttacggcgaatag

SEQ ID NO: 120347 - DNA, 744 bp, Enterobacter cloacae
atggctaattgccagaactcgaacgagcgcctgttcggcggtgcggtcgtgctggaagtcgccgatggctgcccggacgtcaaaccactcgaaggtgagtggatggcgctggccgctggtacgtcgaagggcttcgacttcaacccgaactcggttacctctgatgcggatgacggcggcggctatgtcgagaccatcatcaccaacagtgacttcaccctgagctttgaaggcgaagtgcgcaagaaggacaagctggatcagtacggcgttggcaagttcatcaagtatttcgctgatgagctgaaggccaagcgccagcccggtatctgggtacgcatggactacggcccggtcgaattcgtcggctatatgaacatcacggcgctgagctctgacggcggcaccaacgacatcgtcacgttctcaaccgagttcaaagtcggtgatgcaactaccatcgaagtgaacgagctgactgctgtagcagtgactggcgtaacggtaactccggcgaccagcaccggcacggcgggcggcaccagcaccttcacggtgaatatcgcaccaaccggcgccaccaacaaagacttcactgtagcgactaccgacgcgaccaaagcaacggccaccgcctccggcaacaccgttaccgtgacgcgcgtcgccaccggcagcgcgcagatcatcatcaacaccgaagacggcaactttgtggccgtgcatacggttaccgttacctaa

SEQ ID NO: 120348 - DNA, 669 bp, Enterobacter cloacae
atgaccgctttaaccgatattggcgaactctctatcagcgacagccgcgaaggcgggaaagattacctgctacggccttcattcgaggctatgacgaggatcggcaccccagaagagattgtgcgggcatacgccaccatccacggcaatgatgtcactcagttgattgaggtttgcgctggcacgcttgggtgctttcctgaatggctgtctccttctttcaaccgctccgctgagaaacttttatcaacgtgcatgctggtgctgcaatcgtgctgcgatgacgacctggcgccaatgataggcgagtggaaggggtggcggcactgcgtcgtataccggccgggcagattgccaaagaacgacattatcgtgctggcgcagcacctcatgcagcacggcatcgtcggaaaagccagggttcgccagttgcagcgccatgaaacaggcgagcgcacaacagagtttaaagcattcgactacatcagcgcagctcgcagccacttcggcatgaatcgcgccgaagcctcgcagttaacgatgaccgaatttcagatgctgctggcggcgaaatatccggatcagaaaggcttcacacgcgaagagtacgacagcatcgctgacgaatacctggctaaacaggccgcgcgcagggcaaagcgatcttga

SEQ ID NO: 120349 - DNA, 405 bp, Enterobacter cloacae
atgattatacccgtagtttctgatggtaaaaagcttattgaatcaggtgtttttaatagtattttcaataacataaatgaaagtcagttacagtttgttcacgacggacttgtcgttaaacttgttatttctgcgcattttgataatccgttaaatcttcctgccaatcagcttcccagttttacggcagctgtagagaatggcgaggtcatgcttcgccagccagtaagatgtaacgagaatacaggtgtcactaatggttttgcggccatgttagtgccactggagatcggagttaaaaataacgggaaaaagatatacatgtcgtggacaatcggtgttgctcgatcaatcggtggagtgttggtagcgactacacattactcgttttatgaggatgtgtaa

SEQ ID NO: 120350 - DNA, 363 bp, Enterobacter cloacae
atgaataatatccaaccacatattggtgatcagcatggagcgcctgagccacaagacgtgaagccatctgtcaaaagctctaactctggtggtgagtacattccgggtacgattgctcagcagattggaactggagagcatgctagagattcattcatatggatgaccctaaaatattgcttttatcttggggcgatttttagcgtttgcattatgttggcttacttccattttgtttttgacaaaagcgatcctgacaagatcgatgtggttgcggcattgaaagatgtatggtcaattttcacgcctattctcacgctagcgttgggttatgccttcggtaaacgagaaaataccaactaa

SEQ ID NO: 120351 - DNA, 2928 bp, Enterobacter cloacae
atggcaggtgagaagagcgccggtagcatcgtttatgaaatcagcgccgacgttgagccgctgttacaaggcggcaaacaggccattgatgctctggataaactggaggctgcggcacagcaatcaggcaaggggatggataacctcgacgagagcacctcacaaaccggatcggcgtttacagaactggctggatatgccaactccatggacaaccagctgcgcaagctgaacaccaacgtgagcggcattgcccgtgcaatggaagaggcccgtagcggcaccggtggtgcgagcagtgaattcagtcgtgcagaatcaatcattgaggcgctgggtaaccagttagctgtgctggatgaagcgcaggagaatggcgcgcgcagtgcagctgttcttgctgcacagcttcgcgccgggtcgaaagcgacagacgaagagaagcagaagatcggcgagttgaccgggcggctcttcgacatgaaaggtgctgctgatacttcgatgggcagcaacaaaggctggaagtccagcatgcagcaggctggttaccaggtgcaggactttatcgtacaagtccagggggggcagtctgcattggtagcattcgcccagcagggatcgcaactcgctggcgcgttcgggcctggcggcgctgttttcggtgccataattgcgcttggttcagttctggcgggtgtgcttatcacttcgcttaatggcggcaagaatgccatggacgcgctgaaagatgcagccgaagcgatggacaaggttatcaacgtctctatcaatggcgtggccgcgctgtcagacaaatatgcgtacctggcgaagaccaacgctgaggtcgcaacactgatgcgtaaccaggcgctcctggaatacaacgaggcgatcaacaaaataccgaaagccatcagtgacgcatcaagttctctactgtctttcggtgataaagcattgtcggcgttctctggcggctatgcatcggtagatggatttaatgaccgtctggctactctggaaattaccaccgataactatgctgaggcagttaagcaggcatacggcgcaggtcaggcgttccaggctactgcgaacagcatcggcaataccgttggagccgtagcggacaagttcggcatcaccgagcagaaagcatttgagctgagcaagcagctttcagatattgccaaaaacccatcgccagaggctttacagcgtttggctacagagttgcagaacacgcagagctctactgaaaaggggcaaactgcgctcacagcgttcgttggtaagttggtagaactttcacgtgaggcggtaatcgccaaaggcaacgtcgcggcgctcaagcaagagacagacaacctaaccagcggccagaagaacctgatcaagcagtcagaaagaaatctggcactgtctaagctccagggggaggcacgcgcgcggttgcaggcgcaatacgctgccgaagatgtcgggtttgcgaaggatgatccgcacgctaagcagatgcaggatgacgccgccgctacgtacaaaaatacgcaggcgcagaaaacacttcagtcagagcaaaagaaaggagcctcccaggctgattctattgctcagaaacttgctaacctcaaacagcagtcagagctcgctgccgactcaaccaataatctgagtcgcgagcaggcgatcctgaatgcgcagcagtctctcggaaaaggagccacaaaagaacagatcgcgctggcggggcagtacgcggcggtaaaatgggatgcggccaacgcactcaaagctcaagccgcagccgagaaactcctgccagaagcgcgcgaaaacgcaagctataagcaggatgttcaggatctgaatgccgctctggctgctaagaaaataagccaggagcagttcaatcagacatctgagagactcgaggccacacaccaggcaaacctcgcaaaaatccgcgcgcagcaggcggtgacgccacagcaagatgctgtcggtggagttgaccctgttcagcaactggcgaacgagaacgcccgcaagttggcgctcattcaggcattcgaacagcaggggcttatcactcaccagaacgcacttgcactgcgcaatgctgctgatactcaatatgagcaagccaggattgcagcccaatgggagatatttcgcaaccagagcgcaggtaatggagcgttatccgcttccgttgatgcacttgctgggaacgcatcgaatgcttttaccgggctaataactaaaagcatgacggcagaggaatctgccagatcattgggcagtactgttttgaatagcctcgtaaacacgtttgtgcagatgggagtgcagtgggttaagtcggccattatgggccagacggccactaccgcggcggttgcagcatccaccacggcacaggcggctggcatcgcaaccacgacggcgacatctaccgcggcggcggcggccacaacggcagcatggactccggcggccatcatgtcatccgtggcttcattcggtggtgcggtggctattggtcttggtgcgatggctggcatcctggcactgtcaggaaaacgtaaaaacggcgggcctgtctcggctggtgggatgtatcaggtcggcgaaggcggcatgcctgagatttaccaggccagtaccggtaagcagtacatgataccgggcgacaatggcagggtgatcagcaacaaggagatgactgctggcggcggaggggtagttatcaacatccagaactacacgtcatcgtccgttgatgcacaggctggcactgatgcaaatggtgggcttaccgttgatgtcattgttgcagacctgaacaacggcgggccaatcagcagcggtataaccagtaacttcaatgttaaacgcacgccaagggggcagggctga

SEQ ID NO: 120352 - DNA, 498 bp, Enterobacter cloacae
atgccaattatcgactatcccgactggctgccgctggcgcagaaggccagcaaaaacatgacgctcgataccgggttccagaccgatcagccagcggtaggcccggctatcttccagaaccttaccgacgacctgaaagtgacctggtctcttacgtggatctttaccctggctgaggagcgagcttttcagcagtggctgcgcagcccgaactatctcaaccggggactgaactggttccgaatgaatatcaacctaggtggcagcggtctccagcagcaggagcttcacttcacgcagatgccggtgcaaaccagtatcgacggcggagtggtgacctggacgggaaccgttattgccaaccacctgtacaacgccgatgacgagtttgacgacgtaattgttgagctgccgccgccgtggccttcagtgcttgatatcgtggtgactggctatccggacggacgcgatccggaatcactgccgagggtgccgtaa

SEQ ID NO: 120353 - DNA, 471 bp, Enterobacter cloacae
atgccgagcttcagggagtataagcagcagcgtccgacgcgcggactgtacgacaccatcacgttctatcacccatcatttggctacgtccgccttgtcgataagcagttcttcccgaagacgcttggcggccagacgtacacacccgcccgttttgaaatcgaagagagccagcaaagcggcacgccggtgatcgacgcaacggtgaagttagggcggctttcatcggacatcaaagcgctgatgaaggagtggaagggggcggcgcggctaacagctattacggccacgcggcagatcttcgacagcggcgacgtgtctgtgccgattaagtcctggcagctttacgtaaagacggtggatatcgatgccgacgccgcatcggtcactctgtctgtcaccaacccgctaaacaacaacatcggaaggctctatgacccaacggaatacactggccttcagtacctctga

SEQ ID NO: 120354 - DNA, 417 bp, Enterobacter cloacae
atgacccaacggaatacactggccttcagtacctctgattttatcagcaggatgatcggcgtgccgtggtctaaccgggcatgttctttcgagaaggtggattgctggggtctggtggtgttgtattaccgccatgtcctcggcattgagctgcaccagacaccggactacgaagccggggcagacttctttacatgctatcagggagacgtcgttttctggcgcaaggtcgataaaccggtcgacggggggatatttgtcgggtaccgcggcgcgcaaccggcgcacgttggcctggtactgaaccggcaggcgctgcactcgcgtggagagaacggaagcgtacgcatggactcgttgctggtcattcagcgggcattcaccaaagtggagtttttcgaatatggcgctggttga

SEQ ID NO: 120355 - DNA, 2478 bp, Enterobacter cloacae
atggcgctggttgagatatcgaattttccaggaacgcctaagctgcgttgcagggtgccaaacggcacccttttttatgactggctggcggccaatgacgctacttttcaccgcgacctgctgatcgtccgcaacggcgtaaagctgggcgacgatgatgagctggcgtttgaactgagcgagctggaccacatccagatattcgaccagccaaagggcattgtcgacgacatcctgagcccgatctttaaagtggtgggccaggtgttttcgttcctggcgccgaagccggcaatcgcgaacagcggcggtaataccgtcgactcaccgaacaatagtctgaccggtcagacaaacacggcgcgcgtatataaggccaagccggacatttacgggcagattcgttcgttcccggatctgattcaggagtcggtattcgaatacgtacaccagacctccacagacggcggcctgaagtacgtcactgaatggatgtgtattgggatcggcaaatacgattacgagtccgtgcgctactcagaatccagcctgggctctcttgcaggcgctgaatttcagttcttccagcctggcgaagtaatcccgcagatcgtcgaaggatacgggttcgatgacgttgacggtcaggaggttcccgggcagaacgaagccaacgacttccctatagaaacagcaacggcaaacacggtggtcagcggaacgtattccggcggccagatagcgatgaaaatcgtgaaacaagccgagttcgactatttcatggggctggtgctgccgcacgcggtgaccttcaccatcaatgtgacgtacagcacggcctccggcaacgtgactaccgatgctacattctccggcacgctgatttccgccgttgaaacaaacgacggcgcggttgttaacccggttcgctggtacacgtttacgatgaaccagctggaggggccgcaggacatcccggcgaacgcaacgatcaacaccacaaagttcatcctgaacgataacgaggcgctgatggttgggccgttcttttccccggtcgagtctacgcagctgtggctgcatacccagtccagcctcggcgggaagaaagagaccaactggaaggttgtcatctggaaaatcgacgacgactacaaccaggtcccgggaactcagcagacgtttacgtaccgacagacgacgccgcaccagtcgacgagcgaggtgttttatcgcactgacaaaatcacacccaccggcggcttcgggaaatacgcggtcagcttccagcgcacggataactccggcgacgcgtcactgctcaaggtcgaagagatccacagcatcaacatcaggacaaacgtcgttcacccgaccgacacgcttgtgcgagtaaaagtccgggcgacagagaacgctcttggcagccgcgagcgcaaatataacgcacgggtgacgcgccataccattacgtacgacctggacacgcagacggtggattacaccctgaggccgtcgcgctcgttcgctgatgcagtggctcacacctggctcatcatgggtgagcagccggtaagcagcattgacctgtacgggctgtactcgatcgccgaaagcctgcctgatgagcgactgggctacttcgactacacgtttgacgacgagaacgactcactcggcgatcgcgtgcaggcgatctgcaatgcggcgtcggtggtggcgtactgggatgacggcgtgctgacgtttactcgagaccagaaggttgattacccggcggccgtattcaaccgggcgaacatgaagactgacgagtacaaaatgacgtacgaagctactcttcctggcggttatgacggcgttcaggtgtcctacgtccacccgacaacgaacaacaagacgtacatcaactaccgggttctgaacggcgctatcgttgaacaggaagcggagaacccgaacaagctggagatcgtcggcttccgtaatgagtatcaggcccgggagcgagctctgcgcgaaaccaagcgcctgatctactcgcgcgtgaagatgaacgccaaggtgtttgaggacggcattatccaggtcggtagcgtcattcagatgcccgacatctacgacagcaaccagcaacagggttacatcaccgggcgcgccggtaataactttgataccagcgagccgatcacgtttaccggttcgatgtatgtgctggtgacagacagcctgggtaacccgacgctgcgttatccagcggcggcgcgtggcgacacgaagtacggattcaccgcggctatccccaacattcagctcaatatctggaacggagacactgtgcagctcccgtcccgctacctcatcgcgaccgttgaggaactggacagtcagctatggacggtcaacagcatcaaacctaacacagataacacggtatctctgaccgtcgctgaatacagcgacgccatctaccaataa

SEQ ID NO: 120356 - DNA, 1761 bp, Enterobacter cloacae
atggctacgcaacctaccaatttgcctgtaccaagcgaatcttatcgcgacctgaagtataacgcggggaaaattgacgaattcgttacgtctttaacgctgcaatacatcgatcgctttggcaatgctcattacaccatagaaggcctgcgctggctggcgcaacaggctattgcccagtatggatggatacctgtaggaaccttccaggatggtgctacgttaacgactcctaatcaaatactgaaagatgaaacagatggagaatattaccgttgggatggggcctttccaaaacttgtaccttccggatccactcctgcaacatccggcggaactggcgtaggggcgtggcttagcgtgggggattctactcttcgtgctatgctagcagcgccaggaggagacaagctgataggtagttcatggggtggaggtagcgtttgggatgattacgcagctaagaaaataattattcaggcggtaaacatttacccaacaatgtccaatgcagagattaatgtaatattagcatctggtggaactatctatttcaactcaggaacttatacagttacatctgcaactgaaacttttaagcttggtcaaaacagtagagtacattttcatccaaatgcgcttttaagtgccggtgctgatggggtgacggttctcagggcgtcttcgcaggatgttggaagttcgtttatcagaaactgtaaagtctttgatccgcgtattagcttggttggttttaagaactgcaccggaataaacctgtacaatgcacgaaataatacagaaattatcggtccatggattgacatggggcttggtgatggaaacacaggggccctgatcgaccattggtgctatggggtgagattctatgactcagaagtgctaaatggcggagttggtagttcacgcataatagtaagaaacggagctaatgcaattactattaaagaccatgtagggtacagttcagatcattctggcacattaccagattatgggatagtagtttttaatggcatgaatggtgattttaatttccctgatggtagcgatctctggccgactgcttgtgtgaatataactggtggttattctcagaatacaagccggtatgggttgcttgaatctggtgtaagcacctttctctcaggaatgtattttgaaaggaatgcaatatcagacgtatcgttaaggactggcagttattactttacaagccaggccacccatcacagtctaaatgttggtgaatcatgctttagaagttcaggggccaatcatgcaaccatcgggcctttcaatccagcagatcgcagtatcgggcagtataatttccctactggatctaactgccatgcagatggtagtaagatgtgggggacatttcttgataccggcattggtgtgactgatggtttacgccttgacattggcgctgggtcagtaaagcagtattcatcaacaacacttcctataaagattagggaggggtttagatgttattttttaaatgtaacatcaggaatgaatataacaacttatgggagtccatatgatggtcaacaaataactttaattctaagaggttccagtatcacatcgttgctttttgctggtgtcaatatagatgttaccggagcaaataccactcagacaaaaaccgcttcggttatagctacatattgggcagcaatagggaaatggacactgacgatgacaagttggaccgcatcttcttaa

SEQ ID NO: 120357 - DNA, 1725 bp, Enterobacter cloacae
atgactggaattatacattcaaggcttgatagtgaaagcttttcatttattaagttttacttggaccgagccaaaagaatcatccctgcgctatctgtcacctgcttactagttttcataacatgttggtttttccttaccccggcggatttcgagacgcttggtagacatatttactcaagcttattatttatatctaatattatatatttccaagaaattaattactttgacgcctcggcaagccaaaaatggcttcttcatacatggtcattatctgtagagtggcaattctacatgttattaccagtgttgatgtttattgttcacaaaatcaacaagaaggctataaataatgtccttcaatttcttttcataataagcctaaccctatcaatttattttgttgaatcaaacaaatcatctgaagcgttctatcttttgccagctagatcttgggagatggttcttggcgggttggtatatttaaacaaattaaacataaacaaaacttatcgcactatattgcattacttatcccttttcatcatggcatcagctatagtcttactagacaaaaacgatcaatggcccggattgcttgctttgatacctgtttccgccgctgccgtttttatcgcttcatgccatgactcatgggtatcaagcaatccaatttcacaattcattggtaaaatatcgtactctgtatatctattccattggcctgtggtagtggcattgaattattttggcttgaccgagcctttatttttgttcgctggggtgattttatctttcattctaggagccatatcttattaccttattgaaaataacacaaagaaagtattcaataagttagggcaacatacctataaagaaattgcagccattgtaacaattactttaatacctttttgcgtatctgcttattcaagtgaaaacggaggttttgcatcgagattcccttatgcactccttacatccgaagatattgctaaagaaagagctaggtattgggttgatggtgataaggaaaagccagtcccagttaacggaaacaagaaaattgtcatagtaggaaactcacatggagttgatctaacctatgcgcttaccgagaatggacttaaaggggatatcacttatctcagaacaacctcctattgttccaattttgggtttaccccaaactacccgcaatatgaagacaaatgccctccggttttccataaggctatcaacaataaatctctaatggatgctgacacagtatttatgcacgatgattgggcgaaagaagacctgcttaatttgaggaagtcattaaatgcatacctatcaaaaacaaaagctcacatttatgtcattggacccaaaatgacctatactaaaagcgctgttgatatagttgcaaactccatgaatgagaagcaaacaactgttgaaatggttaatgaatattctaaaaaatattattctagaccaaaaattaaaactaataatgatttgaaggatttcttctctgagcataaagaatatgcaggaagagtcacttacatctcagcaatggatatccagtgcggaagtaactacgattgtaaactattagatgagcatgataaatcattttattactttgacgcagggcatttcactcttaatggatcgaaaaactttggtttaatgctaaggaaatcaaatcctgaaatatttcagtaa

SEQ ID NO: 120358 - DNA, 216 bp, Enterobacter cloacae
atgaataaattattccgttttgccttgatttttgcgtccagtttttgtgagaccgcttgggctggaatagtaggtgtggtatttagtgccatgactggccactccgaggtaatctcggtactggctaagcgcacttgctccttacttgagatgccgacatggggtgtcgggggtcggaggttcaaatcctctcgtgccgaccaaaaatacatttaa

SEQ ID NO: 120359 - DNA, 192 bp, Enterobacter cloacae
atgtgtcatgattggcttcatgaaatactgctgcgtcatatggaatggttcgaagccgcagacctgatcgttaagggtatggaaggcgcgattaacgcgaaaaccgtcacctatgactttgaacgtctgatggaaggcgctaaactgctgaaatgctcagagtttggcgacgcgattatcgcgaacatgtaa

SEQ ID NO: 120360 - DNA, 1029 bp, Enterobacter cloacae
atgtcagatatcattcttgcccgtgtttcagaaaccctctccactgagcaatctctcgacagtcttgtgcgtcagctactggaaatgctggaaattgtgacggatatggaatcaacctacctgaccaaaatcgatattaacgcgcgtttgcagcacattttatatgcccgtaacagcaagcaaatgcaaatcccggaagggttcagcgtgccctgggacgaaacgctctgtaagcgcgccatggatagcgacactttgttcagtaacgaggtgcctgaccgctggccggagtgtgaagcggcaaaagcactgggtattacaacctatatgagcgtgccggttcacctggctgacggttctctgtacggcacgctttgcgctgccagcaccgcacagaaacagttcagcgagcgtggcgagcaggtgatcaggctctttgccgggttaattggtcagtatattcagaaagagtcgcttgtgcttcagcttcgtgaagcaaatgcggcgctcattacccactcttacaccgacgcccttaccggcctgccgaatcgtcgcgccatttttgaaaaccttaccaccctgttctcactggcgcgccatcttagccgcaacgtcatgattgcctttattgacctcgatgatttcaagcgaatcaatgaccagtacgggcatgaggcgggcgatcgcttcctcgtacaggtcggcaagcgactgactcacgagcaaacgcaggatgagattattggccggctcggcggcgatgaatttctggttgccagcctgagtcacagcgatgatggcgacaccagtacagagatcaacgcaatcaaaacccgcctcaatggtcttattgcgggcgaatacgggttaggcaatgccaccattctttatcccggtgcaagccttggcgtcgttattgttgatcctcacagcacggatgaagatagcgccctgcgcaccgcggacctcgcgatgtatcaggataaaaaaggaaaaagcaaaacaggctttgtcgcgttagattaa

SEQ ID NO: 120361 - DNA, 453 bp, Enterobacter cloacae
atgaaaaaaataattctggcgatcctgcttctgcccactctcgcatccgctgcacagaagttcccccctgaggtatccgctgcccttcagtttaataagtggtacatctcgcaaattattatcgggaaagagcccctgaaaaactatgaagcgctgaggccatatgtaacccgcgaaactatcagcaaactcaaagccatggataagctggatccagatgaatatgacgtgcctgacgtcgatatgttcatcaaggctcagggatatgaagatgactggggcatcgtcagtgcgcgggcgctggattacgatgccgcctgtatgcaggtttatatctcattcggcaaaaagcgggatcacaccgtgattgactgcatggtcaaggaagatggcgtgtggaaagttgaatccgtggccagtatgaatatttcagacaacctgatgatggaataa

SEQ ID NO: 120362 - DNA, 216 bp, Enterobacter cloacae
atgttagtgataacgattatcacttcaaccccctgcgagcaggggctttgggctaaaccgccctttttggctactttcattaagcatagaccctgtgacgggatgcggatgggatggttagatttgttcaatgcattgataaataatgcatttcataagaaaggcggtaaggtggcgggcaatgataaaaattgtattggaaatacctatttttaa

SEQ ID NO: 120363 - DNA, 1662 bp, Enterobacter cloacae
atgctgaaaaatctgcacgtgattaccggtattatctttgccctcaccatattctgtctgctgcaagttgtcacgggagggttgttctactctgccgttaacaacgatcggcacaactttcagaactccgggttactcaatgcccaacaggaaagcctgagcgacagcgttaacacgctggtgaaaacgcgcgttaccgttacccgcgtggcgatccgctacctgaaaaaccagcgcgatccggcctctctcgcggcgatcaacacgctgctgggcaccgccaacggttcgctggccaaagccgaagactattacaaaaactggcaggctattccgcaggtgaagggccagcatgccgcgctcaccgaagagatgcagaaagcctggaagcaaatgcacgaggtgatgcgcttgtccattgagtatctgcgcgccgataactatcaggcctatggcgacctggacgcccagcaggcgcaggatgagatggaggcggtctatacccgctggcgcgctgaaaacaacgttctgctgaaagccgccgccgaagagaaccagagcagctttacccagatgcagtggacgctggcggcgatcttcctgaccgtgatcgccgtgctggtggtgatctggcagggtttacagcacctgctcctgaaaccgctcaacgccatcatgaaccatattcgcaccatcgcgagcggcgatctgacgcaaaatgtcgcgattgccgggcgcaacgagatgggccagctggctgctggtctgcacgagatgcagcagtcgctggtgagcaccgtcagcgccgtgcgcggcagcacagattctatctacacgggcgcaggagaaattgccgccggaagtaacgacctttccgcccgaaccgagcagcaggcagcctcgctggaagagaccgccgccagcatggaagagctgactgccacggtgaaacagaactcggataacgcccgccaggcgacgctgctggcgaagaatgcgtctgaaaccgccgcacgcggcggtcaggtggtggataacgtggtgcgtaccatgaatgacattgccgacagttctcagcaaattgcgcatatcaccggcgttatcgatagcattgccttccagaccaatattctcgcgctcaacgcggcggttgaagccgcccgtgccggagaacaaggtcgcggctttgcggtcgtggcaggtgaagtacggacgctggccagccgcagcgcgcaggcggcaaaagagatcaaagggcttatcgagaactctgtcagccgggtgaataccggctcggaacaggtgagcgaggcgggtgcgaccatgaaagagatcgtcgcggccgtgacgcgcgtaaccgatattatggctgagatttcctcggcgtctgacgagcagagccgcggtatagagcaggtcagcctggcagtctcgcagatggacagcgtcacgcagcaaaacgccgcgctggtacaggagtcggcaacggcggcggcggcgctggaagatcagtctgaacagctgcgtcaggccgtggcggcattccggctgaacgctcaggcatcgccggcggctcgccctaaaaacgtgaaaacgcccgtactgctgcgcccgtcagcggcaggcgcgaatacagctgacgcgaactgggaaaccttctga

SEQ ID NO: 120364 - DNA, 2430 bp, Enterobacter cloacae
atgtcagacaataatccccgctcatccggctggttaggcccgtggtgcctgctggtgggtgtgatacttcttgtaacggggctcttttttgctatcggcggttttaaactggtttccctgggggggagttggtattttctcatcgccggggttatcactctgctctctgcgattcagttcttccgccgcaagtcctctgccgtggggctgtttgccctggtgtttcttggcaccctgatttgggcatttttcgatgccgggctcgacttctggccgctggtttcccgtttaatggtacccgccgggctgatggtgctggcagctgccacctggcctgcattgcgtaaacgtgaaggaaaaccgtcctgcgcaaaaggggccctgggggtctgcgcggtccttattattgccatgggcgtcacctttgttcagatgtttcaaccccatccgaccgtgccgtttagcggtgaaaaacgtccgctggtaccggtaaaagatgatgcgaaacagcagaactgggatcactacggtaatacggccggcggtagtcgctttgtggcgctggaccagataacccgtgacaacgtgaaaaacctgaaaccggtctggacctaccataccggtgacgtaccggaaagtccggacggcaatggcgcagaagatcagcaaacgccgctacaggttggcgatcgtgtcttcctctgtacgccgcataacaacgtgatcgccgtggatgccgatagtgggaaagagatctggaaagcggaaatcaacgccaaatctgcaatctggatgcgctgccgtggcctggcatactttgatgccaccaaaccgctggcacagccaacggtagcgggctccacgccggttctgccagcgcaggtcgcaccgggcgctgcatgtcagcgccgtatcctgatgaatactattgacggtaagctgatcgcgttagacgccgataacggcaaattctgcccggacttcggtactaacggcagcgttaacctgcatgaagggatgggcgacgcgtcagatcccacctacgtgctgacgtcggccccgacgctggcgggtacgacggttgtcgttggtggccgcgttgcggataacgtcagcaccgatatgccgggaggcgttatacgtggttatgacgtgatcaccggccagctgcgctgggcgttcgacccgcgtaatccggatccgaactatgttctgaagccgggcgaacactacaaacgtagctctgcaaactcctgggcccctatgtcctgggatgcgtcgatgaataccgtgtttatcccgatggggagttcctccgtcgacctgtggggcgctgaccgtattccggaagatcataaatacgccacctcaatcctcgcgctggatgcgactaccgggaaagagaagtgggtataccagaccgtgcataacgacctctgggatttcgatatcccgatgcagccgagcctggttgatttcccgacaaaagagggcaacaagcccgcggtggtggtgggcaccaaagcggggcaaatttatgttcttgatcgcctgacgggtaaaccgctcactgaagtgaaagaggttccggtaaaaccagcggatattccacgtgaacagtacccggcaacgcagccgcgctctgtggggatgccgcagattggcgcggaaaccctgaaagaatcggatatgtggggggcgacgccgtttgaccagctggcctgtcgtatcagcttcaaatcaatgcgttatgacggtctgtacacgatgccggggaccgatatttccctgagcttcccgggctcgctggggggaatgaactggggtagtctgtccacggatccgaacaaccagtacatcttcgtcaacgacatgcgtctgggtctgtgggtccagctgattaaacaagatccgcaaagcgcagtggcaaacacgggcggtgaagccgtgaacgccggtatgggcgctgttccgatgaaaggaacgccgtattcggtcaacaaaaaccgtttcatgtcaccgctgggtattccgtgccagaaaccaccgtttggctctctctctgcgattgacctgaaaacacagaaaatcgtctggcaggtgccggtcggtaccgttcaggataccggtccgtttggggtaaaaatgcgtatgcagatgcctgtcggtatgccgacgctgggcggtacgctggccacgcagggcggtctggtcttcattgcgggaacccaggattactacctgcgcgcctttgattcctctacgggggaagaagtgtggaaagcgcgtctcccggtgggtagccagggcggacctatcagctatgtatcaccgaaaaccggcaaacagtacattctgatctctgctggcggtgcacgccagtcgccggatcgtggtgactacgtgattgcctacgcgctggataaataa

SEQ ID NO: 120365 - DNA, 243 bp, Enterobacter cloacae
atggcgcgagatgactcgccgtcgccgtcgctggcgggtgcttttcacgggctgaccggaaccgcagctttcttcctgtgcgtggtttttagtcaaaaaaaagccccgtactacgacggggccaggctgcttatttcgctgttatttatccagcgcgtaggcaatcacgtagtcaccacgatccggcgactggcgtgcaccgccagcagagatcagaatgtactgtttgccggttttcggtga

SEQ ID NO: 120366 - DNA, 2277 bp, Enterobacter cloacae
atgaccatccgcatcgtggaactggcaggcggtttacgcgcaacgctggtgcatcagccgcaggcgacacgcgcggcggcgctggcgcgcgtgagtgccggaagccatcacgagccaccgcgattcgccggtcttgcgcatttgcttgagcacctgctgttccgcggtagccagcgctatcagggcgatgatcgactcatggcctgggtccagcgccagggcggcaacgtcaatgccaccacgctggctcgccacagcgcttttttcttcgacgttgccgccgataacctgtccgacggcgtcgcgcgactgcgggatatgttgcaggcgccgctgctttcccggctggacatccagcgcgaagtggcggtcattgatgcggaaaaccggcttatccagcagcatgatgccgcccggcgcgaagccgcggcgcgccacgcgatggaacaaccggaggttcttcgccgttttcaggtgggtagccatgattctctggggcaagacacgggaacgctgcacgccgcgttgcgcgactttcatcgccgctattatgtggccagacacctgcaattgtggctacagggaccgcaaacgctggatgcgttagccgagcttgcccatacgtttgcgacaggttttgcttcaggtggcgtgcctgaagccgcccccccgttacgccttagcgctgaagcagattatcagctggcagtgacggagcgacccgcgctgtggcgctgtccgttgatccgaaaaagtgacaacgtcaccttgcttcgggaatttttgctggacgaggcccccggaagcctgattgacgggctgcgggcgcgcgggctggcagaagaggtatcgctggactggctttatcaggatgacgattacggctggctggcgctaacgcttgacggcgaacggcccgaggccatagacgcgcaaatcacgcgctggctgcgggccctacagcaaacgacgcaagagcaacagcggcattattatcggctggcacagcagcgctttagcgccctgtcggcccttgaccagcttcgccagcgggcgtttggttttgcgcccggcgcggcgccggttgatttttccgccttctgtgccgacttactggcggcgcccacctcatatctggcctgcaaaaaaatggaagccgccgggacaatttccagccagggatttgccctgccgcttagccactggcgtcgccaaccggttgcggatgagagccccatcgcgttttccttctacccgcaggctgcccaatattctgccccagccctgacgccagaagccgttccgctgctgcatttaccggcgcaggcacaaccgccgacgttgatcctccgcaagcctttttattcgcgcgtaagcgagtcacagggggtggcgatcggcaaacaattacgccctcttctggctgaaatgcgccatatcggcggcagcggcgagtggcaaacggttgacggtagctggcagctaaccctgcggcttcctgacgccgtggtgatggcggaacccatcatcggggcgataatcgatcgcctctcccgccccacaccggctattacgcctgcgccagatggcattgcgatccgtcagttgcttaagcaattgcctgaacgactggcatcggaaccgtcacggaatggctggctggcggcgttagctggcggcagcgccggacacgcgcacgggttagcccggcagcttggcctgctccgggcgccggttaacgctaagccgttgccgttaagcgattgtcccggcggggtcgaacacattccgcacgccagcgcggattcggcgctgctggtgtttattcccctgccgccgggtgcgtcgctcgccgcgctgcggctgctggcgttatgctgcgaaccgcgatttttccagcgcctgcgcgtggaacagcagattggctacgtggtcagctgtcgttatcagcgtattgccgatcgcgatggcctgctgctggcgttacagtcgcctgatcgttctcccgtgaacctgttgggttgctgcaaacgatttttgcgagagctgacgctgtgcgatgaatccgagttcagcctattgcgacagcagctggcgacgcagatccgctcaccgatggatgccagcgccacggcagtggccgccctgcgccagcgctatggtttgccggtgttaacgccgcaggctattgatgccctgcaacctgacgagatagtcgcgctatggcgcgagatgactcgccgtcgccgtcgctggcgggtgcttttcacgggctga

SEQ ID NO: 120367 - DNA, 1041 bp, Enterobacter cloacae
atggccaaacctattatcaccctcaacgggcttaagatcgtcatcatgctgggcatgctggtgatcattctgaccggcgttcgttttgcggccgatatcatcgtgccttttatcctggcgctttttatcgcggtgatcctcaatccactggtgcagcgaatggtgcggctgcgcatcccgcgtgtgctggcgataagcctgcttatcagtattattatcgttgcgatggtgctgttagtcgcctatctgggaacctccctgaacgagctggcgcggacgctaccgacataccgctcttccctggcgaccccgctgctgcaaattgaaccctggctgcaacgcgcgggtatcgaagtctcggttgaggaactgcttaaatacatcaatccgaatgccgccatgacgattgtcaccagcctgctggcacaactctccaacgccatgacctcaattttcctgctgttcctgacggttgtgtttatgctgctggaagttccacagctgcctgcaaagctccagcacatcatggtgcgtccggtagagggaatgggcgccattcagcgcgcgctcgacagcgtttcacgctatctggtgctgaaaacggccatcagcctggtgacgggattagtggtctgggggatgctcgccgcgctggatgtgcgttttgccttcgtctgggggctgctggcctttgcgctcaactatattcctaacatcggctccgtgctggcggcgatcccccctatccttcaggtgctggttttcagcggtttgtatgatgccctgattctgctggcaggctatctggtgattaaccttgtcttcgggaacattcttgaaccacggataatgggacgcgggctggggctttcaacccttgtagtgttcctgtccctgattttctggggctggctgctcgggcctgtcggcatgctgctctccgttccgctgacaattattgtcaaaattggcctcgagcagaccgccggtggacaaagtatcgctgtactgctgagcgacatgagccataaggccgattaa

SEQ ID NO: 120368 - DNA, 261 bp, Enterobacter cloacae
atggtgacaacctgggataagaccttcgccgagagcgataaagtcgaccaccgcaaggtgacgttcgagaaccgatacgggatcaccctggcttgcgatctgtacattcccaggaacatcggcgaccagatgctggcttctcttctcgtcgttgtgaattacacctatgtctacactgaatcaaatctcatcccgctccagcgagcatgcatactgggccggtatttatgcccgccagtctgctcgcgtcatcagcaataa

SEQ ID NO: 120369 - DNA, 615 bp, Enterobacter cloacae
atgaatgatgtctcacaccgcgaatcgttcgcgttcagcgcccgggtactgggcgcgctgttttatttcgccccagacagcgagcagaccgcgccgctggtgagtgccctgaccgcaggtgactgggttcaggactggccgctggcggaggaaaacctgctgcctgtcgccagtatgtttaagaccccatcggatgaagcgttgaaagacgcctggcagcgtctgtttattggcccgtatgccctgcccgcccccccgtggggctcggtctggcttgatcgcgagtcagtgctgtttggcgattcgaccctcgcgttgcgtcagtggatgcgtgaaaaccatatcgcctttgagatgcagcagaatgagcctgaagatcatttcggaacgttgctgatgctggcggcatggcttgccgagaacggtcgcgaaacagaacgcgaccagcttctggcctggcatctgctgccatggagcacgcgtttcctgaccgtattcgttgaaaacgcggctcatccgttctacaccgcgctgggtaaacttgcccagctgacgctggcggaatggcagtccactttgctgatcccgattgccgaaaaaacgctgtaccgataa

SEQ ID NO: 120370 - DNA, 1074 bp, Enterobacter cloacae
atgaaaaaatatcttactatattagcgttagcggcgttcgggctgtctggcgcagcgcattccgcgttagaatgtaaatttaacagtaatgatacgctgctcattatgtctccgggcacacagccggtcattacacctctgtctgttggtacggtaacgacacccgtgcagatcagtaacactattattatggaaacaaccccagcattaacatcaagttgcgaagtgggtgacgatggtgaaaatgtttaccagatgacgaacaatgcaatgctttggggggagatcgatggcaaagccacttttcgtacaaacatccccgggattgtttacacgctggcattctatcctgatggcaatggtgtaacggcctggttcccacccaatccaaatgagttttatctcacgggtaacgatcatgataacgaagatgctgtaaaaggaaaaacctggcacgttcgtatggagttctggcagacaaacggattcaccggtgttcccaacgacgaagacttcctgaccgcaagcagtggtccaatcggtcaaattatcctcggtaatccaaatggaacgacagtagaagatcaccctcgccctctggtgaatatgtctcagatgtcgttcagtattccattaaatcgcccgacctgtgccttacgtgcgcccacaacggtaaaccttggtgactggtatcccgcggaggtcgaaagcgggaataccagcaaagtcgagttccatgtgacgggtacatgcgtgaataccatcggcgtttactatacgctatcctccacgcacaccaccgcagataagaaatattttaccaataccgtggagagttcaggtggtgtgactgcggcaggtggcgttggcgttatgattctggatagccataacgataattatcctgtgccagcgaatggcagcaagcacgtcatcgcggtgggtgaagtgtacggcgatcccgtgagtattgtagacaaatcaatttgggccaaactggttaagatcggcagcgatccggtaaccgtcggtgttttcggcaccaccgtgaccattcagaccacgtacgaataa

SEQ ID NO: 120371 - DNA, 687 bp, Enterobacter cloacae
atgaaaaaaatcattattgcaaccgctgttgcaatgaccctctctgcgactgcacatgccgactctactgcggtattaaaattaaaaggcgtattaaccaacaacgcctgtaccccaacgctgagcgatggcgctgtcgttgatttcggcactaaatatatcagctcgctctccgcaacggcagataaccagctgggttataaagatatttctctgactatcaactgctctgccgcaacgaaagtagcgtggtccattaccgatgatcacgcagattcaatgaagaaaatgaccatcgataacgccactttcgcgggcgatcaggcatggagttcaactaaccagtacggcgtaggtaaaacggctggcggcgtcaatatcggcgcttactccgtgggtatgaattcgaatgtaaccgtagatggaaacgtcaaagcattaggttattctgcgatagcagatgatccaatgtggttacttgcgaatacgggttcgcagctcgtcactcatagtgacggttctatccagtatagcgcactaaatagcagtgatcggacgttggttccctttatgaatgccgtattcccgctgcgcgttgcgctggcggtgcagaaaactgacaccctggcaattaccgaagataccccgatcgacggccaggccaccatcactttgcattatctgtaa

SEQ ID NO: 120372 - DNA, 690 bp, Enterobacter cloacae
atgaaaaagattttagttgccactgccgttgcgctggccctctccgcgactgccgctaacgccgcctctaccgccgtactgaaagtgaccggtttactctccgttgccgcctgcaccccgcagttaagcggcggcggcgaggtggattatggtcttatccacctggcggatctctccgcgaccagcgttaaccagttgggtcagaaagatatctccctgaccatcacctgcccggtagccactaaagctggctggaccatcagcgatgaccgcgcagacacccatccgggtgcttctgtgatcaccattaacaccgcagacgcggcgggcggcaacgtttccgacaccacccagtcctacggcgtgggcaaaaccgcgggcggcgtgaaaattggcgcttactacatctttgctgatgtggcgaacgtcaccgccgacggcgtgaaatcagacgttatctccggtaccgtggacagcccgtcctggcagaaaaccgctaccggtatcatcaaaaacgccaacatggaaatgatgaccgtggccgcttccggcaccactgcgccgctgcctttcacgaccgcagtatttccgctgaaaacctccctggcgattcagaataccgcggccctcgcgattaccgatgataccaacctggatggtcaggccacgattaccgttaaatatctctga

SEQ ID NO: 120373 - DNA, 234 bp, Enterobacter cloacae
atgtcagttgaatccacgatcgctcagtgcgccattgccgcaccgttattattctctgctctctttgctcaggcgtatgccgccggaatggtgccagaaaccacgctgctggttattgaagaatcgactcacagcggcaccatgaacgtaaaaaataccgacaccttcccggccctgatctataccatcattgtcgatcttcctgacgatacaggcgtgacgttaaacgcgtga

SEQ ID NO: 120374 - DNA, 189 bp, Enterobacter cloacae
gtgacccttgaggctatcccgccgaaaaacaccgataaacatatgtggatcggctttaacctgagtcaggatctgcccaacggcatcaagaacatttctgtcgcccatacagccttcagggagctggatttcaaagtactgaatacccgtcgcgtaatgctcgaagtgaaacgtgcagacggctcgtga

SEQ ID NO: 120375 - DNA, 189 bp, Enterobacter cloacae
atgaaacacctgggtaaacatttactgatgactttttcgctaatggctacgctttttacgcctgcctcgtggtccgccgatgagtgccagctcaccctcaccccggtgctgaatgaccgccagtttaatcacgtaggtgatacggtgacgctggaaagcaatttgatgtgggaagtgttgacgaagtaa

SEQ ID NO: 120376 - DNA, 744 bp, Enterobacter cloacae
atgaccgatacccgacacatccggcagacttttcaccgcgcctcaggccttgagctgcgcagcacgtggcagagcacgcaggcctataagcgtcattgtcacccgcagctctccatcggcgcgattgtggaaggccagacctgctgcgtcagtcatgggagagagtctatcctgaaccccggcgatctcattgtcatcccggcttacgcgccgcacagctgcaatcccgtcaacgggcaaccgcgcagctaccatatgctctatatcgacaccgctcttcctctggcgttccaggtgattcgcgaccctgcgctctttaagcgctaccttgatgttgttgagacgatgtcacctgcctccgtggacacgctactttctgcccttccccgcagcgtggaaaacgcagacgcgcttcgctctaccagtcagcaccttcagcaggcatttcttgccgacctggccgcaccaccttcgcttgacgaacttgcgcaacgattctcgctgcgcaaggagacgctgatccgcaccttccggcaggacaccggcctgacgccggtcagctttctcaacgtctcccgcgtggagtacgccaaagcgcggctgcgtgccggagacgacattgccgacgtcggctaccagagcgggtttgccgaccagagccattttcataagacctttgtgcgctacaccgccgccacaccgcgccagtacgctacgggccgatcaataacagacaataaatag

SEQ ID NO: 120377 - DNA, 1416 bp, Enterobacter cloacae
atgcacaccatcgaacagatctttattaacggcgagtttgttaccccgcacggtaccgaacggtttgatttgtacaatccggcgacggcgcaggtcatcggccaggttcgcctggcggatgaggttgacgctgaacgcgctatcgcggcggcaaaagcggcgttccccgcgtggtcgcagaccacaaagcaggaacgtatcgccgcgctgaagcgcatgcacgccgccgtggccgctcgtcacgacgatctgctggaagcggtcattgaagagtacggcgcgcccgcctcgcgctcggcgtggatggcaagctatccggcagaggtgattgctcaggccatcgaggcgctggaggcatttgagtttgtcacctccgcaggtgccgcaacggtgcagatgacgccgctcggcgtggccgggctgattacgccgtggaacagcgatgcggggtttatctgcggcaaactggcggccgcgctggcggcgggctgcacggcggtcatcaagccgagcgaaatgagcgccctgcaaacgcagattgtcaccgaagcgctgcgcgacgccgcgctgccgccgggcgtgtttaacatcgtcaccggacgcggcgagacggtgggcgaaaccctcagccgccatccggacgtcgcgaaaatctcgttcaccggttccacgaataccggcaaggcgatcctgcgcaacgcggcggaaagctttaagcgcgtaacgctggagttgggcggtaaatcgccgacgatcctgctggatgatgtggatctcgagcaggcgatcccgctggtgatccaggccgggtttatgaacagcgggcaggcgtgcgtggccgggacgcgcattctggtgccttactcgcgcaaggcggagatcgaaaccgcgctggcgcaggccgtggcggcggtgaaatccggcgacccgcgcaacagcacgacagacgtcggcccgatggtcagcgaaaagcagtggctgcgggtgcagggctatatccgcaaaggaatcgaagaaggggcgcgcctgctggcgggcggcgaagggcgaccggaaggcacgcgggacggctggtttgtgcgtccgacgctgtttgccggcgtgaacaatcggatgaccattgcccgcgacgagattttcggcccggtgctgtgcgtaatcccttatcaggacgaggcggaggcgattgccattgccaacgataccgagtacggcctgagcgcgatggtgctgggcggcgatgtggaccgcgcgcgacgcgtggcacagcagattgtttccggtcgcgtgctggtgaacaccctggctcatgaaccgaaagcgccgtttggcgggtttaagcactccggcgtggggcgcgagatgggcgagtgggggatccgcgcgtttatggagccgaggtcggttctgggctaa

SEQ ID NO: 120378 - DNA, 903 bp, Enterobacter cloacae
atgcatcgttcaggtctgacagagctggaagtggtgatggcggtggtgcggcgcggcagctttcgcggcgcggcgcaggaactggggatgtccgccacggcggtcagcaacgccatcgccgggctggagagccgccttgagacgcgacttttcaaccgcaccacccgcagcgtggcgctcaccgacgccgggcagcgctacgtggcgcgtatcggcccggcgctacaggagatccgtctcgccggggaggagatccacagcgacaccggggaacccgccggcacgctgcgtctgaacgtgccgaaccatatcggcaccctgtttctggaccagctgctgatcgacttcatgatccgctacccgaaaatgcgcgtggaaacggtgagcgaagcgaggatgatcgacatcgtcgccgaaggctatgacgcggggatccgcctcgaagagtccgttccgcaggacatgatcgccgtgccgctgaccggtgagatccgccagctggtgaccgccacgccggactatttcgcccgtcacggcatacccgagacgccggacgatctgctttcacatcaggggatcggcatgcgtatggcccacggcgggatctaccgctgggagctggcccgtcggggggaaacgtacgcccttgccgtgccgccgcgctttgcgacgtccgatctttttgcctcgatccgcgccgtaaaagcggggttaggggtgggatttttaccggaaatctatattcaggacgagctgaaaagcggggagctggtgagcgtcttaaacgactgggcgcagccgtttgccgggctgcgcctgtactaccccggccatcgccacgtcccgccggggttgcgggcgctggtggcgatgatccgcgagcgcgggattattccaggttag

SEQ ID NO: 120379 - DNA, 219 bp, Enterobacter cloacae
atgagtactgggctgatatcccttgcggcaggcgtgttgattggcctgatgtatgccgtgctgaaggtgcgctcccccgcgccgcccgcgctggcgctgattggcctgctggggatgctggcgggtgaacaggcgacgcgccatctcttatcccgcgacggcgcgccgcctcaggtgaccgttccgcaggccagttcgcagacgggagcgtcgtcatga

SEQ ID NO: 120380 - DNA, 687 bp, Enterobacter cloacae
atgacctcttcaaagctcgaagtgttaacccctgcgaactgtcagatcatctttatcgatcaccagccacagatggcgtttggcgtgcagtcgattgaccgtcaggtgctgaaaaacaacaccgtggcgctggcgaaagcggctaagggattcaacatcccgaccatcatcaccaccgttgagaccgaaagcttctccggcaatacctatcctgagctgctggacgtgttcccgggtcaggacattctggagcgtacctccatgaactcctgggacgaccagaaggtgcgcgacgcgctgaaggccaacggcaagaagaaggtcgtggtggccggtctgtggaccgaagtgtgcaacaacagctttgccctgtgcgcgatgctggaaggcgactacgaaatttatatggtggcggacgcgtccggcggcacctccaaagaagcccacgactacgcgatgcagcgcatgatccaggcgggcgtgatcccggtgacctggcagcaggtgatgctggagtggcagcgcgactgggcgcgtaaagagacctacaccgcggtgatggacatcgtgcgcgagcactccggcgcgtacggcatgggcgtggattacgcctacaccatggtgcacaaagcgccgtctcgccagaagagcgagcaccgcaccttagcgccggttccggctcgctaa

SEQ ID NO: 120381 - DNA, 822 bp, Enterobacter cloacae
atggcaacgtttaaggcaaaagacggcacgcagatttactacaaagactgcggcgcgggcaaaccggttctcttcagccacggctggccgctggacggcgacatgtgggacagccagctgaactacctggccgagcgcggctttcgcgccatcgcctttgatcgtcgcggctttggccgctcggatcagccgtggaacggctacgactacgacacctttgcgtccgacatcaacgacctgattaccatcctggaccttcatgaggtgacgctggtgggcttctccatgggcggcggcgacgtgacgcgctacatcaacaactacggcagcgcgcgcgtggccggtcttgcgctgctgggcgcggtgacgccgatcttcggcaaatcggatagctacccggaaggggtggatcagagcgtgttcgacggcattcgcgacgggctgcgtaaagatcgcgcccagttcatcagcgacttcgccaccccgttctacggtatcaatgccgggcagaccgtctctgccggcgcgctgacccagacgctgaacatcgccctgttggcgtccctgaagggcaccatcgactgcgtgaccgcgttcggcgaaaccgacttccgcccggatatggcgaaaatcgacgtgccgacgctggtgatccacggcagcaacgaccagatcgtgccgtttgaaacgaccggcaagctggcggcggaaatgatcaaaaacgccacgctgaaggtgtacgacaacgcgccgcacggcttcgcgctgacccaccaggatcagctcaacgaagatctgctggcgtttgtgaagtcgctgtaa

SEQ ID NO: 120382 - DNA, 2064 bp, Enterobacter cloacae
atggttcaggatcgcaccgcgttagcccccttctttaatgagcatatcaataacaacagccgatacagccctaaatgggggccagcctatcaccagatggtcaaacgcgtagcgacagagcgacccgagtttcgtgatcaaagccttatcaaggcactttggtatgaacgctccaacggcgtcgccagcattaaacagggtggaatgtcgcagaacgaatacaatgcggcccagattcacctgcgggaaatcacaaccctgatggcacagggctgcaccccggccgtatatgaaaaggtggtcaacaagctacaggcgcttaaggccaaatccattctcaagaaacagtactgggcgttgtgtcaccgggcttttgccacgctgtaccctgagcgggtttcgaacgtggtaaataccaaaatgttttcccgcatttataactactgtaataaccgcttcgggcttgggctcgccgggaaagggacgtggtttgaaaaaaacctggagctgaaggcggctctgaaccgcgagctgggcggccatgtagaccctgtcgaactcaatatgtcgctgtggcatctctacacgcatttcatcaaagataagagcgatatcggcctggtaggtagcgagtcctgggccgaagacgacgatcaggatacggatgagagcgtggcggatgttccactgaacgtcattctctatggccctccggggacgggtaaaacctattccaccgttgagcatgccgtccgtgcctgtgaacccgctgagtattcccgcctgctggatggccttcagggcagtgattaccgaaacgcacttaaagcgctttatgaccggctggtctccgaacagcgcatccgctttgtcactttccaccaaagctttggttatgaagagtttattgaagggctacgcgccgataccacccgtgacggtaacgttcgctatgacattaaatccggcgtctttaagcaaatctgtgaggatgcggcgtttggttacgcaggtgaacagctggcgctgaacgaggcgctatcaaagtttcaaaaagaactgctgaatggcgaagccgccacgctcaaaacgacatcaggtaaaccgttcggcgtcacctataaaagtgaaacgaacttcggcatcttccctttaaacagcaaaaaaggggatctggggaatggatacaacgcctacgtgaaggacatcaaagcttggtatcagaacaacgggattgatatccacaacgagtcgtatgtccggggtatcctcaactatcttcatgataattataatcttcccgtcacaccgaaaaaaaatgcaccggcaaaacgccagaactacgtgctgattgttgacgagattaaccgtggcaatatctccaaaattttcggagagctcatcaccttaattgagaaatccaagcgcatgggtgaacccgaggccctgagcgtgacgctaccctattcgggcgaaaaattcagcgtgccaaacaacctgttcctggtcggcaccatgaataccgcggaccgttccctgaccgctctggacaccgccctgcgccgccgcttcgagtttaaggccatgctgccgaaagcctccattctggaaggccacgtcatcaaaggtatcgatctcaaacggctactgcagatgctcaatgaacgcattgaggcactgtacgatagcgagcacacgctcgggcacgcttttttcataccggtaattgagacggaggacgatgacgttgctttcgcccgtctgcagcgggtgattaaaaataaagtgctgccgctgctggaggagtacttttacaacgactggcagaaaattcgtctggtccttggagataaccagaagcaggatcccgccctgtgcttcatccgttcgatcaaaaacgagggaaatattcagcggctgtttggaacggatgcatcggacgatctgcaggaagagggagagcgctatcaccttgcaggcgaagacgatcctgtctggaataatgccatcgcctggcgtcagatttacgatgcaggtgcgcgaggcgcggagaacgacgaatga

SEQ ID NO: 120383 - DNA, 1305 bp, Enterobacter cloacae
atgaccgggcggcggcagtggtccacctttgaatacggttatctggtcagtaaagaggacagcggccgggttaaggacgcagtggagcttcctccggcctgttttgcgtggctggagcaatgctgcctgaacgacgatgcggaatacgacgcgcgcctgctgacgctgaaaacggtcgggcgcgtgaaggtgctgcaggtgaaaaactatgtcggcgtcattgcgctgccgggaggagcgttcatcgaggtgttgccaaagaccggccatgataacgcccgcgaacagctgatgatgatgctgcgcacgctgaaaaccttccggcacatcgccacaacctccgccagtatcaaaacctcgcgcatgccgctgatggatatctttattcatcaatttatccagagcgtccaggcggtcctgcagcagggtcttaagcgtgactaccttcgccagcaggagaatctaccgtggatgaagggaaaactgcgggtttcagcacaactgtcgacaaatagcgttcgccgggatcgctttcaggtggagtatgacgagtacagtgttgaccgaccggagaaccgcattctcaaaacggccatcgatacggtttcgcgcctgacccgcacccctcagctcatccagcagcttcgccccttgcagtcggccttcgaaggtattcctcccgttgttgataccgcacacgcattcgatctggttcgcctcgacaggcatatgcatcactatgaacaggcgctggagtgggccaaattgatcctacacggggagtcaccactttgtatgcagggtcatgctgatgccatatcgctgctctttccaatggaagcggtatttgaatcctttgttgcggcgtggatgaggcatcatcatcatcaacgttaccaaattgatacccaagcaaaaacacacactctggctcgatatcacaccaggtatatgtttagactcaagccggatatctggcttcgcccgtatgacacgtcgaaacattcttcaattatttgcgatacgaaatggaaaaagattaagcctcataaacctggctttaacatttcgcaaagcgatctttaccagatgctggcctacggaacgaaatatctcgatagccgcggcgatatgatcctgatctacccgcagcatgacggttttagcgatgcgcttccccatcccttcgaacttcataagccggacagccatgcgctacgtttgtggatcgtcccttttaccatcggaaccagtattcagagctcgatactccacctccccgagtccctgaagctgcggaattag

SEQ ID NO: 120384 - DNA, 456 bp, Enterobacter cloacae
atggctgcgacgaattttaagccagagtttactgtttgcaaaacagaatcagacgctttcaccggcatgattgaaaaccgcgagttggtacgcaaaaacagcgcccgccgtctgcacggcaaccaacccaatgcggcgcccgtccaccctcgcgcggaaacgccgcaggacagtgccgcttgctgcgaactctatgctcgcatagacatgaaatatcttctcctgggcggcgactggttaaaacgtgcgggctttatcaacggcatgcccgtaaaaatccgcgccatgaaagactgcattgtaattacgccgcagcatacaagagaattatggggatgcctggaaggtatgagcgtggtgaatataaataacaagaaagtggcgcagtggttaaaaacatttcctggcgcgttaaatgacaccggcgatattccggtgattaagcgtaacgcctga

SEQ ID NO: 120385 - DNA, 870 bp, Enterobacter cloacae
atggcttccagcaaaactctcgaacaggcaattgccgacatcaccatctggcgcaaaggcgaacagcgtgcgccgcataagcctttattgcttctgtacgtgctggcgaactatcagcaggggcatgcgcgactgtttgattacggaaccgaggtccacgagcagctgcttagcctgttagaacgctttggcccacagaggaaggcacattatccaaatatgcccttctggcggctcaaaggagacggtttttgggatctgaagaatactgagttttgttcgaccactggcagtaaacaaccgcctgttaaagaacttgtagaacataacgtcgcaggcggatttgatgaagaacactttgcgctgctgagtaagaacaaaaacctgatcggctcgctggcgcagcaaatccttgaagcgcattttccagaaagcatacaggaagatattgcggatgagatgggttttgatatccagcagattcgtaaggttcgcgacccgctgttccgccaggaggttctgcgagcttataactatgagtgtgcaatctgcgggtttaacatgcgacatgataacgcctctgttggacttgaagccgcgcatatcaagtggaagcagtttggcgggccgtgtgagatcccgaatgggctggcgctatgtgcaattcatcataaggcgtttgataagggatcgattgggctggatgagagtatgcgggtactcgtatctgaggcggtgaatggaggcgggattgttgggcagctgttctgggattttgtcgggaagcagatagcgctgccggtggtgaaagggaattatccaggtgagaggtttgtggagtggcatcggagggaggtgtttagaggatga

SEQ ID NO: 120386 - DNA, 243 bp, Enterobacter cloacae
atggtaaccagggaaagtatgaaaaaatggatcatcgagtgtcttcaggaacggggtggtagcgcttggccacgtgtagtctcaaagtatgtatgggacagctacgaggctgagcttagggattccggcgatatgttgtatacgtggcaatatgacattcgttgggccgctcaacaattgagaaacgaaggtactctaaaaccagtaaatagacgcagagatttaccatgggagctagcatag

SEQ ID NO: 120387 - DNA, 516 bp, Enterobacter cloacae
gtgagtctacttgaattgattgaatcaaagagggcacatatcgccagaaattcttcagaaaatggaatattaggggaacgaagcctacttgactcgcaagctttatggataaaaagacctaaagggaaagacatgaaaaatctgctagctgcgctgaagcagtttgaaaatattgaaataaaggcatcaagctttgattttatttctatcccggaaaatgtaagtgttgactttagtgacgttagctccttggctggagtattaaaatcattaacatttattgaacttaaaacctgcaatcaaaaaagggttaccactcctgacttcaggaatttcttctttgccattactgagaacgaaataatagcatcagaacttctcggcgataggcatatagttgtactacacaacaaaataacgggaggtaaactggtaacaacaataccagaaattataaatagggccaattctaagaactggcagctgtctgtaagccttgggtcgcgagaagtctag

SEQ ID NO: 120388 - DNA, 786 bp, Enterobacter cloacae
atgataaacaaaactaccgttaataaacttgtaacctttaactccaaacttgatacgtctcaaaaaataataaggaatcttattgttgcagtcgtcatttgttttcttctaaatttcctagggttagacagtttgtggaaggggttctttatactaactttgatttactggagcttttcggtattccatagtctaattattatttataaaaaagcatatgaaacaatattgggtaaatggatcctaatattaggaggcacgctatgtgtgaattttgccctatgtctttcaggtgtggtgatcaatgatataacttcagtttcaccaacaaacttccctcactctttgatatttattgcggcttcgatgattcctttgatcgtgcctctttgtatgatcttgctgttcgcggttattttggtgtcagtacctatatggggctggttttttgtgtatgatgataagcttaagaaatttttaatgccaggatatgaacctaatcagcagaggtttttgcataaaagcactttaataatccaagttatatctttaataatttattgtgcttttatttttcaattttcacgactcataggtaatgattatatatcctatatcaataataaatctcaagggatgatttacacactcgagatgtttgataaaagtccatgtgccaacattaataatgctaaggtttcatttttaggtgatggcaatgttctggttgcgactaggaataatgatcaatactcattcaaagtcatgaagtgtgagataaaatag

SEQ ID NO: 120389 - DNA, 468 bp, Enterobacter cloacae
atgattaacaatagacatattgcaatgttatttgccggactgagtatatttagcttaatagctgttattattacatttgttgtgtggaacaagccggaaaagttatcttttggcgttgatgacatcgttcttaatgatgtcaaaggtaatgttgagaaatgcaacatgaatgattctttgctttatgcaaaaggctggatattctctactaacaattataaaggcgtgtacaagggaaacacatatgtcgcaattaatgaaaatggaacgctttacaaggtaaaaactgttagagaggacaggcctgacgttactacgtactttaaggaaaaaaagaaaaagtatgacttaagcggatattctgcttcatcacgattcggattgtttggcgttgaaccatcgcgcgaaatttttattatcacagagcacgaaggtgttattagaggcatgaaatatgcttgtaaataa

SEQ ID NO: 120390 - DNA, 1269 bp, Enterobacter cloacae
atgcttgtaaataatcgaaacagcttaaattcaatatcgtttttgacgatagcaatatgtttgatttatgttttttcttctgttgtttttaaggatatcactgatgatcacttcttttcgacagcgttaagcaagtattcgatttttgaaatacttaaaataagatatgacacatggagtggaagaattctgatagaagcgttcttgatgaaaaccatcaacgttcatctattccctcaaattgccatatctctttcatgtattttacttgcattctctgtatcgaaactggcaagcattgatggacgggtgacaataccgttcattgcattgtctatgctcttgtttttatctgacttccacactaacaggcaagcaactctgtggattactggagcttataactatataattccaatttctattggactgtatgccgtgacaatttatcttgatatggatcagtccatttttaagaagttgtcttcatgtgtactgatttttcttgccagcaataatgagcaattcgctgttaccgccataatagcaacggccgttatcatgattgttaaattcaaagcaaaggggttaacagcttatgatgctgcgttcactgtatctctgctctgcggtggcgcaattgtcttggctgcgcctggtaacgttgtgcgtctccattcagaaataatcaactggatgccggacttcgaaaactatggagttctgtacaagttgtcagtaggtgttgatagaatttcaaatcaagttaacttcgaagataattttcttttcattgcatgctgctttgcttcactctcatatctgttactaagggaagaacaaagcatagcggttaaatccatggctctggtatttactttaaaaatagttacctttctactattgttctatccatcaacacatataagtgaattattgcgttctgataattatattaagccctcatcttgggggcatgcatcagtatacttaaattaccttataaaccttgtttcgttatcatccattttaattacatgtttgatggcttcaagctcgaaaaaagaagcaacaaaaataagcgttatcttagtttgcggagtcctttccgcgctaatgattggtttctctcctacagcttacgcaagtggaaccagagttatgttcttgttcgatataagcatcgctgttgctacagtattcatgataaggaatatctttagccgaccgccagccatcggttgtggctcaagacccaattccctatag

SEQ ID NO: 120391 - DNA, 2553 bp, Enterobacter cloacae
atgaaacgcaatcgcgttaacgtgctgtccgtcgtcaactccgcttcaaacatcaccactgaaaccatcgacggcaagccacatatcgtggttcgcggcatcacgcctgtcgtggacgatatcgtgatgaaccggaagttgtacccggcagcagaaatcgaaaaggcctacaacacgcttgagcgtaacccgatgccgctgggccatccgaaagtggacggcaagcatgtatcggcgcgcgatgtccgggcggtgaatgaataccacgtaggggcctggctgcagaatgtcagccacaacgacgggaaggtgacgggcgacatgtacgttaaccgccagtacgccgagtcgagcgacaagggcaagcgcctgattaaccgtcttgacgagatgctggccggtaccaactcagaaccgatccacatctccaccgggctgctgtattccggcatcgccgcaaatggagagtcgaagggcaagaagtacaacgagatcgccaccaacatgatgtttgaccatgtggcggtgctgcttgatgagccgggcgccggaacgccggaggatggggtgggcatcttcgttaactctgaaggtgatgagaccgaaattgaagtctgcaacctgcaagacgcgatcgttagtgataaccgcaaagatgggtggctgaataagatcaagttctttgtcgctaatgacggcgggatgtcattcgacgatatagccgcatcgctgcgtgaagcaattcgctcaaccgaacccggccaccgtgccgggtttttttatggaatcaatatggctacgcaacctaccaatttgcctgtaccaagcgaatcttatcgcgacctgaagtataacgcggggaaaattgacgaattcgttacgtctttatcgctgcaatacatcgatcgctttggcaatgctcattacaccatagaaggcctgcgttggctggcgcaacaggctattgcccagtatggatggatacctgtaggaaccttccaggatggcgctacgttaactttgcctaaccaaattcttaaagatactacagatggtgcatactaccgttgggacggtgttttacctaagactgtcccgtctggttcaactccgtctacgtctggcggaactggcgtgggggcatggttgagcgtaggtgactctactctacgagctatgttagcagcgcctggtggcgacaaacatataggtagctcatggggtgggggcagtgtatgggaagattatgcaccaaagaaaaaggtttttttgggtgtgcgattactcccaacaatgtctcaggcagatatacagtccgcgctccaggctggaggtaatatttattttgatgttactgaggatggactaactacagattatgttcttaatactggttataacctttatgagaataccagaatatacttccaccccaaggctaagctggttgccaatgcaaataacataataatgttgaatgcagatccatcaataacgttaacaggctatgtcagaaacctgaaaatattcgggttcaggctgtcatttaacaacaagacaggagtcactggcgctaagtttgttagatgcaggaacaatagtggcatttttaactcctggattgatatgggattgggtgctagttgcactggcgtacttgttagcacattgtgttatggatttaaaaatgatggcctcgaaatactaaatggtggttctggttcactttgctgcgtgtacgaagatggagcaaatgcctgtcttctcgacaactataacatgtatagtgcagacccatcaggcgctttacctgactacaggatcctgattcgaagcacgaaagatggcagcgaaggcaacggaactacaacgttcagtacgttctcaatcatgatcggttcagggttcattcaaaacagtgagcgttatggaatcctggataatggtgcgtacggtacgatgattgggaacaacgtttattttgaaggaaacaaaataaatgatgttcgtttgtccgggtcaaaaggtgctgtagttgatggcactcatcattctacagagctgggtgcggcctgcgtcggcgcaaggaatacagttggctgtgtaattagagatacacagttaagaggatctcgctcaactggatattacgatatagatacaagcaacacagattgctacatagactatcaccgcgatacaggtatatcttcactcggcgttgtaaccggtgctatcgttaaccgcgcaactggtcgagtagcaagtgttgtcctccctgcaagcattaaccttcggtcagggaataatattttttatgtcaatgttgttaataatgacaacatctctgtttctggaagtacttacaacggaatgaccattgatataattgttagaggtgccaatttaactaacgtcacatttgcaggtctccctcttgatatgaccgcagcaaataccgcggtcataaaaacaacaagagtcacagcgacgtatatcaacgctatagggaattgggtcttgagccacaaccgatggctggcggtcggctaa

SEQ ID NO: 120392 - DNA, 189 bp, Enterobacter cloacae
atgaaatactttgttgcttataagattattgcaagagaaggcgtcgttggcggagaggggtctacagtgattaaagatactggggacgaagaggctgaggcggtatttttaaagcttccagcagctattgctggcaaaagaaattgccagccaaatgatgtggtaattaccgcctttaatcgcgtttaa

SEQ ID NO: 120393 - DNA, 1452 bp, Enterobacter cloacae
gtgaacgaaagcgaaatgaacaaacaatttgccgcaaatgccagcctcgatcgtgatcgtatgcgctacgttaacgctctgtttaatggcaccagtaatacgaaacgccagcgactgtaccaggagtttggctatccactgaatctgaccttcgacgactttttccgagcctacagccgcaatgctattgctaacgctgcggttaaccggatggtcgatggctgctgggaggacttcccggatgtctacgaaggtgaccagacgaaggatgccacccagcaaacggactgggataagcgcgtaaacaaactgctaaagcgttgctggaaacagataaagggcgctgacaaacgcaacctagtggggcgctactctgcgctgctgatacaggtaaaggataaccggacctgggataaaccggtcgataagatagttactgccaggcagaaggaaaaggcgttagttaagttgatccctgtgtgggaggcacagattgagcctgtcacttacaacgaagaccagagcagcgagaactatggtgacgtcaccatgtactcgtttactgaaatcccagtacaacagcaggcaggcgggcagcccggacgcatcattaacgtccaccctgaccgcgtaattatcctcgctgaagggtcagacgatggacgcctctactctggcgaatcaatgcttgctgctggcttccataaaatcatggacagcgaaaaggtctccggcggtgcggctgaaggtttcttcaaaaacgccagccgccagctcaacttcaacttcagcgccaaaacaaacttctcagcactggctaaggctcttggtgtttcagaatctcagctatccgaagcccttgatgggcaggtgcgacgccttaacgatagctctgatagcgctgtgatgatgcaggagggcgatgttagtgtgttatcggttgcagcggcggacccagaaccaacgtggcgaaccattttgaatgagttttgcgccaccgtgccgatccctgtcaaagtactggtcggcatgcagacgggcgagcgggccagtagcgaggatgcgaaagactgggccaaaaccagaatgagccggcgaaccggattcctgacagacctgataacggacatcgttacccgattctgggagtttggcttcattcctccagcggcaggcgaggaaatcaccgtcggatggtccgatctactggcaccgagccaggcagagaagattgccaacatggacaaactcgcggacgtggccgttaagtcgacaaacgcgtttggacgctcggctatcgaagagaacgagatccgcgctgctggcgaactgcaaccactacctgagcttgatgatgaggttccgcctgatggcaacaaaccaaaatctgatcctctggccgaccctcaaccagaagccgaaaagtccggtgataccacggtcgaaagttga

SEQ ID NO: 120394 - DNA, 1266 bp, Enterobacter cloacae
atgaattacaaagctgtatggaagccactgcctggatcgcagtctctggcgctgagttgcccatgtaacgaaatcctgttcgagggtactcgcggaccaggcaagaccgctgcgcagttagccaggttcaggcgtaatgtcggcgtgggttatggctcgttctggcgcggcgtcattttcgacaccgaatataagaaccttgccgacatcatcactcagtcgaagcgtatgtttcgcctgttcaacgacggtgcgcgctatctgtcatctgcgagcgaattgcgatgggtatggcctactggcgaggagctgctcttccgcttcggcaaagaggcggacgcctactgggatttccacgggcaggaattcccgttcattggctttaacgagctgacgaaacagcagtctccagagttctacgaaatgatgttctcctgccggcgctcatcgttcaggccggaaaactacccgctagagaatggcaagttactgaggtcgatcccgctggagacgttcagcacgaccaacccattcggcatcggtcatacctgggtgaagaagcgcttcattgagccagcgccgcgcggaaccgtgcagcgcgaccggcagatggtgttcaaccctcagacagaacgagaagaggaaatcacgctgacccgcgtggccatccacggatcgttcaaagagaacccgtacctcgacccgcagtacatcgcgacgctgatggcaattaaagaccctaaccgacgcaaagcgtgggtggagggctcctgggatgtgaccagcggcgggcgattcgaccacctgtggaatgaatcgctgcacgtcattaagccattccgcataccggatagttggacagttgaccgctcccatgactggggtgagtcgaagccgttctcaaatctgtggtgggctcaggctgatggcactgccgccgaactgcctgatggtcggcagttctgcccgccggcagggacgttaatcctgatcggagaatggtatggctgcccgcctgatgagctgaacaaaggcctgaatatgtcatccaccaacgtcgcgaaaggcgtggcgtggattgacaagcggctggtgggcgaagacgtcgacgagccggaagagattcaaatacccgtgctggttcgcgacagcaaaaacccagatgacgtagatacccagcaggaagaccacgactgggatgctacccgctaccgagtactgcattcaccaaagaaaatcaccggcatgttggtgcgctcgcgctga

SEQ ID NO: 120395 - DNA, 651 bp, Enterobacter cloacae
atggcaaaaccggactgggaggccatcgagacggcgtaccgggccggagtgatgtccctccgagaaatagcatcacaacacggtatcagcgaaggcgctatccgtaagcgcgccaagcgtgacgactggtcgcgtgacctcaatgcgaagattcagcaaaaggctgatgatctggtacgcaaacaggaggtacgcaaacaggtacgcaacgaaagcactttgaccgaacgcgtactgatagaggcgactgccgaggtaattgccacggtacgcatggagcaccggggagacatccgccgggctcgtgaactgaccaacacgctattcgatgaacttggtgcgcagtgcgcagatgtaagcgcgctcgagcagttgggcgacatcatgtttgaccccgacgataaagggcgggaccggctcaatgaaatttatcagaaagtgatcagcctgccttcccgcgttaaatccatgaaagacctgagcgacagcctgaagacgctgatcggcctcgagcgtgaggcatacagcatcgagaataaggctgaaacgaaagaggtcacccataacgtcatgctggtgccaaccagtgacaacgtggatgactgggaggcggcagcgcagaaacaacaggacggggtgctcggtggatga

SEQ ID NO: 120396 - DNA, 519 bp, Enterobacter cloacae
atgaataatccgtcagttattccggccttcgacttccgcgaaatggtcacgaccctcgacaacaagataatcaccacatcactcaaggtggcggattactttggcaagcgacacaaagacgttttgcgtgccatacgtaacctgaaatgctccgatgacttcacccagcgcaattttgcgcccattgatttcattgataaaaatggcgatgttcagcctatgtataacatcacccgtgacggatgcatgatgctcgtgatggggttcactggcaaaacagctgccgcagtaaaggagtgttacatcaatgcctttaactggatggccgagcagctaaaccgacgcatggcgatgggtgaagaaatgcagcaccgcttcgccattaaagaaacgcgctcaaagctgaaaggcacgatcggaagccgattgatgaatgagcggaagaaagagaagcgcgttctggagctcgagcatgagcacatcacgcaggttacgcagcctgagttgctgattagctaa

SEQ ID NO: 120397 - DNA, 321 bp, Enterobacter cloacae
atgcaacgtatgaacccaacaaatggacacgatctgccgtactggtggtcggcggccttgggtctgttctctttgcttagcctacaggattacgtttttattatcggcgcgctggtatcggcgttcttcacgataaaaacctattacgcaaaacggaaagaagagcgtgagcgtatggctgaggaaaggaaacgaacccagctgctggaaaactacttatctgatgtaggtaaaaaacctcactccgatcgtccggctgccgccgaggtggttacggaggcaatgcggagaatttccggtggcacagttgaaactgagtaa

SEQ ID NO: 120398 - DNA, 183 bp, Enterobacter cloacae
atgatgctaatgctgaacctgagtatcggttcgagtccgatcgccacacacagaacccactacctgggacccttcggccagagagccgacattgccttaccctcatcttcctggcttgtcgccaggtttattattcaggccgcagacaatcaattccagatgccacgtagctatcgtgtctga

SEQ ID NO: 120399 - DNA, 660 bp, Enterobacter cloacae
atgaccggaaaatactctcttatctacgcagatcctccctggtcttacggcaacaccatcagcaatggcgccgctgccgatcactactccaccatgaagctcatcgacatcaagcgcctgccagtgtgggaacttgccgccgaaaatgcagtgctggcgatgtggtacaccggtacgcataaccaggaggccatcgaactggctgaggcctggggttttaccgttcgcacgatgaagggctttacctgggtgaagctgaatcagaacgctgagttgcgcatcaacaaggcgctggccgagggtgaagtcaccgacttttacgacttcctcgatctgctaaacgccgagacgcgcatgaacggtggcaaccacacccgggccaacaccgaagacctgctgattgccacccgcggcgccgggcttgagcgaaagcacgccgggattaagcaggtggtctacagcccgctcggcgcgcacagcgaaaagccgtgggaagtgcgccaccggctggagttgctttacggcgaagtgccgcgcattgaattattcagccgcagcgcggcgccgggctgggatcactggggaaatcagttcgccaccgccgcggtggaactgctgcccggctgcgccatcgatgttgttaagacggaggccgcatga

SEQ ID NO: 120400 - DNA, 219 bp, Enterobacter cloacae
atgacgccagcaaatgaaaacgccatccgatccgcctgccgccgctgcaccgaggaaatccagcaggccatgcgcaagaagcctaagcctaactggaacgaaacggtgcctcccatcatcaacaagcatcacaagaaaattgaagctctgggagttagcctcctggagttcgtcgtcaaaactggccgccttaacgggcggtttggagccgaacaatga

SEQ ID NO: 120401 - DNA, 246 bp, Enterobacter cloacae
atgagcgataagtgtacgttgaatggaaatctaattaatcgctgcgacatgctggctaagtccctcgaatatggaaacccatcatatcgttcgaaaggcgcgtttatccctgaacgagtgaatttcagcactggcaagccggcaatcgatattgcacaactacactccggcgagtatgtcggacgtggtatcgctatgaacttctgccccttctgcggggagaatcttaagacatgggagcagtga

SEQ ID NO: 120402 - DNA, 222 bp, Enterobacter cloacae
atggccgacatcatcgataccgcagctgagattgaagagcttcagcgtaacgctgccctttccgctcaccgcatcgaccgtaatgccgtatcagctgggcgttgtgaagagtgcgacgaaccaattcccgagccgcggcgcgctgccgttcccggatgccagacatgcgcggattgccaatccgtcattgagctgaagaataagcagagggggcaccagtga

SEQ ID NO: 120403 - DNA, 723 bp, Enterobacter cloacae
atgatttttaacggcgagatggtgtgcgccattctcgacggcaggaagacgcagacacgcaggatcatgaaggtacagcctgtcctcaatggtagtttttatgaggtatacggtgctggatgggtccggagcatgaaatctgttcctgcaattccaggacacagccttgccagtaattgtccattcggtctggttggcgatcgcatctgggtacgggaaacgtggggagtagtgagtcatgaactggatgaggacggtcgcattcagccatggaaccctgaccgtcctgccacagccattcacgaaatgccgtttggtagtggttactacactggtcacgctatctacgcagcagatggggattttacttggggtgatgacgatggctatgaagatggccgttcgtgctggaaaccatctatccacatgcctcacgcagcctgtcgcattctgctggaagttaccggcgtgcgggtggagcgcttgaatggcatcagtgaagcggatgcagaagcggaaggaatcgacatggatgcacttgctgactcacaggactgttacgactgcattgcagaccacaatatgaccggaagaccaacggcaacaggcgcatttaagtacctgtgggaatcaatctacggcgaggaaagttggaaggccaacccatgggtttgggtaattgaatttaaggtggtgcccaatgttcaggataatccagcctga

SEQ ID NO: 120404 - DNA, 255 bp, Enterobacter cloacae
atgccaggttgcttagtttttaggaatgatggcccagtaatcgatttgaaaatgaaagtggagtcacctgtgttttactatgcaaatatcagcacaggtaagaaacaaggataccctgtccatgaatatgtttgggtcgatccagatacgaaagaaaaatacatataccaaattgcatatgatcagaagccatcagaacaagagattgaaaaggcaataacagagttaaagcccataccaatatctaaattttaa

SEQ ID NO: 120405 - DNA, 171 bp, Enterobacter cloacae
atgaagagtaacgcggccgcacgtcggctacttgggatgccccactggcgaagtaatacgcaacagatgcattttgtcgctaacgtacatcatgcaacaaagaccggaaagatggttagcgcatgggtagctatgcggactaaatcagatgcctttttctatttcacttaa

SEQ ID NO: 120406 - DNA, 1164 bp, Enterobacter cloacae
atgtcaatcaccctcagaggcggcgtctggcactgtcatttcgttacgccgtcaggaaaaagaattagacaatctcttggaacgggggacaagaaacaagcgcaggagctgcacgacaaactgaaggctgaagcgtggcgggttgataaaatcggggaactgccgacgaggacgtttgaggaatgttgcatcaggtggatccgcgagaaggagcataagcggtcacttgatgacgataagaccaaaatcgaatatttcctgcggcatttctccggccgggatatttcaaccatcacggctgatcaggttcatgaagctgtttcgaagatggtcaaccgcaagcatattcaggtgtgggagtcgcgccgggacgcggctatacgccgggggaaagagccgcctccgtatgttgagaaaccggtaagccaggcgacaaagagccagcacctttcgttcatgcgatctctgttcaaggctgcggcaaatgactggggctggattaaaacggccccggttataaaaaccaaaaagccgatcagcaaacgcatccgatggctgaccagggacgaggcagaaaggttaattgcctgcatgccggagtcgataaagccggtggtgatatttgcactggcaaccggcctgcgccgctccaacattattgatctggagtggcagcaggtcgatatgcagagaaaggttgcatgggtaaatccggagaacgcgaaggcgggcaaggctatcggcgtggctctgaatgataccgcatgcagggtgttaagggatcagatcgggaaaagttccaggtgggtattcgttcacacgaagccatcaacgcgcccggataaaaccgtcactccggctgtccgcaaaatgcgagtggatgacaatgtcgcctggcgcattggattggaaagagcgggtatagaagacttccgttttcatgacctccggcatacctgggcgagctggttaattcagtccggcgtgccgttgtccgttctgcaagaaatgggcggctgggagtccatcgaaatggtccgtcgatacgctcacctggcaccgaaccacttaagcgaacacgcacggaaaattgatgccatttttggcaaccatgacacaaatacgacacaaggagaaaatcaggctggcttgaaactggcgtaa

SEQ ID NO: 120407 - DNA, 696 bp, Enterobacter cloacae
atgaaacgtgccgtcgtcgtgttcagcggaggacaagattccaccacctgcctgattcaggcgcttcaccagtatgatgaagtgcactgcgtcacttttgattatggtcagcgtcatcgcgctgaaatcgatgtcgctcgtgaactggctctcaaactgggcgcccgcgctcataaagtgctggacgtgacgctgttaaatgaactggccgtcagcagccttacccgcgacagcattccggtgcctgattacgaaccggatgcctgcggcattccgaacaccttcgtaccgggccgcaacattctcttcctgaccctgacggcgatctatgcctaccaggtgaaagccgaagcggtgatcacgggcgtgtgtgagaccgacttctctggctacccggactgccgggatgaattcgtgaaagcactcaatcacgccgtcgatctgggaatggcaaaagagacccgcttcgaaacgccgctgatgtggctggataaggctgaaacctgggcgctggccgactactggggcaagctggatgtcgttcgcaacgagaccctgacctgctacaacggcattaaaggggacggctgtgggcagtgtgccgcctgtaacctgcgcgcgaacggtctgaatcattattttgcggataaagcgggcgttatggccgcaatgcagaaaaagaccgggctgaaataa

SEQ ID NO: 120408 - DNA, 330 bp, Enterobacter cloacae
atgagcaaaagtgagcgaaaattctcaagtaccgtcagccatgatgaagctgtagtcaaaatgctgcgcgaaaatccttcttacgcgcaactctatctgcaaattgcactggatgaaatttacgaggaccaggggatcccagcctatttgattgccctcagacgcgttatcgaagcgcgcggcggtattggagagatttcagccaaagcggggctttcacgtcagcagctataccgtaccctgtccgaaaatggtaacccaacgctgactacactgatgaaaattacccgtgctgccggtgtaaaactgttcgacagcacggtcaggtag

SEQ ID NO: 120409 - DNA, 351 bp, Enterobacter cloacae
atgaacagggactacgttgttaaacgttaccgaacccgcgacggaaaaataccgtttgaggattgggtagcaaagttgagacgaaaggatccggagctggcgtttcggatccttctgcgaatcgaccgcgctgagaaggggaattttggcgattaccgttatctcagagagggtgtctgggagttgaaggttgatagtggtcccggttatcgagtctattttgcggtccagcatcgggaaatcttattgttgctgatcggcggtgacaaaaagagccagaaagcggatgtgatgctggcaatagattactggaaagatcatcaaaaggataaactccatgagcaaaagtga

SEQ ID NO: 120410 - DNA, 948 bp, Enterobacter cloacae
atgagactcaggaaatacaataaaagtttgggatggttgtcattattcgcaggcactgtattactcagtggctgcgattctgcactactagaccccaaaggacagattggactggaacaacgttcattgatactgacggcttttggcctgatgttgattgtggttattcctgccatcttgatggctgttggtttcgcctggaagtatcgtgcgagcaataaagatgcgaagtatagccctaactggtcacactccaataaagtggaagctgtggtctggacggtacctattctgatcatcctgttccttgctgtactgacctggaaaaccactcacgcacttgagccgagcaaaccgctggttcacgatgaaaaaccgattaccattgaagtggtctccatggactggaaatggttcttcatctatccagaacagggcattgctaccgtgaatgaaatcgccttcccggcgaacactccggttcagttcaaagtgacctccaactccgtaatgaactccttcttcatcccacgtctgggtagccagatttacgcgatggccggtatgcagactaacctgcacctgatcgcgaatgaagcaggcacctacgacggtatctccgccagctatagtggcccgggcttctcgggtatgaagttcaaagctatcgctacgccagaccgcgcgactttcgaccagtgggttgcaaaagcgaagcagtctaccaacaccatgtctgacatggcggcgttcgaaaaagtggctgcacctagcgaatacaacaaggtggagtacttctctaacgtgaaaccgaatctgttcaaagatgttattggcaaatttatggatcacggcatgagcatggacatgacccagcctgaaggcgagcacaacacgcaccagggtatggaaggcatggacatgagccacgcggaaaccgctcactaa

SEQ ID NO: 120411 - DNA, 381 bp, Enterobacter cloacae
atgaaaaacaaaaaactcaggcagttagttctgtatataaggactcattccgaattgaatatgccatcatggcgatgggggcacttagcaccccacattcagaagaaatatgataagttctttatccgttataagggtaagtatagccgctatcgtttatgtgctaaacttgctgctattttctatattgtttttggtcttatatttccatctacgctattgaaggatggtacgggctatatgattgttggaattatcttgatgttgtcttgtttatatatggcggttatgttttggtcgcttttgcccaatcggaaattaattaataaatacaatgttgaattgttgaaaattgatgcgcgtaagtatcaggacggctga

SEQ ID NO: 120412 - DNA, 222 bp, Enterobacter cloacae
atggagataaaagatatactcacatttgcagggctcgttatcacgtctataaccgcagcagtcggcgtttataaattatttaaagatgtgagttggtttctaccaaaggcgacgcgatatacacatctttttgaaaaatactctgagtatattgaccctctcgaaatggagtttatgaaagccgaaataaaaagggatgttaaaaaagcatattgggaatga

SEQ ID NO: 120413 - DNA, 240 bp, Enterobacter cloacae
atgaataatatactatggggagacctggaaacctattacgaaaatcccatcaacaatggtacccatgcctatgcggagggcgtcgaagtaatgctgttcacctgggctacctgtcccagctcgtggcacttgctcagaaccgctatcacgatgcgccgaaagagaatgtttttacagggcataaactggatgtacaccatgatcgagaaagctacgaaccctttagcggtgactaactga

SEQ ID NO: 120414 - DNA, 621 bp, Enterobacter cloacae
atggatttacaagcatgggataacattatctctatcgcttcgaatgcagtgacagcgctgggtgtggtcggaggggtagtttttggcggttcgaaactgaaagactatcttcatgtaaaaaagaacgatgttgcttttcacaccgcgtgtgcactatatgatgagttcacaaactctcgtgctaaatacagccagatacggatttcattaaaatatctgatgaacatgttggatgagttatgtagaagcaatacaaatattactccagactcatattttcaaatccaagaaattggcacagccgattttcagaactcattgaccattggcaatatcttcattaaaactaacaacttcaatgtattattcaaaggcaattctttcttcaaagtacaagatattgtttacatcactaatgaaatatcaataaacattactgatttcttcgcatgtgcaatcaactcattaaaaggaagaatagtctcaaaagaagatctatctgagttactacgatattataaacaatatgaaaatcttacaagtgattatcttgataaatgttctgaaatacaaaaaatcaagtttgaagattttataatgttcacaaaaagctggggttaa

SEQ ID NO: 120415 - DNA, 225 bp, Enterobacter cloacae
atgaaattagctttgatcggttctggcaacatgccgctgatgcagtggattttagatggtacaaacgatgatgcgatcatcaacatttcagcgctagcgcgtcggctggggtgtagtcgttccagcctgttaaatcgcatccacatgcatggattcgatagtgcagtgaggcattccttgaacgtacagagacaacgaaaactgaaaaaatgggggccgggttaa

SEQ ID NO: 120416 - DNA, 807 bp, Enterobacter cloacae
atggatattgcgctgctcaacaggggctggaacagaacatggtcagataccatggtgaatcttgaagcccggaaactcgtcgaaactgcaaatcggctatcagcattctatttgcaagatgggataacacgtatcaagtttgtcgaagagataaggcaggtcgtagagaaagaatttgaaactgcacgacgggccaaaaccgatgaagaatgcattgcatgcatcaaaaatctgcgtgccgaaacagataatctgcaagaacaagaacgcctgttgcgaaccagagccgcccaactttatgcaaaggtcgagtttgtcagggaaaacaataaaattgtcggatacgtgatttcggcaatccatatagtggtatctggagcagcattatttggtgggatggttatgatgtccactatgacccctgttggagttcttgcaggagcagttttatttgttgatggtattaacggtataacaaaagaagcaagccatcttcgctatggtgaacaatcccaatcggaaggaatttttgctgatggcgcaatggagaccgcacaatttatggggtttagcccaaaaagtggattagctctttataatacggtgactctaggggcgggtgtctatagtatcttcggcttagcaaggaaacccggagcttggcgattattccgttggctgccgcgtgattactaccgaaaagttgacacaatgagcaagcctaagctaacgatgaaaatcgctggatatggtgtcaaagcgaaagtcatttttgatcttctggctactgataacagtattaattaa

SEQ ID NO: 120417 - DNA, 2445 bp, Enterobacter cloacae
atgatgattttgagcattctcgcaaccgttgtactgctcggtgtgttgttctatcaccgtgtcagtttattcctgagtagcctgattcttctggcctggacggctgcacttggcgtcgctggcctgtggaatatctgggttcttgttcccctggccatcattttactgccgtttaacctgacgccgatgcgtaagtcgatgatctctgtgccggtgttcaggggattccgtaaagtgatgccgccgatgtcgcgtacagagaaagaagcgattgacgccggtacgacctggtgggaaggcgatctgttccagggcaacccggactggaaaaagcttcacaactatccacagccgcgtctgaccgccgaagaacaggcctttattgatggtccggtagaagaagcgtgccgcatggcaaacgactttgccatcactcacgaaatggccgacctgccgcctgagctgtgggcatacctgaaagagcatcgcttcttcgcgatgatcattaagaaagagtatggcggtctggaattctccgcttacgctcaggctcgcgtgctgcaaaaactggcgggtgtctccgggatcctggcgattaccgttggcgtgccaaactccttaggcccgggcgagctgttacagcattacggtacagaagagcagaaagatcactacctgccgcgtctggcgcgtggccaggaaattccgtgcttcgcgctgaccagcccggaggcgggctctgatgccggcgcgatccccgataccggcgtggtttgcatgggcgagtggcagggccagcaggtgctgggcatgcgcctgacctggaacaaacgttatatcaccctcgcgcctatcgccacggtgctgggcctggcgttcaaactctctgacccggaaaaactgctgggcggtgaagaagatctgggcattacctgtgcgctgatcccaacctcgaccccaggtgttgagattggtcgccgtcacttcccgctgaacgtaccgttccagaacggtcctacccgcggtcaggatatctttgtcccgattgattacatcatcggtggcccgaaaatggccggtcagggctggcgtatgctggtagaatgtctgtctgtgggccgcggcattaccctgccgtcgaactcaaccggcggtctgaaatcggtggcgatggggattggggcttacgcgcatatccgccgtcagttcaaaatctccatcggcaagatggaaggtatcgaagagccgctggcgcgtattgcgggcaatgcctacgtgatggacgccgcagcctcgctgattacctacggaattatgctgggcgaaaaacccgccgtgctgtcggcaattgtgaaataccactgtacccaccgtgcacagcagtcaattattgatgcaatggatatcgcaggcggtaaagggatcatgctcggtgaaggcaacttcctggcacgcagctatcagggtgcgccgattgccatcaccgtggaaggggcaaacatcctgacccgtagcatgatgatcttcggccagggtgcgattcgttgccatccgtacgtgctggaagagatggctgccgcgcagaataatgatgtggatgccttcgacaagctgctgttcaaacatatcggtcacgtcggcagcaacaaggtgcgcagcttctggctgggcctgacgcgcgggctgaccagcgcgacgccaaccggtgatgcgaccaaacgttactaccagcaccttaaccgtctgagcgccaacctggctctgctgtctgacgtttccatggcggtgctgggcggtagcctgaagcgtcgcgaacgcatctccgcccgtctgggtgatgtgctgagccagatcttcctggcctctgcggtgctgaaacgctacgacgatgaaggccgtcaggaagcggatctgccgctggtgcactggggcgtgcaggatgcgatgtatcaggccgaacaggcaattgacgatctgctggcgaacttcccgaaccgcttcgtggcaggtgccctgcgcgtggcgatcttcccgaccggtcgtcattacctggcgccgtctgacaagctggatcataaagtggcgaagatccttcaggttccgagcgcaacccgctcccgtattggccgcggccagtatctggcccctaccccgcataaccctgtcggcctgctggaagaggcgctgctggacgtgatggccgccgacccgattcaccagaagatctgcaaacagctgggcaaaaatctgccgtttacacgactggatgagctggcaaaacaggccctggcgggtggcatcatcgacaacagcgaagctgcgattctggtgaaagccgaagagagccgtctgcgcagtattaacgtggatgatttcgaaccggaagagctggcgacacagccggtaaagctgccggagaagcaccgcaaacctgaagccgcataa

SEQ ID NO: 120418 - DNA, 810 bp, Enterobacter cloacae
atggatattgcgttgcttaacaggggctggaacagaacatggtcagataccatggtgaatctagaggcccggaaactcgtcgaaacagcaaaccggctgtcagcattctatttgcaagatggtcttacacgtatcaagtttgtcgaagagataaaacaggttgtagataaagaatttgaaacagcacgacgagctaaaaccgatgaagaatgcattgcatgcatcaaaaatctgcgtgctgaaacagataatctacacgaacaagaacgcctgttaagaaccagagccgcacagctttacgcgaaggtcgagtttgttaaggaaaataataaaatcgtcggttatgttatatccgccgtaaacgtggtgctatcaggcgtggttctctttggtggctttatgatgttatccactatggggccgattggtatgctggctggggcagtcctgattgccgatggaatgaacggattaacgaaagaagtgctcaactttgatcagccagaaggacataaaccctcgcaaggtatcattgctgactccgcgatgcatacggcccagttcatgggatttaatcctaacacgggcttggctctctataatggtgttactctcggtgccagtgtgtacagcattgtaggactcgctcgaaaaactggagcctggagattatttcgctggcttccacacgattactatcgcaaagtcagcacaatgagcactcctaagctaacaatgaagattgtcggttatggtgttaaagcaaaagtgattttcgatctattgacaaccgaaaatggaaccagttaa

SEQ ID NO: 120419 - DNA, 519 bp, Enterobacter cloacae
atggcaaccccaaagatcatcgccagcccccatgcaactgctctatcaggtgagctgaagacgataagtagcagtaggattaaggcacacacagccaccactcccgccaaggtaacaaatcgcctagcgaggtcatttatggcctctccaagcgttcctccatatttttcaatgttgctttttatcttctgcaattcgggctgcgtaaaccctgaacgtaacaaagcctcatcagtcactttcatatcgtctcgtcccttatctcccagaagtgttttcccaatcgctgattgtgcaagcaatcatactgatgaactttacagcaatccacatgatgtttgtccaatgaatcagatttcagacaatagaagccataaagccccgttggtgatacagcaacaagtggagccgttaggcgacaacatcagactgtcagagggatcacaccttatcaggataaccgtgtacccttgcgggagcgtggctgaaacgctgatagatcctacatgtcgtttgtag

SEQ ID NO: 120420 - DNA, 2439 bp, Enterobacter cloacae
atggaaagatcgcttagcttcactacgttattcttttatcgcaccacaatattattgttcctgcttttactctttcctgttctggttcaggctgatgaatccgtttatgagcatcagatacaacaggcacgtaacggtaattacgctctgtttcttgattacctacagcgctatgagcaacaacatgctttaacacccggacaggttgcggactggttacaggtagcctcctgggcaggacgcgatgacgaagttatccgggtctggcagcgttatggtatttatatgccgcttcccgctcgcgccatcgctgccgtcgcccagtccagaagaaaccaaaaagcctggccatccgccttatcgctgtggaaagaggcgctcagccttgcgccggataacgacgattaccgcatcggctatgtgaagactctggccgatgcccgcaaagatcgcctcgcgctttcggaagcccggcagctggttaaagacaatccttctcccgcgcaccttgagacgctctcctatgtctggatgcgccagggaaaaaacagggatcggctgctggctgacatgcgcgcgctgagcgccgcgccagggaatgaggcccttcttcgcgagacgatcgatgcgctaacggataaccgggtaagcacgcccgcactctggctgtcacaaaacgcggcgctctctcctgcggagcgccgccgccttgagcgtaacgccgcggctgaacgggtacgcctggcggatgtgcctggcagaacggagaaagagcgcctgcggctggcacaaaacgcattagatcgctatcacgccctgctttcccgctggcaaaacgacccgcaggcggctgaagacgtcatccttgcccgtatcgatcggcttggcgccctgtatgcgcagggtaattaccagcaggtcattagcgaatatgagtcgctgacggccgcacagcatccggtgccggactgggccatcggctgggtgatctctgcatatttgcaggagaaaaacaccgttgccgccttctcgcttgtgcaacgctatccacactacgcctccgatccgcaggatgaggagcatgcgcttttctacgcctggctggatacggggcaatatcaggccgcccgccgctacgttgagcgcgagacccgcagcgttccctggacccgctacgatttcgggtcccccaccgcccagccaaacgatcggtggcttaccgggcagtcactcaaatttaactatttgctggcaaccaacgccctgccggaggccgaaaagctgtcgtatcgtctggcgtcaacggcgccgggaaatcagggattacagattgattatgccgccctgcttcaggccagaggcctgccgcgtgcggccgagcaaaagcttaaacgagcagagacgctcgaacccacgaatctggagcttgaaaaacagcaggcttacgtcgcaatggaccttcaggagtggcgccagatggattcactggctgataacgtaattgctcgcgcccccgccgatcgcagcgcccgtcgcctggacagactcagaatggtccaccatatgtctgagctgcgtctgaaggcgggtaaaggattgcactcagataaccccgtcagcggaagccacgacatgaactgggacgccacgctctatggcccgcccgtggcggataactggcggctgtttgccggcacccgctatgcccaggggaatttcgacgaaggtaaaggcatcagccgccacctgttgggcggcgttgagtggcgcccccgtgacctcacgctcgaagccgagctctccggcaaccactatcacggcaaaaacaggccgggcgcacggctctcaacaacttacagcctgagtgataactggcaggtcagtggtaacctcgagcgcttgtcacgcgccacacccttacgggcattacgcaatgggattagcgccaaccggggtgaaggtggggtgcgctggtatcaaaacgagcgacgtgaataccagttcaacgccgcaatcagccgcttctcagaccacaaccgccgtcaggaatacaccctctctgggaaagagcgtctctggcagaccccgaccctgacgctggagctcgaaccggggatcgccgccagtaaaaacagcctgcggaatacgctctattacaacccggcacgggagctgtccgtgacggctgccctgtccgttgaccatgagatgtaccgccactacgacactctctggagccagcagttcgtggcaggcgggggcagctactggcagaaaaatcagtcacctggcgccgttaccctgctgggttacgggcaacgcatccagtggaacaacgttgtcgatactggcgtgatgctgaactgggataagcgcccttacgacggcaaacgcgagagcaatctctccgtcacgttagatgcgactttacgcttttaa

SEQ ID NO: 120421 - DNA, 921 bp, Enterobacter cloacae
atgactgatcgcattatcgccttctctattttgtgtctggtattcgggttgccgttaggcgtagccgcgctgtttactggcgaactgattctggactttgtctttttctggccgctgtttatgtccgtgctctgggtaaccggcggcctctatttctggtttcagcttgaacggcactggtcgtgggataacgcaacacccgcccccgccttagccggtgagccgttaatctcgattcttattccctgcttcaatgaggaacgcaacgcacgggagaccattagcgccgcgctggatcagcggtactggaatgtagaagttatcgccatcaacgacggttcttctgataacacggcggaggtactgcaacagctggcgcgggagcagccgcgcctgcgggtgattaatctcgcggagaaccaggggaaagccgtggcgctcaaggccggcgctgcggcggcccggggcgatctgttggtctgcattgacggcgacgccctgctcgaccgcgacaccgcggcgtatctggtggcaccgctgattcagtatccccacgttggggccgtcaccggaaatccgcgtattcgcacgcgctcaacgctgattggtcgtattcaggtgggcgagttttcttccattattggcctcatcaagcgaacgcagcggatctatggccagatctttaccgtctccggcgtcatcgccgcctttcgccgacaggcgctggcggatgtcgggtactggagcccggatatgatcacagaggatatcgacataagctggaagcttcagcttcgccactgggatatctttttcgagccacgggcactgtgctggatcctgatgccggagacgctaaagggactgtggaagcagcgtctgcgctgggcgcagggggggggcagaggtgtttctggttaa

SEQ ID NO: 120422 - DNA, 1863 bp, Enterobacter cloacae
atgcgtaaaggaacgttaagcagtgacgcccccttcgggacgttattaggttatgcgccgggtggcgtggcgatttactcttcaaattacggcagtctcgatccgcgtcactacccggaagatgcggaattccgcagctatatcggcaacgagtacatgggccataaatggcagtgcgttgagtttgcgcgccgtttcctgtttctcaatcacgggtttgtctttaccgacgtcgggatggcgtgggagatcttctccctgcgttttttgcgccaggtggtaaacgacaatattctgccgctacaggcctttgctaatggctcaaaacgtgcgccgcaggccggtgcgctgctcatctggcaaaagggcggtgagtttcatgagaccggccacgtcgccgtcattacccagctgctggatgacagagtacgcattgccgagcagaacgttattcactccccgctgccgctggggcagcagtggacgcgcgagctgcgtctgagcgtggaggacggttgctatacgcttcatgacacgttcaacgataccgagatcctcggctggatgatccagacggaggagacggaacacagtattcctcagccggagatcgacggtgaactgctgaaaatcagcggcgcgcggttgaagaacaaccgccagttcgacgggaaatggctcaatgaagacgacgccctgcaacaggcgtacgttcgcgccaacggccacgttatcaacaacgatccctgccagtatttcaccattaccgaaagcgccgagcaggagctgatcaaagccaccaacgaactgcacctgatgtaccttcatgccaccgacaaggtgctgaaagacgacagcttactcgcgcttttcgacatcccaaaaatcctctggccgcgtctgcgcctctcctggcagtggcgtcgccaccatatgatcaccggtcgtatggatttctgcatggatgagcgcggcattaaggtttacgagtacaacgcggattccgcctcctgccataccgagggcgggctgattcttgaagagtgggtgaaaaacggctatcgcggcaccggccacaatccggcggaaggcttgctggaggagctgaccggcgcatggaagcacagccacgcgcggccgttcgtccatatcatgcaggacaacgatattgaagaggattaccacgcgctctttattcagcgctcgctgatccaggccgggtttgaaaccaaaatcctgcatggactgggcgcgctgagctgggatgccgccgggcaactgattgatgatgaaggccgtcacgttaactgcgtatggaaaacctgggcatgggaaacggcgattgagcagatccgcgaggtgagcgaaaccgagtacgccgccgtgcctatccgcaccggtcacccgcaaggtgaagtgcgcctgattgacgtcctgctgcgcccggaagtgctggtctttgaaccgctgtggacggtgatcccaggtaacaaggcgatcctgccggtgctgtggcagctcttcccgaaccaccgttacctgctggataccgattttgaggtcaacgatctgctcaaacggaccggttatgccgttaaaccgatcgccggacgctgcgggagcaatatcgatctgatcggcgcccaggacgaactgctggaccagtccagcggcaagtttgttgaccgcaagaatatctaccagcagctatggtgcctgccgaaggttgacggcagatacattcaggtctgcacctttaccgtgggcgggaactatggcggaacctgcctgcgtggggataactcgctggtggtgaagaaagagagcgatattgaaccgctgattgtggtgaaggataactaa

SEQ ID NO: 120423 - DNA, 867 bp, Enterobacter cloacae
atgtcagataacacctatcagccaccgaaagtgtgggaatggaaacagaataacggcggcgcgttcgccaatatcaaccgtcccgtctcgggcgcgacgcacgagaaagagctacctgtgggcgcgcacccgctccagctgtactctctcggtacgccgaatggacagaaagttaccatcatgctggaagagctgctggcgctgggcgtgacgggcgcggaatacgacgcatggttgatccgcattggcgagggcgatcagttctccagcggttttgtcgacgtgaacccgaactcgaagatcccggccctgcgtgaccactccaccaccccgccgacgcgcgtctttgaatccggcaatatcctgctctatctggccgagaaatttggtcacttcctgccaaaagatccggcaggacgaacggaaaccctgaactggctgttctggttacagggcgcggccccgttcctcggcggcggttttggccacttctataactacgcgccagtgaagattgagtacgctatcgatcgcttcaccatggaagctaaacgcctgttcgacgtgctggacaaacagctggcgcgcggtcgttacgtagcgggtgaggaatataccattgcggatatggcagtctggccatggtttggctgcgtggcgctgggcagcgtctataacgccgccgagttcctggatgccgggaagtacaccaacgtgcagcgctgggcaaaagatgtggcgaatcgtccggccgtgaaacgcgggcgcattgttaaccgtaccaacggcgagctgaacgagcagttgcatgagcgtcattcagcaagcgacttcgatacccagacggaagataaacgtcagggttga

SEQ ID NO: 120424 - DNA, 1815 bp, Enterobacter cloacae
atgtgggcggcaaacaaagaaaaatcaaatccgttgtcttcacgccaggaggtagtggcgtcgttgaatgcacttttacaggcgctggacacgcaatttccggcgaaccgttcacgattcccgctgggcgacacctgcgcccattacacagcagatattgcgcagatggagggactttcccgcgcgctgtgggggctgtttccgctgatggcgtccggcgaaagcacgccgttcagcgagaagtaccttactgccattaagcttggtaccgacccgcaaagcagcggttactggggtgaaaccggcccgtacgatcagcgtctggtggagatggcggcctacggtctggggctcgctctgctgggagataaactcaccgcgcactttaccggtcgcgaggtgatgaacctgcacgcgtggctcaaccaaatcaccgacgcgcagatgccggacagcaactggaactattttgccatcatggttcagctaggctttaagcgcgccggcctgccgtacgatcaggccgccattgaccaccgctttgcgctgatggacgcctactacctcggcgacggctggtattccgacggtcccggccgcccgaaagattactacatctccatggctttccatttctacggcctgatttacgccaccctgagtgacgacgaggcgagggcgaatgttctgcgcgagcgctcgcgtctgttcgcggaagactttatctactggtccgccgccgatggcgcctcggtgccgtttggccgcagcctgacctaccgctttgccatggttgccttctggagcgcggtggctttttcccagctggacgtcttcaccccgggcatcgtgaaaggcattgtgctgcggcatctgcgctggtggcagcagcagtcgattgtcgatcgcgacggcattctcaccctggggtttgcgtatccgaacctggcgatgtgcgaggattacaactcccccggttcaccgtactgggcgctgaaaacctatctgatcctggcgctgccggaagcacacccgttctggcaggcggaagaacaaccgctgcccgcgcttgctgaaaaacatgtgattccgcatgcgcagcagatcctgatgcattcgaaagattcgcagcacgtcgtcatgctcaccgccggtcagctggaactgaacaactacgtcaacaccgaagcgaaatacaccaaatttgcctactccagccgcttcggattcacccttgagcgcgggcgttttggcctgaagcatgccgcctgcgattccatgctgctgctggcggacggagatgactatttccgcggtcgtcgcgagtgcgaagaggttcgggtggatgaaaattacattttctcgcgctggtcgccgtggcgcgacgtgcagattgcgacctggcagatcccgttcggggagtggcacctgcgcctgcaccgtatcaacagcacgcgcactctgcaaaccgtcgagggcggctttgcggtgatgaaaaccgcccaccaggtgcgcgaacgcggttgttatctgttggctgaaaacggcagcagcgtcattgtcgatctttcgccgatcattcagcgccagccagacagcatcgtcacgccgccgaacagcagcattatgtttgcggagtgcgcctccattccgctgttaaaagctgacctcccgcaaggggaaagctggctctgttgcgccgtcctggctggcggaagacagcctgctgcggcgacgccacagctgaatataacccataaccaggtcgttattagcgaacccggaagcgaacgtaagctgtcgttcacattataa

SEQ ID NO: 120425 - DNA, 423 bp, Enterobacter cloacae
atgaagcgttatacacctgacttcccagaaatgatgcgcctgtgcgaaaccaatttcgcccagctgcgccgcctgctgccgcgaaacgacgcgcccggcgaaacggtgagctatcaggtgagcaacgcgcagtatcggttaacgataacagaatcaacgcgctacactacgctggtggagattgagcaaacggcgccgagcatcagctactggagcctgccgtcgatgacggtacgtctttatcatgacgcgatggtcgctgaagtgtgttcaagccagcagatctttcgctttaaagcgcggtatgattatccgaataaaaagttgcatcaacgcgacgaaaagcatcaaattaaccagtttttagccgactggctaagatattgtttagcacatggagcaatggcgattccggtttgttag

SEQ ID NO: 120426 - DNA, 633 bp, Enterobacter cloacae
atgcaaaaaccagaaaacgtgcctgtcaccttcgccaaaaacgatgtagaaattattgcacgagaaacgctttatagcggttttttttcaatggaactttaccgtttcaggcatcgtctgtttaacggtgagatgagcggtgaaatcaaacgcgaaatttttgagcgcgggcatgcggctgtgttgctaccctttgacccagtgcgtgacgaagttgtgctggtcgagcaggtgcgtattgcggcttatgataccagcgaaacgccgtggttgctggagatggtggccgggatgatcgaagaaggtgagtctgtcgaagacgtcgctcgccgcgaggcgctggaagaggcgggcctggtggttggccggacgaagccggtgttgagctacctggcaagcccgggtgggacaacggaacgttcatctattatggtgggcgaagtggacgccacgacagcggaagggatccatggtctggcagatgaaaacgaagatattcgggttcatgtggtgagtcgggagctggcttaccagtgggtagaagaggggaaaatcgacaacgcagcgtctgtcatcgctctgcaatggctacagctgcattatcagacattacgacacgagtggaaaaaatga

SEQ ID NO: 120427 - DNA, 1614 bp, Enterobacter cloacae
atgaaaaagatcctgctcgcgtttgcgttctgttttgccgccctgagcgccttctcatcgtatgccgcagagccccgccaggcgcctacggagcaggagcgcgcccgaacggtctatatcttccatcagcccatcgtcatgctacaggcgaaatttggcctgaccacgccggaagagcgcgttttacgcatccgcaacaccctgcgcaattttaccgaggcggatgtgcgtgagccgctcagcatcgtccccgtgacccgctataaccagcagggacggctgatagtgatgaacggtaaacctgtgatgctgctgacggaaggggatttggacgaaggggacgatcttaccctcgatcaggccgcacagcgcgtgctggcgcgcatggaagcacagagaatggcgctgcgcgatcaatacgattccggctggctggcgctgtcgacggtaaaagctgccgctggcctgctggcgctgttgctgctctgctacggcgcgtggcgatcctggcgctggttccggcgcgtctaccgtcggcgtattgtggagaatcgcagccgggtgccgcaaagctggcggcggtacattggcgccattgagattcggctttacgccttgctgatgttcctgctggggttgatcggcttttacgtctggctgagctgggcattcagtctgtttccgtggacgcgggtgtggggcacgtcgctgggagactggacgcttcgcgtggtgcagcaaatcgccctggcgattgtctcggccttgccggggctgacgattgttctgatcattttcctcattaccgcttttattctgaagcttcttaagatggtgctgaatcaggtggaggctggtcgtctgcaacttcccggcgtacatccggaaaccgtgggggctacccgtaagctcatttccgttgccgtctggctatttgctctctccgccgcctggccgtttcttcccggtgcaaactcgctggcgtttaaaggtattagcgtcttctttggactgatgttaacgctgggttcggcaggggtgatgaaccatgccatgagcggtctggtcctgatttactcccgcgcactgcgtaaaggcgatgtcattcgggtggcggataacgaaggtaaggtcagtgaaattggcatgctggcgaccaaaattattacccgggaaaattatgtcgttaccgtgcccaacgcggtggtggtgagcggtaagatcaccaatctgagcgcgctacagcccgatggcagcctcaatctgacggtcagcgtcactatcggttatgacaccccatggcgtcaggtgcatgccatgctggagctggccgcgaaacgggcaaaagggattgacctttccgagccgccgctggtgcgtcagttagggttaatggactggtatatcgcttacgaattgcaggtccgcctgctgcccgatcagtccctcgcggttgcccgcaatgaactgcatagccagatacaggatgtgtttaacgaatttaacgtgcagatcatgtccccgaattttgttatgcagccagagggcagcgtgatggttgccaaagagaactggtataccccgccagccaaaccccctcagggcgaaacgtga

SEQ ID NO: 120428 - DNA, 528 bp, Enterobacter cloacae
atgaattttttatttatcagtgataactattacctttgccatggtgtatcaagctccctgacatcaacccatttgattcgcgatgacgcggatattcacgatcttgatggggtcgatcaggcgatggattttatcattgcgattgaacaggataagttacgcaataaaaccattcggcaggtcaaaaaagttaagcgtgattacattgtcctgatgcatgagatagaagccaatagcgcggtgagaattgataatattatctattcgtcgatgcattttactgctcacccttttcagcaactgatgcgtttttatcgggcgctcaggacacactcctttacgcgacgcgagtatgacgtgctgaagctgtttcatttggaaaaccatgagatcgcgaaaaagctgcaactgtcacaaaaaacgaccagcacctaccgcgtgaggatcctcgagaaattaaatatgcgctcaaaaaacattctggcgatgacccgtgtaaaatcggcgatcgtcgatcagaagctgtga

SEQ ID NO: 120429 - DNA, 396 bp, Enterobacter cloacae
atgaaacgatatcttatcgcaggcgcagcactgctgctcagcgtcagcgcgctggccgacgagtgcgacaaagcgaccacccagacagaactcagtgcctgtgcggcagagcagtaccaggctgcggataaaaagctcaaccagacgtaccaggccgccataaaacgcgcggcagccactcagcgcgacctgctgaaaaaggcgcagcaggcgtggatcgccctgcgtgacgcagactgtaaattgatgagttcaggaaccgaaggtggcactattcagccgatgattatcaaccagtgcctgacggagaaaacagcggagcgcgaagcctttctggcctcgttgatgcagtgtgaagagggcaatttaagctgccctttccaaccggctgattag

SEQ ID NO: 120430 - DNA, 834 bp, Enterobacter cloacae
atgtttgttccttttctcattatgttacgtgaaggccttgaagcggccctgattgttagccttatcgccagttatctgaagcgtacccagcgcggacgctggattggcgtgatgtgggttggcgttttccttgccgcggcgctctgcctggggctgggtattcttatcaacgaaaccaccggtgaatttccgcagaaagagcaggagctgtttgaaggcattgttgccgtaatagcggtggtgatcctcacctggatggtgttctggatgcgcaaagtttcccgtaacgtgaaggtacagcttgagcaggcggtggataacgctctgcaaaaaggcaaccaccacggctgggcgctgatcatgatggtctttttcgccgtggcgcgtgaaggcctggagtccgtgttcttcctgctcgcggcttttcagcaggacgtgggcatctggccgccgctgggcgcgatgctcgggctggccacggcggttgtgcttggcttcctgctctactggggcggcattcgtcttaacctgggcgcgttcttcaagtggaccagcctgtttattctgctggtggccgcgggactggcggcaggggcgatacgcgccttccacgaagcgggcctgtggaaccacttccaggacgtggcgttcgatctcagcaacgtcctgtcgacccattcactgaccggtaccctgctcgaagggatcttcggctaccaggaaacgccgagcgtcagcgaagtggcgatgtactttatctatctggttccggcgctgatcctgttcgctatgccgccacgtaccggctcgcagacgtcgcgcgttgcgccgtaa

SEQ ID NO: 120431 - DNA, 1128 bp, Enterobacter cloacae
atggccattcagttccgtcgtagtgcgttatgcgcaggcatcgccgcgctgttcgtgtctgccttcgccgctcaggcagcagatattccgcaggtcaaagtcaccgtcaacgataaacagtgtgagccgatgaccatcacggttaacagcggtaaaacccagtttattattcagaaccacagccagaaggcgctggagtgggaaatcctgaaaggcgtgatggtggtggaagagcgcgagaatatcgcgccgggcttcagccagaagatgaccgcaaatcttcagcccggggaatatgacatgacctgcggcctgctgactaacccgaaaggtaagctgatcgtcaaaggcgcagcgacggcggacgcggccaaaggcacggcgctgctgagtctcggcgacgctattaccgcctataaagcctacgtcaccaaagagacggcggacctggtggcaggcaccaaagcctttaccgacgcggtgaaagcgggcgatatcgaaaaagcgaaatccctgtatgcgcctacacgtcagcactacgagcgcatcgagccgattgccgagctgttctctgacctcgatggcagcattgacgcccgtgaagacgactacgagcagaaggccgccgatccgaaattcaccggcttccaccgtctggaaaaagccctgtttggcgataactccaccagggggatggagaaatacgccgagcagctcaacagcgacgtgctggagctgcaaaaacgcatcagcgagctggcattcccaccgtcgaaagtggtgggtggcgcagcgggtctgattgaagaagtagccgccagcaaaatcagcggtgaagaagatcgttatagccacaccgacctgtgggacttccaggcaaacgtcgacggcgcacagaaaattgtcgatctgctgcggccacagttgcaaaaagagaacggcgaactgctggcgaaagtggatgccaattttaagaaagttgacgctatcctggcgaaataccgcaccaaagacgggttcgaaacctacgacaagctgaccgatgctgaccgtaacgcgctgaaaggcccgattacgacgctggcggaagatctctccctgctgcgtggcgtactgggtctggattaa

SEQ ID NO: 120432 - DNA, 678 bp, Enterobacter cloacae
atgtctacccctgcaaacttcaacggtgcacgtcccgttattgacgtaaacgatgccgttatgctgcttatcgatcaccagagcgggctgttccagaccgttggagacatgccaatgcctgagctgcgcgcccgtgcagcagcgctggcaaaaatcgcctcgctggcgaagatcccggtgatcaccacggcgtcggttccacagggaccgaacggcccgcttatcccggagatccacgccaacgcgccgcacgcacagtatgtggcacgcaagggtgagatcaacgcctgggataacccggagttcgtggcggcggtgaaagccaccgggcgcaaaacgctgattatcgcggggacgatcaccagcgtctgcatggccttcccgtccatcagcgcggtggcggacggatataaagtgtttgcggtgattgatgcctccggcacctacagcaaaatggcgcaggagatcaccctggcgcgcgtggtgcaggcaggcgtggtgccgatggacacggcagccgttgcttccgaaattcagcgcacgtggaaccgtgaagatgcgggtgaatgggcagaggtgtacacacacatcttccctgtctaccagctgctgatcgaaagctacagcaaagcgcaggacgtggtgaaaaatagcgaagtgctcgattcgcagcgttaa

SEQ ID NO: 120433 - DNA, 861 bp, Enterobacter cloacae
atgaaaaacgtaacaggcgtgtataccgcacctcgtccgcactgggtcggtgacggttttccggttcgttcgatgttttcttaccagacgcatggcgagcccctgagcccgttcctgctgctggactacgccggaccgcataccttcccggcggatggcgcgaaacgcggcgtgggcgagcatcctcatcgcggttttgaaacggtgaccatcgtctactcaggcgaagtggagcaccgtgattcaaccggcagaggcggcgttattggtccaggtgacgtgcagtggatgacggcgggcgcaggcattttgcacgaggagttccactccagcgcgttttcgcagaaaggcggtgaactgaaaatgatgcagctgtgggtcaacctgcccgccaaagacaaaatggcgacgcctggctaccagagcatcactcaggcggatatcccggtggtcaccctgccggataacagcggaacattgcgcgtgattgctggccgctttggagaggtaaccggcccggcgcataccttctcaccgctgaacgtgtgggatctcgcgctgcatcagggtagccacctgacgcttaatcagcccgaaggctggagcacggcgctggttgtcgttgaaggcagcgtgacggtgaacggcaccacgcctgccggtgaggcgcaactggtcgtgctgagccagagcggtgacaaactgcatctcgaagccagcagcgatgccaaagtgctgctgatggccggggagccgctgaatgaacccatcgtgggctatggcccgtttgtgatgaacagtaaaaccgaaatcgccgaggctattcgcgatttcaactccggccgctttggccaaatctaa

SEQ ID NO: 120434 - DNA, 738 bp, Enterobacter cloacae
atgtatcccgttgacctgcatatgcacaccgtcgccagtacccacgcttacagtaacctccatgattatatcgctcaggcgaagctgaaaggcatcaaactgtttgcgataaccgatcacggtccggatatggcggatgcgccgcactactggcattttgtgaatatgcgtatctggccacgcctggtggacggtattgggatactgcgcggcatcgaagcgaacatcaaaaataccgacggtgaaattgactgcaccggcccgatgctgacctctttagatctgatcctcgctggcttccatgagccggtctttgcgccccaggataaagagaccaacaccgcagcgatgattgccactattgccagcggcaacgtgcacattatcagccacccgggaaatccgaaatacccgattgatattcaggccgtggcgcaggcggcagcgaagcaccgcgtggcgctggagattaacaactcctcctttgttcactcgcgtaagggcagtgaagccaactgccgcgaagtggcggcggccgtgcgtgacgcgggcggcatggtggcgctgggctctgattcacacacggccttcacgctgggggatttcagcgagtgcctgaaaatattgcgggacgtgaatttcccggaagaacagatcctgaacgtcacgccgcgtcgtatgctcgacttccttgagtcgcgcggcatggcgccgattgatgaatttgccgatctttaa

SEQ ID NO: 120435 - DNA, 474 bp, Enterobacter cloacae
atgtttaaacctcatgttacggtcgcctgcgtggtccacgcgcaggggaaattcctggtggtggaagagaccattaacggcaaagcgctgtggaaccagccagccgggcatcttgaagccaatgaaaccttattgcaggcagcgaaacgcgagctctgggaagagacgggtatccgcgccgaaccgcagcactttatccgtatgcatcagtggatagcgcctgaccagacacctttcctgcgctttttattcgccgttgagcttaacgaaacgtgcgccactgaaccgcacgacgacgatatcgatcgctgcctgtgggtgaccgcagaggagatcctgaacgcgccaaacctgcgctcgccactggttgcggaaagcatccgctgctggcagtctacggcgcgcctgccgctggatgtcattgcagaatttaactggccgtttacagagggtgtcaatggtgggggggcgtga

SEQ ID NO: 120436 - DNA, 927 bp, Enterobacter cloacae
atgaaagataatatcggtgcgttttttaaccaattgataaattatccgtggttgatgatggccatgtcagtcttactttcagctatttggattctaatagctatgaatgaaccacttttatccctttcagaaaaccagaatttatatatttattctacccaagctcaggttttgagtgcggtatacggactaaccctaactggctatatatttcttagaaatcaccaagagagagaaattgacagggataatagtctaattgaaataattagaacgattcaagctaaagaatacacttttttgattatgttgaccattgtgtcaattacagctattttactggatttaatgacgctatcgttatttctttcagaaaaaaagatattgagcatcattacaaaaaattgtgccactgttttttttatgaatggacttttactaattacttactttattctaaaagcgttaaaggccgataagtatagtgaagttagtaaggagattattctggatgcagagaaaaatattcgtgactaccttggtaatgagtcaaccttggaagatgttcaagaagaggataaaaacaatgaacatattttatatggtaagttcatgactggtttcattgatctggaaaataagctatttaatctttacgaaatctataattcaaaaacaatggtaccttctctagatttaattcattcgaatgctagaatgaccatttctagagtactgaaagaattatcagggtctaggcgtattccccaagcgttagtcccagaaatttatgctttggttaaatacagaaatgcacttgtgcatactacctccgtcgaaccatctcaaaatatggtttcaaatgttgaacgaattaataatgaaattgacaatattttaaaaaaatatgaagccgaacgccaataa

SEQ ID NO: 120437 - DNA, 1155 bp, Enterobacter cloacae
atggctgcacgcccacgtaaaaataacgtaaaggtcccgaatctttatccgctctacagtcgtaaggtaaataaagtctactggcgttacaagcatcctctaactggcaaattccacagccttggaactgacgaggctgaagcaacagcaatagcaatcgaagccaatgcgcgattagctgaacaacgaaccaggcaagtattggccataagtgacaggatagccaccagcaaaggaaaagcgatatcaacgaatacatggttggatcgttattggaaaatacaggatgaaaggctggagaatggtgatatcagaccgaacactcataagcaaaaggctaaacctgtcgccctacttcgcgagagcgtaggaatgaaattgatatcagccgtcgatgttcgggatgttgcccagatactggagtcctatgttgcagaaggtcaacctaggatggcccaagtaatccgctctgttttaatcgatgttttcaaggaagcccaacattatggcgaggtaccgccgggttataacccggcacttgctacaaaacaaccgcgccggcggattagccgacaacgtcttaacctcgacgaatggcaaaagattttcgcgattgccgatgcccgccatcattacatgggcaatgcaatgctattagcgctcgttacgggtcagcgcctcggggatatttccaacatgaagtttagcgatatttgggatgaccatcttcatgtagttcaagagaagacggggagcaagctagcgatcccgctatcccttagacttaatgcgattgactggagtttaagggatgtaattgcgcgttgccgtgactatgcagtaagtccatacctaatccacttcttccgggcaacctcaatggctgaacgaggtgcacaggttaaatcgaacacaataacaatgaattttagtaaggcccgtgataaagcagaaataaactggggggacggcacaccagcaacgtttcacgagcaacgatctttagcagaacgcctttatgaagctcaaggtattgatactcagaaactattagggcataaatcgcctattcagacagcccgataccatgatgaccgaggtaaggaatggttaagaattcctattcaaatcaactctaggaagcagaacctttaa

SEQ ID NO: 120438 - DNA, 246 bp, Enterobacter cloacae
atgcttcaaatgctgactttagaagaatgggccgcagaaaagtaccggagtaatccacccagcttaaatacgttgcgtcgctacgcaaaggagagcatgttcaacccgccggccaaaaaagaaggccgctattggcgggtaagagaagatgctgaaattacaggtaatttaactcagcccgtcattaaaaaatctgattcaccaatgcttcaaaggatactgactgatggctgcacgcccacgtaa

SEQ ID NO: 120439 - DNA, 2061 bp, Enterobacter cloacae
atggaatttttctattttattaaagcaacccagaaatcaggcaaagtggatgccgtgatctggttcaccgctaaatcagaagcccgcgctaatttgcagctggatgttgagctggaagatgcaggcattgaaaccggccgcggcaaggattacgtcaagcctgtccgcaccgattttccggtttatgacgacctgccggaagaaagcacagttgattacacatggtgcaaacgctacgaactggacgcggaccagcgaacctggaaaattaagcagctgacagaggaagtcctaaaggacacttcagagcagactgagaatgtcagtacagattccagcagtgcgaagacgccatcacttacgacagtggctacattgccattgcggcagcgcatcctggcgcagtttattactgatgaatacgcctatcacatcgacgctgaacaaaagaaaatgatccaacagctcgaaatggatgtagataacagctacgtccagaacatgttgttggcggctgaaaatgtcgagccattcaaggcagcgacagaatatgacatatccaaagtggttgctgaccttaaaaccatcttccctgcggacggaaagcgcactgagcttgccgtagtgatccagttcttcaaggcctggtttggtacagagcatattgaccgtggtttactggtaaaagaatgggctaaaggtaatcgcgtttcagtaatacagcgtactgaaagcggcacaaatgctggcggaggaaacaaaaccgacagaaaccctgacctgaaacacgatctcgacactcttgatttagatatagcgctggcaacattgccaatggatttcaacatttacgatattcctggcggcgttttccgtcgtgcaaaagaaatcatcgctaaaaacgaaagtccattcaaagagtggtcagccgccctgcgaaaacgcgctggcatccttgattactcccgcgccgctatctttgcacttattcgccgtgcagaagaaaacgttcaccatttccctgaactgttgagccgctacatgaacaagaacttaactgaaaccgaccatgagcacccaaccgaagaaacactggcggccgccggccatgtgccagaaaaaagctgggaaaacgagattaacgagaaggttgcagcagagcaaaagtccgctgctgaagaaccaaaaatcgccagcatgggcaacggcatgttctccattaatgatctgaaagggggccagccagcgccttccctttctgtcgtagaccagctgcgccagcgcgccgccgaagaaaaattagatcaagccaatactatggagaccaccaacgatgtgcagatggaagaagctggcaatgatgaaaccacgaacggcgctccgttatcagagggggaggaagaagttatcgcaggcgaaagctctactgaaactgatagcaaagcaactgccctaaatactaatcccagacatcataatgatgatgtggctgatatgctctttacgcacctgatggtagatgttgaaagcctgggtgaaaagcccgacgctccaatagtttccatcggagcggtattcttcaacccggcatccggccagacggggcctgaattttataaggtgatctctctcgaatcatctatggaatggggcggcgtgcccgatgcctcgacgatccttttctggttgagggcaactcctgaggctcgttcagagattattatggatcatgcaatcccactggatgacgctctccttcagttcaaggattttatcgccgagaatgcagcgaacggcaaggatactgtccaggtctggggtaatggtgccactttcgacaatgttcttctggaggattcatactcccggaccgggatcccctgcccatggaaatattggaacaaccgtgatgtaaggaccatcgtcgaactgggtaaagccgtgggatatacgccctgccatgaaatcccattcgaaggagaaccacataaggctatttcagatgcccgccaccaggtgaaatatgtttctgcaatctggcaacacctgaccgaacattga

SEQ ID NO: 120440 - DNA, 123 bp, Enterobacter cloacae
atgatcgatttcgcacgcaaaaaagctggctgccaagccgttcgcttaaatctgtttgaagtgctggttcgtaagttttgctacttactggcgcaaaaaggcaacccagagttaaagatatga

SEQ ID NO: 120441 - DNA, 555 bp, Enterobacter cloacae
atgcaacagattccttatgaacattctattccccagacttttatttctttgaaaacaaataatcagtttgctcctactcgaagagactcgatacacagtcgcaccatctttgaggctgttcgggagtgggagtcaacgttaccaggacaggctcaggaaaagatcgcgcaattggtggctgagcagtgggcgaagcgtggtgggcgcggcatcgcggttaataagcagaatcttttccggtacctgaaaaacgaaagtgggtctgataaatacaccgcttatgtcatgcaactttctgtcgcaatcattgctgccatgcctattcagatcgcccgaaagcacggtctcagtaaggcaaagacagaaaccgaattggtggcgagcgcaatcaaagaatgcagcgaggcacaccaggcgaaacttctcggtgctccgttacagaagcttgagaaagaaatacgtgaagcggcaatcgccttattcaacatgcttccggctgagacggcgggaccactactggcgagtattagcgccgtagcgccgcaatttttttaa

SEQ ID NO: 120442 - DNA, 672 bp, Enterobacter cloacae
atgcagcagttcgatcagaaccaacagcatcccgagctgttcagcaaattcaatcagcacacgcagagtggcgacgccggaacggacttgatggcgacggaaacggcatggcggctatggcaggtgatgggggaaatcttctcaaaccgatggacgcagaagaatggggcagagcctacggccctctggatagctcagataggttcgatgactgaggcccagattaaacaggtttgccagcagtgcatggagcgctgcgcggtaggtaatacatggcctcctgatctggctgagttcgtatcgctggtttctgagagtggggctaacccgttcgggcttacatcggatcgggtgatggctgaataccgccgttggcgtaacgagtcatatcgtttttcgggaagtgataaatacccgtggccgcagccggttttgtaccacatctgcatcgaaatgcgcaggactggcgtagagcgccagatgactgagggggaactgaagaaactcgctgagaagttattgaccaaatggacgaagcacgtgagtaacgggttgtcggttccaccaatccgtcgccagcttgctgcaccgcagcatccggcagggccaactccggcacagctgctgatggaagagtacaagcgccgcaaagcggcaggtttaaccaactaa

SEQ ID NO: 120443 - DNA, 420 bp, Enterobacter cloacae
atgaccaaaccattaacccagaaagagcaggtggcgattttcgtgcgctaccaaccgaactgcgcagttggcgatatatgcgaagcacttgatatgtccagcgctgcatcaggtaagttattgcgtgagttaagcaatgaaggcgtgttagttcgtgcgcgtagcgggggccagtttatgtacaccgcggcaccagatgcagttattccggatgtgatccttccctgcatggtggaaaaaagcgatccggtcaggatgcaatccgcagagcagaaagcgaaagcacttgaggaaaaggggttatggcggcgagcagcagctgtatacaccgacatgtttgggatcgccggcagcgctgtagaggtagctcgaatagcgaagcgccggaaagtttgtcttcgcatggcagggagggcgtaa

SEQ ID NO: 120444 - DNA, 261 bp, Enterobacter cloacae
atggtcagaaagaaaaccgacaaagaacgcaccctgatcatcaaccggattatcgaactggtgaaggagctggggcgcatcaccactaatgacgtcgttgcgatgttcggcctgcaccggaccacagcggagaaatatctcctcgtagaggtggagcagggtggcctggttcgccacgggcggtgcggtatcttccgtgacctgcgggcaacaatcgactttgacctgaaacgtttttcacacagcaaggcggcggcatga

SEQ ID NO: 120445 - DNA, 333 bp, Enterobacter cloacae
atgagcacaattaccaaagaattcaccaaagagcagttgattgcgcgcacagaaatgcggctcgctatggttgccgtattccctgagagcaagctggcgcagatggataaatgccttgctaaaatcgcgcaggcagtgttgaaggccgagccgttcctgtatgccatagctgattctgaaggcgaggcgcatttagatgagttctgcgttgcttatggcgaggaccccttagtctcagaaattagcgccctcaacgaaagggcaaaatcactaggagaggaatacaaagcggtaccagtgtaccggttaccaatgctggaggaattgaagtga

SEQ ID NO: 120446 - DNA, 375 bp, Enterobacter cloacae
atgaatatcgccataagagaatggctaaaccagactatcgcggagcttgaagaagagcgcgatgcgacgccagacgcaattaatgaagatgctgctatggcacttgctgcgatgatccgggcgaaggcatcgctccaggcggagcctgtttaccaatggcgagagcgttgcgaagatagtgacctttgggatgactgcacaaaagagcagtatgaaggattctcaaagcagcctgacatcgagacacgcattctgtataccgccccgccagctccggtagtacctgatgagataaacgagctgcaagccgctaatttggtgttgacgttaggtgttttgaacaacggtattccgaccgtcgctatgaaagtatga

SEQ ID NO: 120447 - DNA, 234 bp, Enterobacter cloacae
atgaaagttgaattaaccattgatcgtactaaagaacttcctaagggcgcggtcccggcgctggaaaaagaattatcaaaacgactccagaatcagttcgatgaatgcagtctggttatacgccgtgcaggatcacatggtttaagtgtttacggtcgcgaaaaggaagctaagaagatggttgaggaaatcctccagcagacctgggaaagcgcagacgactggtattattga

SEQ ID NO: 120448 - DNA, 1578 bp, Enterobacter cloacae
atgcctaacgaagatactattaatgttgatggtggttctggcggtaaagatagcggtattcattgggggggcggcggtaatggaggcggtaacgggtctaattcatccggtgcaaacctttcaagtacgccggaggcgcagaaacctgctgcatacggtgtacccgctgtcattggcgtttatgatggtatgtggggttttactttatttaccaaaacgacgcttcaggaagctatgcaagctgcactgacccgtattgagcaaggcgccgtcgcagcagttccgcttgctggccgtcttttaggggcaactattggtgctctgattccatctgagatcgcaaaagatgatcctcgtatgatggcgacggctcatcttgtgaactctttaccatttgataaagtgtcaaccactccgccttctgctttaccgactcagaaagctacagtagtacacacgcgaattgctgatgttgttgatgaagacggcaaacagcatatcgctgttgttaaaagcaaaaatatgccaatgagtgtgccggttgtcgatgcgaaaccaacgaaacgcccaggggtttacactgctggtgttgttccgggtaaaccggatctgcacgtgaaagttgatgcgggtaaagcaccggctgtatcacaatcacaaccaaaaggtattcagaaagagcagggagcatctcgataccctggtttcacaaccggacaaaacactcacgaggctatagttcgttttcctgatggtaagagtccacctatttacgtatctgtaactgaggtgagcacgcctgatcaagttaaaaagcgtctggaggaggagaaacgccgaacacttgcatgggcattaaatagccctgttgaagcagcagccaaagaagataaagaggctggcgaccagttgagtcgtgctcaggcagatattgttaaagctcaggaacggttaaataaagctcttcaagctataccgcaaagaaatagtgatctcgacgctgcaaacaaaggtgtcgaagcaatgttgaaatgggttaaacaggtagaggtatatgctcatgatccagatcacccgggtcatcgagtatttctccaggctggttacaagctaggattggctaaggaaaaagccaaagtaagtaaggctgctcttgatgccgcaataaaagaaaaagcagatgcggagaaagcccttgcgatcgctgtagaaagccgtaaacaaaaggagcaaaagaaaaaagcttcagagcaaaaactggctgacgaaaagaaaaaaccgcgtaagggtgctaaagactatggacatgattatcatccagttcccaaaaccgaggaaattaaagggttaggtgatctgaccaagggggcgcctaaaacgcctaaacaaaacggtggcggcaaacgaccgcgctggtatggtgataaaaagagtaaaatttacgaatgggattcccagcatggggagcttgagggttatcgaggtagtgatggtagccatctgggcgcgtttgaccctgcaactggtaagcaggtcaaagggccagacccgaagcgcaatattaaaaagtatctttga

SEQ ID NO: 120449 - DNA, 255 bp, Enterobacter cloacae
atgggcttaaaaattcgcattagctggttcgataagaagacagaagacttcaagggcgaagaggtatcaaaagactttggagaggatagttcagtaatggaaagcctcggtcttccaatgaaggacaatctcaataacggtgaatttgatatggataatggttgggtgccactactgcaacctcatttccagaatcgtattgataccaccaagtttaattactttgtcgcctttgattatcgtgacaaatggtaa

SEQ ID NO: 120450 - DNA, 201 bp, Enterobacter cloacae
atgaagcaaagctggttcactcacaccggactgacaaccgaagaagctaatgagctggtagctcgctacgaatccaatggcgtaaccgtcgagaaaagtctcgatatagatccgcggttctggttagtcagcgcatatcttcctcagttcgtttcatcactgagagcacagcaaaacatgcgttcacacggacggaggtaa

SEQ ID NO: 120451 - DNA, 1020 bp, Enterobacter cloacae
atgcgcgctctgttacatcctgtgattgttcgtgaattaggtgttgtgttgctgaagccaggcaaggagctgctgagtttgtttgggagcggaagagtcttgatcgaacgtcagcctgccagcatgtcgggataccagacaggccgcgttcccgatgcacggcaaccgttagctgaaaacgagcaattaagaactttctttctgaatgagaatgtcattcgtgctgtgggtggtatacgtgggcttgattactggttgctccactacggtgggggcaagtgccagaacactcatggcgattatcactatcatgagatgaccgtaatgcatcatgaacccggctcgattctgctatgcggctactgcgacaatgagttacgagatcaacatattgaggcactagctgagctggcgtgccggaatgtaatcgcatttgttctcgattctgtccgtatttctcttggcatggacaaggcccgggagatctcgctcgcagaactcagctggtgggcggttcgtgccggcgttactgaagcacttcccgaatttgcggcccgtgaagcgcttcgcctgccggaggacagcaagattgggcgcgaaagtgatataacgccaaggataccagccaccagcattctcgctgagaaagtcaccgctgttgacgtacctgacatcatggcagaaccgctggtgggtgtgctggtggatcctgctcctccgcagtccttcatgcgtcgccctaaacgcttgcgctgggagtgtcgcgaatatctcgattgggtgaaaactcaaccatgcgaatgctgccagcagcagtcagatgacccacaccacttaattggatgggggcagggtggcatggcaaccaaagcccatgacattttcgcgatcccactctgccgtaaacatcataacgaactgcataacgaccggcgggcattcgagcgtaaatatggctcgcagccggagatgattattaaagtgctggaccgggcctacgcgctcggcgttctggcgtaa

SEQ ID NO: 120452 - DNA, 606 bp, Enterobacter cloacae
atgacaccacgtcaacgccgtaatcatattgaagcgctgggtaaagcagcaatggcaccacgtaagagctggctggggaaaagcattttgcttacagatgtccagtcgggttggattaaatctctccttactgtctggggcgaaaatgttcgcggaggtacagccccgacaaaaccttgcgcgcattcgtgctggaatgctcttaggggcaaaaactggtccgataaagcgcttgagcgttttaccgcggcgttgaataaagctagggatgaaggtttccgtggtgaaatggcactgaggcgcgcgcgttcattactttggccggagccactggtcagcgttatcgataaggccatgaatagcgatgacgctgagtttgtagagaatgctgtactccaggcattcgatttaaatgatccggtttatatagtagggcgctgctattacaccacgcgcaagaaaatctccgatatctccagagagctacgccatttagctccctggctgacggatagagaagccagagaacgtgtgcgttggtgcctggatattttccgggcaaaagtttttatttctgctcaaagaaatcttgaagaggtttcgtaa

SEQ ID NO: 120453 - DNA, 192 bp, Enterobacter cloacae
atgaaagaaggtttctactggatacagcacaacggcatagtgcaggtcgcttactacaccgccggtgtcaccgaggaccttgaaacgggccagacaataactggtgtctggcatctgacacgaggtgatgatatttgccacaacggtgaggctgaagtgattgaaggcccactgtctgtgccagtgaaatga

SEQ ID NO: 120454 - DNA, 630 bp, Enterobacter cloacae
atggacaaagcacaatttcagaaggcggctggtatcagcgccgggttagctgcacgctggtttccgcatatcgacgccgctatgaaggaatacggcataaccgcaccgcttgatcaggcgatgtttattgcccagatggggcatgaaagcacaagatttacccggctggtggagagcctgaattacgcggttgaaaacctggtaccgacgttcggcagccaccgcatcacgcaacaacaggccgccgcacttggcagaacggcaacgcaaccggcaaaccagaaagcgatcgccaatctggtatacggtggtgagtggggaaaagaacaccttggcaatcaggttgccggtgatggctggaaatatcgcggtcgtgggctgaaacaggttaccggcctgagcaactaccgcagttgtggccatgcgttgaaactggaccttgttacccacccggagctgcttgaacaagatgaatatgccgcgcgctcagccgcatggttctatgtctctcgcggttgcctgcttcattccggtgacgtggagcgcgtgacactgttaatcaatggtggcagaaacgggctggataaacgccgcgcgctgtttaacctggcgaaatcagttctggtgtga

SEQ ID NO: 120455 - DNA, 270 bp, Enterobacter cloacae
gtgggtatcgagacaataatcgggctgttcgcgttggtgatttcagcgatagctggagcttttggcctgggccatattcgcggcaccagcaaagcggaagcaaaagctgaccagcagcgcaacgaagataacgcagcggcaatggtcgcagcagccgaacgcagggtagaaacaacgaaagaggccagcaatgtacagcagactgttaaccatatgcatggcgacgatgttgatcgcgagctgcgggactactggacccgtaagggttga

SEQ ID NO: 120456 - DNA, 213 bp, Enterobacter cloacae
atgatttttctttattcttttattgcactatcctccctgtcagcattcgtcttactatgcttttttgcaatttatcagttttctgttaagggtgacgtcagtttctacgtaatgctctttgctttgatattcctttgcgtatcattttacggagcggtgggttttacttacacaaaattaaaagatgccggaactgtaataagaattatctga

SEQ ID NO: 120457 - DNA, 192 bp, Enterobacter cloacae
atggttacatacgcatcgttcatcgtgagcggcgtgaaacgtggaagcgtcccggtggtggttaaaaccgcctgtgactgggtaaaaccaatctacctgactgatcacgacatcgacgttctggatcggcagacgaagaaaaacatcttgacgtataataaagcgtggcaggcgaactaccatacaacatag

SEQ ID NO: 120458 - DNA, 498 bp, Enterobacter cloacae
atgagccgtagtccacgagtaaaccagttcaatgtcatttttcccgtaatctgtaccttacttggtgtaagcattactgcgcttttaggattgtacggaaactatttacaaactcacaatgcctctaaaacagcgtgcgttattcgagtagataaacaagagtcgctcctgagagaaaaatataaccagtttatggtttcagtaacttcgtttggattttcacctgcattaaccaacccgatgacgagaagcgacctgagaaaggatatgttgcctgtagttcaaagcgcaacagaagtaatgacttacgcacctcctgagctgggtatggttgcggctaacgttcttaaggccttttatctggcagacagcgctggtgataatcaagaattacaagagtcggcaattaagcaagctgggcaatcctttaagggagcttatggcgcttacatgaaggcgctcaatacacttgaccggcaacggcaaggctgtgattaa

SEQ ID NO: 120459 - DNA, 432 bp, Enterobacter cloacae
atgtccaacattgacaggtttgacgagattgcaggtcaggtatttgctgatttgtacaatacgtttccacttacaaaaaccttgggtttagcaaactacattgaaggtgactccgcacttgatcatgaaggatttacaggagctgagctaacggcagaggcagagtttgttaaagcgacaatcacatggctcatcaatgcaggctttctttcttctggtggttttcatggtgaatattttatggacgtcattctgacccctaagggccttgaatgcctgaaactcatgccggacagcctcacatcgccagccggaaacgaattaataaaagcggttaaatccggaagtaaagagactctgaaaatgattaccaaccacgttctggcgctgggcgtaaaaatcatggccagcaaatatggacttactaattaa

SEQ ID NO: 120460 - DNA, 1500 bp, Enterobacter cloacae
atggcgactgctgtattggctaactggcacggtcatgattatcaggctcggtatttctggattgaggcatcccggcttaaaaatccccaacaagatttcgtcatagaagtttcctatgaagccgatggccctaaagcctttgatgacgtgattacgcgttataaccccccccgccgcagcaccggacccgatcggattcaggccgattactatcaaattaagtttcacgttacacaagccgctagcttcggattcgaggacctaattgaccctgcattcattggtgctgaaaccttctcgatccttgaaagactaaaacaggcaaaagcaactgagcctgccaactccgcttttcaccttgtcacgacagatcgaattatcgatgaggacctgcttggtgaaataatcagcaatgtggatggctcaatacgactcgataagttgtttgatggcacgaccgacaggagccgtaagggaaaggttcgcaagctttggcgccaacatcttaagctttccacagaccaggagctggagcaggtgctttctggttttcatattcagcagtcacagcccacgcttgaagcgatgcgtgaaaaagttaatacctgcttccagatcattggcttgataacctgcgaaacaagttcggacttccgtttcgatggcgctgcgcgtgccttacgcagtcaggaacgttatcgctttacccgagagcaattcacagccctttgcgaggaagagaactggatcagatcggaagcacctgaaagcttcagaaatgttgcgctacgctctttcagcgatgggccactggacatcatggatgcgcttccggaacacacactctccctgctttctctcttcgaaggtcgatttccctccccgggcattgagtggaatgatgttattaagccccaagtagaaaccttcctcacaggtataaggcagacggagcgtaaagttcggctgtatctaaatacccacagctccattgcaatgcttgccggcaaatgtcttggtcacaagtcgggcgtagaaatcgaactggtccagaaagggagaatgggcgactccatctggtctgagaacgaatcgcaggatgaacctgatgcggttatcgaaaccgagactgtcggaaccggaagcgatgtcgctgtagtgctcagcatcgcgagaaatgcgctgccaaaagcacgcgcatacatactcgaaaatcagcctgaaataggacgtatcattcacgttacccccgcaaacgggcacgggcaacgatctgtgaaaaacggttcacatgccgtagcgcttgccgaacaggtatccgatgtagtcatggatgcagatttaccggttgaggcaagcctgcatattttcagcgctgcgccaaatgccgttaatttttatcttggccagcacacggattttctggggacatgcgtcttttacgagtttgactttcaacgccaacgagatggctcctaccttccttcatttaaggtttaa

SEQ ID NO: 120461 - DNA, 1146 bp, Enterobacter cloacae
atggaacttcaacctcagttcaacgaatttttagcaaatatcaggccgactgatacacagaaggaggactggaaaagtggtgctaggacattgcgcgagcgcctgaagaatttcgaaccactcaaggaaattgtcgtatcaacgttcctgcagggcagcattcgtcgttcaacggcaatccgtccgctcggcgataagcgccctgatgttgatattgtcgtggtgaccaatcttgatcatacccggatgtctcccactgatgcaatggacctgttcatcccattcctcgaaaagtattacccgggtaaatgggaaactcaggggcgctcttttggtattaccctctcctatgtcgaactggacctggtgatcaccgccatcccagagtcaggggcagaaaaaagccatcttgagcagctctataagtcagagtcagttctgactgttaattctctggaagagcaaactgattggcgcctgaataaaagctggacccccaatacgggatggttgtctgagagcaacagtgcgcaggtagaggacgcccccgcttcagaatggaaagcgcacccgttagtgcttcctgacagagaaaagaatgagtggggccggacacatccactcgcgcagatcagatggaccgccgagaaaaaccgtctttgcaacggtcactacatcaaccttgtcagggcggtgaaatggtggcgacagcagaacagcgaagacctgccgaaatatcctaaaggctatccgctggaacatctgattggaaatgcgctggataatggcaccacatcaatggcccaggggcttgttcaactgatggacacttttttatcgcgctgggcagccatttacaatcagaaaagtaagccgtggttgtcagatcacggggttgcagagcatgatgtgatggcgcgcttaacagccgaagatttctgttcattttatgagggtattgcgggtgcggcggaaattgcccgtaacgcgctggcgtctgaggagcctcaggaaagcgcacaactctggcgccaactgttcggatccaagtttcctttacccggccctcagggcggcgatcgcaacggtggatttacaacgccaagtaaaccagcagaaccacagaaaaccggacgcttcgcttga

SEQ ID NO: 120462 - DNA, 1803 bp, Enterobacter cloacae
ttgagtacagtcgttcagcaagtgccagcagagctgcgggcagcgctcaccctgatcaataatgatcccaggatgcggacgaacaatgcctgggcgctctctgctgacaaaagatggtcgctaaaattcaccgcagagctttccgtaccctgttctagcttcatgccagacaacagcgtctggcatctggtcctctggcaggaagaaaccctgatacgcatagaggtttatcccgataaatcggaaggtatttcagccacgtttcagcaccaaaactacaacttttcagatgcgtctacccgtgaatggacctcaggaaatccgtgccttgagaatacgcccaccatatttggtcgtaacttatgggggctggaacccgaagcattactcgacagaatcagctggcgactcagcaggctgctgctctggattgacgccgctgcacaggaaaaactggccacaatcggggatgctgttgaactccccgccttccccgatcagtcaccctttaccgtgatcggttttagcgaacagattgatgatctccccttctgggcatcgaaaacaggagaatgggggtttgcaagcagcactggattgcccggcgcgcacggcaccctttttttgcgtgagttttttgataacaaaggaaagctaatccggacaaccaaatggtccccgttcatgcgcaaaggcgcgagaactacgaacgcagtgtggtctgttttgcctaccctccccgttctggctccttggcaggcacccaggacctggctggagctcagcaattgcttcgcacaatgcgggttatcactgccggacctcttttcagatattggccgttctgtcagagccctgcgcaagcaacgcgcgcccggattactcttgctgggttttccgctggaaaacaaaatcggagatgagccagcgcgcattcactggctggcgctgcgtctggccggcctcagtaatacaatgacaaaacgccccggattccgcccaacggaacggaatcgtagaacctgggatcgcgaacagccactttcacaggagcccatcaggtgggtgaggacgcagaactgggctgccgaccagctcagaacacgtggcgaagcagccaacgacattcgcagcaaaaaggtgttgataatcggtgctggctcactgggcagcatgattgcagaaaacctgatgcgcataggtgttgtcagccaaggcattctggacgcagacctcctacagacaggaaatctgagccgtcacgccctgacaatgacgtcagttggccataacaaagcggccgcgctggttgaacatctgaatcgaattctgcctgacgcaagtgcatgttcattcagctgcgcgtttccccctgagagtgaggtcgcaaaaaactcactgcgtcagtatgacgtgatcattgattgtaccggtgatgatggtgttcttaagtcattggcggcatttgactggcaaagtgaaaaaatatttatcagcctggctatgacatggcgggctgaaggtttatttgcatttgctgccagtgaaacaacttttccggtaacggatgcttccagccgcttcgacgcctcggcgtcacctgagatcgacatggatgaggcgagaatagaaggcatcgggtgctggcatcctgtatttccggcccgtgccgatgacgtacagttatgggcggccgtcggtacaaaattcatttgccgggtggtcagtgcgccagggagaatctatgaatattttaagcagatgcctgatggcactgtcgagaaagagccgcatgagtattaa

SEQ ID NO: 120463 - DNA, 543 bp, Enterobacter cloacae
atgaatattttaagcagatgcctgatggcactgtcgagaaagagccgcatgagtattaaagatgtgactttttcgagtgagggtgctctttatacggtcgtcattagctcctcaaccattgagcagatggtttccgaatgccttaaagctggagtaaatgaaacaggtggcattctgattggctcatacagcgaagacggttctacggcaatgatcgtggaagccacgacccggccagcggattcactcgctggccggacgacatttcaacggggcgtcagagggctgaggactttacttcatgcccgatggaaaacgggattgtattatgttggtgagtggcattttcatccaagaggctcacccgagccaagtggggatgatttcaggtccatgacaagcattgcagcgaactctgactaccagtgcctggagcctgtaatgattatacttggaggggagccggcaggctcatacagtctgagcgccagtgtattcccaaggggagacgtccccatcagactgcgagaggtgctgctttaa

SEQ ID NO: 120464 - DNA, 366 bp, Enterobacter cloacae
atgaccacatatcgcatgcctgcgcttactgccgaagagattcgcagcatcggtgaaaaagccgttgcggatgtagctcgtcagaagattactacgacaaaagtagaaacttctggcgcacttaagtcgcaagagaaccgccatgctaaaggtagaaaagcggttcatcacaaggtaactaacggactggtgagcccaggtgcttctagagtgcaaaaatcactcgctggttcagccttatcgcagtcagaagggcgaaacacgcgtgcttctggagtgcaaaaatcactcgctggttcagtcttatcgcagtcagaagggcgaaacttcttcaaagaggcctttaacaaagcacgcaaaggctaa

SEQ ID NO: 120465 - DNA, 333 bp, Enterobacter cloacae
atgagccgctttcatatcagttattcgctgttcataagcactttcaacgccctgactaaccgtcaaaatcagttggtctacggctctccgcgctttggcgcggtaatcatccaactgacgctcggaataagcgataccatcatgaaagctttcaagctcggtattaacccgaacatcagtcattctacgcgagcggcattggttggcgcggtcatctttgtcggctttatacattgcataggctatcaactgttctggatcgtcggaatctttaacgagttcagtgaacacccatttctttggctgcgtcgtcatttctcaccacaaaaataa

SEQ ID NO: 120466 - DNA, 2199 bp, Enterobacter cloacae
atgagcagtgcctacgatagcctcgatccccgcgtccgtaagtgggtttacaagcaggggtggtctacattaaggcccttgcaggagagttctatcccggcaattttagcccgtgatcgagacgtgctaatcagtgcaggtacagcagcgggtaaaacagaggctttctttcttcctgcctgttcggcagttgcagatctcacgaatggatttggcatcgtctatatcagtccgttgaaggcattgattaacgatcagtaccgtcgtcttgagagccttggagatgcattggaaatgccagtgactccctggcacggggatgtaccacaaagcaaaaagaagaaggctcggactaaccctgcgggcattttactgattacacctgagtcacttgagtctttgctcataaattcaatgggctggctcaaacaggcgttttcttcagtcgcatacatcgttattgatgagtttcatgcttttattggctcagagcgtggtgtacagctgctttctctgctcaatagaattgaccatgtgctaggtcgccaggtaaatccaattccccgcgttgcgttgagtgccacgctgggggaactggagaaagtgcccgaaatgttgcgcccggacaaacgactcccctgcgtaactgttacagatagtaatagcacggccactcttcaggtacaggtcaaaggatacctggagagagtgatccaaaaagaggaagaacttcagagttcagctgaacatgacgtttgcgctgacatttttagactttgccgtggcgattctcatttggtctttgcaaacagccgaaagcgcactgaaagcattgcggcaacgctgagcgacatgtgtgaggaacatattgttcccaatgaattctttccccatcatggttcccttgccaaggaattgcgggaggcgcttgaaactcgtcttcagaaaggaaatttgcccacaacagctgtttgtacaatgacgcttgagttgggaattgatatcggtaaggttaagtcggttattcaagttacgcctccgcattctgtttccagtctgcgtcagcgtatgggacgttctgggcgacgcgactccccatcagttctaagaatgctaattacagaaaatgagcttactgtgactagcagtatcattgaccacctacggctgcagttggtccagtcgatggcaatgattagattgatgatctctaaacaatggtttgagcctgccgattcccagcagatgcattactccacgctgctacaccagattcttgcaattaccgcgcaatggggcggagttcgtgccgatcaactctggtcacagctatgtcaaactggcccgttccgtaatgtggatataggcgatttcaaaagcatgcttaaacatatgggggcatgtggcctgctcactcaactcgctagtggagaaatggttgttggggcagagggggagaaactgactaaccattacacgttttatgccgtgttcaacacaccagaagagttccgcattgtcaccggaaacagaacccttggaacagtgcctgtggactccccactgcttccagatcagcacatcatcttcggtgggcggcgctggaaagtgacagagatcgagacagagaaaaaagttatctatgtagaggcgaccaaaggcggtcagccaccacaatttagtggggggggaatgtctgttcatgatgctgttcgtcaggaaatgctagctatctatagggaaggtgattaccgcatagcaataggaagcaagagagtagattatgccgattctgccgccagaagcctatttgcggaaggcagtcgtaacttccagagttataacctgcaaaatgagtattttcttacgagcggccaatactgttacatcctcccctggatgggagataaggttgtcaatacgattacagccttgctcatacgttgtggctttaaagctaattcattggctggagttatagaaattgacggctcaagtatcacttctgttcaacaggcccttaaaggcctgctgctatcaggcttgccctcaacgtttgatcttgctgtaaatgttccagaaaagtacttagataaatatgatgaatatttaccagagtttctgcttgcgaaaggatttggggaaaaagcgtatgacattgaaggcgcgtgtacctggctgaaagaacatcttcagtaa

SEQ ID NO: 120467 - DNA, 1317 bp, Enterobacter cloacae
atgtctgtaacacgtataagagtgaaagaacgtgacgctattattcagtcacttaagtcaggtgtaacgccaaggataggcattcagcatatccaggttggccgcgtgaatgaaatcactgccctccaccaggatattgagaggattgctgacggtggtgcaagcttcagacttatcatcggtgaatatggttctggtaaaacgttctttctgagtgttgtgcgctctattgcgctagagaagaagctggtgtcagtcagtgcagacctttctcctgacagacgcattcactcatcgggaggtcaggctcgtaatctctactcagagcttatgaaaaacatgtccaccagaaacaagcctgatggtaatgcgttacttagcgttgttgaaaggttcgttacggaggcaagaaaggaagctgacacggacggctccgaggtttcatcagttattcataagcgcctggctgccctgtcagatatggtgggcggatatgactttgcgaaggtcattgatgcattctggcgggggcacgaacaggataatgaaacgctaaaatccaatgccattcgctggttgcggggagagtacaccaccaaaactgatgcccgtaacgatctagacgttcggactattatctcagacgcttcattctatgattctttaaagttgatgagcctttttgtccgccaggcaggctatgccggtcttttggtcagcctcgacgaaatggtgaacctctttaagctgaataatacgcaagcaagaacagcgaactacgaacagattttgcggattctgaatgactgcctgcaaggctcagccgagaacattggttttatcctcggggggacgccagagtttcttttcgatccgcgtaaaggtctttacagctatgaggctctccagtcgcgtctggcggaaaaccggttcgcgcaaaaagcaggagtgattgactactcatcccccactttgcatcttgccagcctgacccctgaggaactgtatattttgctgaggaatcttcgccatgtttatgcaggcggagatccagagaattatctggtaccagatgaggcactgactggatttctgcatcactgtagtaaaaccattggagacgcttacttccgtaccccccgtaataccataaaaggtttcctggacatgctggccgtgctggaacaaaacagaacgatgaactggcaaactctaatcgagggtgtggcgattgaagaggacaggcccagcgatatggatgacgccactacggaggaaagcgatgacgacgacggactggcgaacttcaaactatga

SEQ ID NO: 120468 - DNA, 2310 bp, Enterobacter cloacae
atggagatatggatatttttagcggtgatttatgttgtttatctattgtttttcaaaaagaaaaaacatagatcttcagtaatttattcaccaaaaccagctaaagctccccccaaagaatggcttgctgacatcagaaaacaagaggctattgtgcaagatgatgaacgtgaagatgacaatctggccacatttaaactcagcagtggccaggggatcgaggtccacataacgcctgttgtaaatccgcaaacttcaaaaaagaacggaaccgcagcgcgatgggtacagatgggggagaagattgctgtaggaggtgtagatattttcggtggtcatttctactttggtcagcggatgaagcccgcaggtaataatttaaatggctattatgacgatggaagtgaggcatcattaattgatgacacatgtcagataaaacctacttcttatctttacgaggacagttcattaggatactggcccagtttttcctctctttccccagaagcacgcggtgcgtatgtcagttggcttgccagcgataggtctgatccatcgtgtcctatcggctatgtttttatctacctctacggcctggaaagaaaagcgctcgtagattccactgacccaaaattccctgatgctgagttccgtaatctgttcaatgaagtcgctcggttaagatcggtattcattgagaaccgctccttccgtggatattcgacccaattactcgaagccatgtctattctgcgcccgaacatgggcttagccactgagctcgatagcaattcaggtttcagcaacagcatgcaatttaagctggctctggcaaaaactgtacatgaaggagttcctgtatcagctgaactggcgttgaactgggtaataaaccacaccgagtattcgctgcgtaccccggctcgccgctgtgctaaagagtttgctgcgcttttcaaacggcgttacaccctcaaatatggtgaagggatggtcgttaaggcgaataaaacgcgcctaaggttagattacacaccagcaagtcctagtttgcgaggtgttcgacttcctgttcccgacctgcctgatccaagtgcgttgaagagccctgtccagaaaattatggctcttgccgacatatgtacggatgaacttgatgcttatagtcgctaccttggtaggaaaggtacgtcagtcaatgatacggctgcaattatgttgctcccttcagagatcgttaatgaaagcgcagaaaaaatattaagctcattcaaacgctgggctgatgaggcgatcctcgtcaaggagggggtagtctcagttgctgacttttgggcacatatgaatgccagttgccccaataagatcaataaaaaagaggctgatttgatgcaggcctttgctctgaagatgggttacggtctggcacctgacccgtattatcaccatgtgaaggcggatgttgatgggacacttgttctattccctgccgccgtaggtggacgcttctcaccttctcctgaatttatctcagccgtaatgatgctcagattaggggcgatggtcgccttgattgacgattctcttgatcaagctgaacagaaagtgcttgagaatgccatcaacaacaatcctggcttcaccgatgatgaaaaacgctctctacatgcgtatttaacgtggcaacttcataccccagccaatatgacaggaatgaaaagcaggattgagttgatgggggccgcggaaaaagctgctgtgggtaaggttatcgttagtgttgcctgttcggatgggaaaatagcgcctgccgaaatcaaacagcttgagaagatttattcaagtttggggctggatccctcatctgtctcgagcaatatccatcagcattccgcaattgaacatgatctcgtctcgtcagtaccaactgatcagccagcagcagggttcacactggatgctaatgtacttgcccgccacgaatctgccacggatgatgttcgtaaattgctgaacacaattttcaccgaagaagaaccggaagagctagaaagcgctccagcctcattaacggaaacgggggggcttgactccgcacatagccagctttatcgcagtttgctggagaaagaacagtggtcccgaaaagaggcgacagaattgtgcggaaatttgaatttgatgctcggcggtgcgcttgaggtgatcaatgactggtcctatgcggtggttgatgctccggtgctggacgatgccgatgatgatatctgggttgacctggaaattgccaaagaattagagggatag

SEQ ID NO: 120469 - DNA, 726 bp, Enterobacter cloacae
gtggaaaaagatgtcgggatcaactacgaagaagattatcaggcgttatgcaagaagtatgagcttaagttcaaccaaatgaacgatagggataatctgtcgcaggatgaagttgattccgtaaatgcatccggacgtcattgggcttcagattttcttcgacgatacggagagaatgacattgcaagctattatgaaggggcacttgctaatgagtttgaacaaatttgttggcaggccgatcgcgataaaactatgttcggtgatatggatatcgcagtcgctctgtatacgcttggtcaaatcttcagggcgcagggcagagtcagagaggcctgccggtacctgacaatagcgtgcggttatctcgaattgaacagagatttatctatgttgtttaacatggcgatgagtgatgaagtaaacagagagaaagagcaaaagaaaaaagaggcaagtaaagctgagcctggaagaagacgaaattttgaactggttcgtcaaaaggtcattcagcttttggaaacaacggaacgacccgagcaaggatggcaaaggaatacgttagccttcaaggccatcgacgaagctttatggcagtttatagaagaagaaggcattggcctagattatggtgaacttcgttcacgagttttgcgttggtcacgagagagggacaatgttcgtgaggcatttgcgagagtcgttgctcagaagaaaaaatga

SEQ ID NO: 120470 - DNA, 264 bp, Enterobacter cloacae
atgagtggaaaacggtactctgaagaattcagggcagaggtggtcaggctggtgactgaggataaacaggctgttccggccatagcggcaaagcttggcattacgacccacagcctgtatgcctggttaaaaaaatcaggacatcacacttcttcccagcctgacgcagaaatccgcaggcttaaaagagcactcaaacgtgtgactgaagaacgcgatgttttaaaaaaagcccaggcgtacttaactgtccggtcagagtaa

SEQ ID NO: 120471 - DNA, 213 bp, Enterobacter cloacae
atgtccacttcaaacgtgaaagtgctgcgtatcgctgcagtggttaacaagctcgggatcgccagatcgaccatctatgactggctcaatgccaaatcgccacgtcatgacccggcgttcccgaagccctatcctctcggtaaacagtcggttggctggatagaatccgaactggacgagtgggttttgcagcgcaggcccgttatgccctga

SEQ ID NO: 120472 - DNA, 1533 bp, Enterobacter cloacae
atgtcatatttaccccctgcacttccactggttaattctgccaatcccttccccgttgatgcattgccattgataatgcaaaacaccatcaactaccttcaggatggtggaaaagtaccgactgtactggtcgtgaacgctgttttagcggcagtatcattagcctgccattcgcatatcaatgtactcaatccttacacggacatagaggagcattgttcactcaacatcctgacgctcgctgattcagggacgggcaaatcgtccgtcagcaaacaggtaatgaagccctttgatgctttcagggctgaattggccgaatcacatcgggttaaccaggctgtctggcgccaagattatgtcgtatggaaaaccagtttaaaggcgctggaaagtaagctgcgcgatgcagttaaaaaagaccagtgtacagacgaggcccaggcagccctgaaatctcacgcatcggttgaacccgtcagaccagtgctaccaacgctggtctacaatgacacctcgcttgccgcgctcatcgctggcctgaatgagtatccgtgcgcaggtctgatttctgatgaagccagcaacttctttgacgctcgtcttaaagataatctggcgttcttcaacaaagcctgggatggcgatatgtatgagcataatcgtcatcagcgtgccacccagagctttaaaccgacgctgacggtgtccttaatgttacagccttcgctttttttcgattacatgaaaaaggatggtgataaagcattagagagcggttttttatcccgcttcctcttttcaaatatcaccccgaacaccatgctgagttcctgtgtgatgagccaccattatcgtccggataccgcataccgtgatgaaaatgctttaacctgctttcacgacctgattggaaaattactcgggcaacagctaaaacaaatttattctggtgaaggtaagaaaaaggttctcaagctttcacctgaagcagaagtccactggcagactatgcgtgagaactggctgagatacacattcccgggtggtgcctggtcatatatcaaacccatggtactgaaagccagtacgaatgtgttgcgtatcgctgcgctgctgaattacttaaccaaccaggaggatgatattattactactgatgttatttcgcgagcatcagcgatagtgaactggtatctcaaccataccgcagcctggttttatcaattcacggatgagtataaattccagcaagacgtgcaaatactaacccagtggatccatcataaattcaggtccactaacggctttccgtttaaaaagaacgatgtcattaaatatgggccgaacaaatttcgccgcagcgaaaaactggaaccgttgctgaatgccatcatgactacaggtactttcgcatacatggttaaatctcctgagaatccggctatttatattacctggctcatgaacgatggtcgctatatgccattttatgatgataaacagccgccttcacctcagaaccctgcttag

SEQ ID NO: 120473 - DNA, 624 bp, Enterobacter cloacae
atgagcaacgatatgggttataatcagcatcacattaaacgcattcatgaaacgctgcagaattccttacgtgaatacccaaggacgtttatcctgaatattatcctgaggtttcctgatgccaattacgaaagttataaaacagatcatcaattgataacccgctttattgagtcgttaaaatcacagattaaattcacgcagaagagaaagataaaacagggaaagcgagttcatctcagtagagttcgctatgtatgggccagagagtttggtgaaaaaaaggggaagaaacattatcatgtggcattgatactgaataacgatgcctggtacgcagctggtacctattatccgaagcagggacaatacgttcactgcctgggattgatgattatggatgcatggatcagagctttaaaactgcacgcgcagcaggattataaaaataaatattatcccctgatagagtttgtacatgaaggtgattttaatcttaattccaatggcgaacatttcacctggcattacgatactatcatgagaagactgtcttatctggctaagcgctttagcaaagataattcagacgaacacagaaattttggttgcagccagtactga

SEQ ID NO: 120474 - DNA, 414 bp, Enterobacter cloacae
ttgaacattcgcacagttctttttctctgctcatcgctgacagcgactgctgcacaggccgttactcccgaacaacagtggggtgactggtatggctacatcaatgccatggagtttgaaattagcaccgacaatgccaccggagagcgcctgacgctgacctgctcagacgagcatatgaccctctcctacagtgtgcctgcaaaggactatcgggcctcagccaccggtataagcattaacgcaacctcatacgctacgggcgaaacggcctttattgcgctcaaaaataccaatgatcagcagaagatagagatcacgatgaaagataagccccttccgggaacctttaaaaccgcggggttgcgcgaagcgttgaatgacctgagctggcaggactgtatcagccattaa

SEQ ID NO: 120475 - DNA, 708 bp, Enterobacter cloacae
atgctgcgcgatatgaacgatgctgcagtgagagtcaagctcaacaataaagcaggcttcgctgttgaggcgcaaagaatggccgctgcagcgaatatttcgcctttgctttatgccgcatcgccgcttgaagaaaactttatccgctacgacagtaaacccgttaaggccctgacctgccttatcacttcccgtaatatgccgggcaccaacaagaattattcatgggaggaaacctactgtctggatgaaaccggtgcagcttacattggcacccaaggctggccgtcacgcacaatattcgacaaaagctgtggggtgggtgcatctgactgcccggtctatctgagcctgaaaaatgatccacccaccctgcgcaacgactccgcacagtatgtgccatacagcagcgctcaccgttctgagacggtgcccaataaaactcagaataaagtacccgctgacgaaattgtcgctgaacaggatggatatgcggttcacttttcccgaagcaacaactgttctgacagcagactcaccgttaaaaatatcagcacagggaaaactgctgcgatcacaggtgtcaacgggtgcacatttaatccgaaaaagaacgctgtggttatctatccggtcaatgaattcgtgagcgtttacagcggtaccaccaatacctctgaagaaatagcgactgccgatctcccttaa

SEQ ID NO: 120476 - DNA, 825 bp, Enterobacter cloacae
atgacccgtttagccagccgctttggccgtataaaccagatacgccgtgaccggcctctgacccacgaagaactgatgagtcatgtgcccagcgtgttcgggactgacaagcatgaatctcgttcagacaggtacacctacatcccgaccatcaccatcctcgaaagcctgcagcgtgacggctttgagccgttctttgcctgccagacaaaagttcgcgaccagagcaagcgggagcacaccaagcatatgcttcgcctgcgtcgcgccggacaactgaccggccatcaggtgccggaaatcattttgcttaacagccatgacggctcatcaagctaccagatgctgccggggctgtttcgtggagtctgtaccaacggactggtctgtggtcagtcattcggcgaagttcgggtaccgcataaaggcaatgtcgtcgagaaggtgattgaaggggcttacgaagtgctcggggtctttgaccgggtggaggagaaacgcgaagcgatgcagtcgctggcgctgccagccccggctcgtcatgcactggcgaatgccgcactgaagtatcgattcggtgaggaccaccagccagtcacggtatcgcagttgctgaccccacgtcgccgggaggactacagcgatgacctgtggaccgtataccagcgcgtgcaggagaacctgatgaaaggtggattgtcagggcgaaccgctcaggggaaaagcagccgcacacgtgcagttaccggtattgatggcgatgtgaagctcaatcgcgccctgtgggttatggcagaaaacatgctcgaatttttcgggcgttaa

SEQ ID NO: 120477 - DNA, 444 bp, Enterobacter cloacae
atggatacacaaaatcatcagttcgctgagctgacagcaattaccgcctcagtggtccctgatgagttacgcattggcttctggccgaaacattttggctccatcccgcaatggataacccttgaaccccgaatctttgcctggatggaccgcctgtgcactgactatcacggcggtatctggaacttttcgacgctcagcaacggtggcgtttttatgtctcctgagtcggaggatgatgaaaagtgggcattgtttaacagcatgaacggcaatggagcagaactcaccagtgaagcagcaggaatagtcgcctgtctaatgacatacagtcaccacgcctgtcgcaccgagtgtgatgcgatgactgagcactattatcgcttacgcgacttcgcgctgaaccatccagagtgcaactccattatgcatctcatcgactga

SEQ ID NO: 120478 - DNA, 543 bp, Enterobacter cloacae
atgagtaccgcgttatccccactgtcatcacagcctgaactctttccgctgtcggttatggctcaacatggttgcctactacccgcgacttccggactgacaccctatgcccaacagaccattcgccgggctatcaatctgctggataaatatctgcgtcagcccggtatatcttttacctcaagtgctgctgcccgtgactggcttcggttacagctggcaggacaagaacgggaagtgtttatggtgctctatcttgataatcagcatcgtttactggagagcgaaacgctgtttgccggttcagttaaccatgtccaggtccatccccgcgaagtagttaagtcagcgcttcgcttaaatgctgcagctgccgtgctggcgcataaccatccatccggtgatccggagcccagccaatgcgaccgcaatattacgggcaggctaaaagaagtattggcgctcgttgatgtgaaaacgctcgatcatctgattgtcggccaggatggtattgtgtcgtttgcggagcgagggtggatatga

SEQ ID NO: 120479 - DNA, 222 bp, Enterobacter cloacae
atgaaaatcatcagtaaacgccaggcaatggccttgtaccgacagcatccaggctcccggctgtttcgcttctgtaccggcaaatataaatggtctggcagtatctgccattatgctggccgggaagttcaggacatacgtggcgttctggccatgtttgctgaacgtcgtcaggaccgcaatggtccctatgtgattcttcgtagcgtcactctcaattaa

SEQ ID NO: 120480 - DNA, 366 bp, Enterobacter cloacae
atgaacaatcactccgaatccggtactaagccggagagtcccgcctgccagctgtggggacttaaacgtgctattaccccctgttttggggctcgtctggtacaggaaggcaatcgggtgcattttctcgctgaccgcgccgggtttaacggtgctttcagtgacaacgatgcattgcgcctcgaccaggcctttccgttgatgctcaaacaactggagttgatgctgattagcagcgagctcaatccccgctaccagcactgcgtcacgctttaccacaacggactcacctgcgaagccgacacactcggctcctgtggctatgtctacattgctatctatcctgagcagactgagccgcattaa

SEQ ID NO: 120481 - DNA, 330 bp, Enterobacter cloacae
atgcaaaccttatcatcacacccgacgcaggcggctccgccctgcctgtcacccattgaaatctggcagtgcctgctaactcatctcttgtcgcagcactatggcctgacgctgaatgacacaccgttcagtaatgtaaccaccatacgagaacatattgatgctggagtatcgctcagcgatgcggtgaactttctggtagaaagatacgggcttgtccgtatcgaccggaagggattttcgtggcaagaacaaaccccgtatatttccgtagtggatattctgcgagcaaggcgctctaccggcttgctaaaaactaacgtgaaataa

SEQ ID NO: 120482 - DNA, 420 bp, Enterobacter cloacae
gtggctaacgacattacttttcccgccacgttaacctccgtctcgccgcttgcggcatggcttgagcgtcagatggcttcgctgtccgttagcgatgactggcgctttgcgctcgatctcgccgcctgtgaaacggctaccaacattattcgtcatgcgcaacatgaggatccggaacgttgcttcaccgtggagttcatcgttaccgtctcggacgcggcgctgcgttttacggacgatggcgataaatttcccgctgaacgtctcgcggcggtgcgtgacgacgcgacgttcgatgcctctcttttggctgaaagcggcagaggactgaaactcattttgttgtatgtggataatttcacggtagaaaacattgcagggaaaaatatcaccgttctggagaagaggatggtcggataa

SEQ ID NO: 120483 - DNA, 339 bp, Enterobacter cloacae
atgaacattgatacagaccgactggacgacgtaaacattatgacgccttcggtgcgccgactggacgcctcggtggcggcggtatttaaggaagccattgcccgggagattggggtggatcgtaaagccctgatagtcgatttcagcaaaatcgattttatcgacagcagcggccttggcgcactggtttccctgctgaagatgatgaacggtaaaggtgaaatgatgctgtgtgcgctgaaccccggtatacgcaacatgttcaccctgacccgtatggatcgcatatttcgcatttgcccggatcgcgctacggcactttcgcatctaaatcagtga

SEQ ID NO: 120484 - DNA, 1215 bp, Enterobacter cloacae
atgttgtcacagcacgtcctgatagttgaagactcactggtttatcgtcgcctgcttagcagaatgctgacgcagtgggggtataccgtctacgaggcggagaacggcgttgccgcgcttgagatcctcgaaaaccagccagtcagcctggtgatcagcgactgggatatgccggaaatggatggcctgacgttgtgccgggaggttcgcagccgtcagttcggacattatgtttatttaattttgcttaccgcacgcgaagagccgggcgatctgacggtggggtttgacgccggtgcggatgattttctcaacaagccggtcgagcagagtgagctgcgggcgcgattgcacgcgggggcacgggttctgtcccttgaggccacgcttgctacgcgtaatgcacgcctcagtgaggcgttaaggcagatagagcaagaccttgaagtggcggcgcggatccagcagtcggttctgcctgcgcatcagttgcgttaccgggattactttgcagactggatttttttgccgtcagcctgggtgtccggcgatattttcaatgtcttcccgctggacaatcacctgggattctactgtgtagatgtgtcggggcacggcgttggtgcggcgatgatgtcacttgccgtggcccgtcagtttctgcatggcagggcggtagagcgttttctgtttgcggacgatagcgacgttgcctcccctgcggaagtcgttcggatcctgaatggtcgcttttgcagcgaagaggttgagataatgagttatttcaccatgatttacggtgttatcgacctgacaacaggtgaaggcaagctttgccaggccgggcatcctacgccgttcattgtgaaccctggcggcgaggtcaggacggtaggtgaaggcggcgcgccggtaggattgatgccggatctcagctggtcagacgtaagcttctcgctggcgccgggtgagcgcctctgcctgtttagcgatggcatcaccgagtgtgaaaatcctgacaacgaacagtttggtcaggctcgtttgcagcgtcggcttcaggatgacgccacgctcgcactggaacggctcttaccgcagtttgcgcagcatcttatacgctggcgcagcggaaaataccgtgaacagcaggccatggcggacgatgtttccttattagtgattgagcgtacaggagtaaacgatgaacattga

SEQ ID NO: 120485 - DNA, 900 bp, Enterobacter cloacae
atgcgggataaatttttgctgacctgcgcactgctgtgcgttgccactggcgcagagtcggcgccgaaggacgatgcggattcactacgtgacaagaacggcgagccggtgcaggctggcgtgttcaccagccgctggggtcgcctgttctccggtaatgaagacgtcttctctggcgcgctgagctttagttcgggactaaaagagcagtggatgactatccctaacagctcggacaccgcagagcagaaacgtaaatacaaccagacgcttaatctcagcctgcaatactcaccctacagttactggtttgcgaacgtgacatcgcgtttgccggtgacggacaccagccgctacacggccgattttcgttacagttttggctatgatgactggcatgccaacactttcagcctggtgtacagcaattacggggataaccgcttctggacgtcaggaaaccgtcgccacacctattttgagcagggggccgtgacgctggcgtataaattttcactgccgaaaccgatagagaatacgctcctgattaacaaaggcgactctatcatttgccagatgggctacagctgggttccgcgttattacgatctggacagcaacgatatccgcaaaaacaagaacgtggtattgggcgggtgtggttatacctttaagcagcacttcttcgtgcgcgccacggcgttctggtttccggacagcagccagcaacagccctggaacggcgactacagctatagttttggctatgcgggttatacgccaggttcattctctgttcagtatgctaactactccggcacccgttaccccggtcaccagagcggcagcggtaaattccgggaaggcaccgtcagcgtcatctggttcttaccgctatag

SEQ ID NO: 120486 - DNA, 1218 bp, Enterobacter cloacae
atgagccagattgcgcctgtgcttataaataaagacgttgaaaaaccaacgacatggcgttacatcgcgtcggataaacgtgatttacgtattgattttatgcgcggtatcgccttagtgatgatggtggtggcgcacacggaagtgatgtcgatatttaatatatttacctgggaaaggtttggtctggtcaccggcgctgagggttttgtgatcctttcaggatttatgctgggaatgttaaaccgtgtaagattgcaaaaagcagtattgttgactatatcctggggactttatctgcgtgcatggaaaatatatcggataaatatcatcattattctttcatttttactgttaggatatctgccgtttattaacgtctttgaggtgacccattttaccgatcgttactcaggtacaacctggtcactgtatccggtgacgccccaaattaaagaaacctggtttaacattgtcctctacctgcaaattggccctcatcaaacgcaaatccttgggctctatatttttcttctgctgttaagccccctgtttttggggatgctccagaaaggatacgtctactggctgctgggtttatcgttgctcgtctacggcggctggcagatgtggccggtacgcgctacgccgtctcagtttgaattcgcgtttccgctgctggcctggcagtttattttcgtgctgggtatgtgcagcggttggtacaaagaggatttgatctcttttgcccgtacgcccgccggtaaggtcgtgctcgtggcgctggtgataattgcgctgcttcttggctttatcgcccagaaccataccaacccgtttatgccgcccgcactgctaatgcacagcctctcgccggaggacttcaacgctttttatcatacctgggcggcaaaaaatggccttgggcccgtcagggtacttaacgatatctgtctgatggtgaccgtctatttggtgctgacctggtgctggctgcccctgtatcgcctcgcaggctggtttcttattccgctgggtcaacattcgctttatacctttattttgcatgtctacgtcgtatttctggtaagccagttcgtcacgttcgatttgtggcgccaggactggatagtgaacaccttcattcacgctgcggcgctgggcgtgctgtggctgatggcgaaatataacgtcgccgcgcgctggatacctaactaa

SEQ ID NO: 120487 - DNA, 1815 bp, Enterobacter cloacae
atggatttttattttacccgttttgaacatcgccagccgcctgaaccgcttaagacaccgcgatgggtcatgttaacatggcaggtattggcggttgcctcgctgattttaggcgctaattatatttactggcgctggacagcttccttaaataccgacgcgctgtggtatgccattccattagtgctggctgaaaccctggcctggatcggcacagtgctattcaccataaacctgtggaaagaagacgatccgccgcaaaatccgcccccgattgagatcaatgattgcctgcgctccgaagacgcggaagcctcaagccccatcaaggtcgatctttttatcgcaacctattcagaagatgttgagctggtcaggctttcaattcgggacgccatgaagatggattaccccggcccgctggactacaaggtgcacgtgctcgatgatggccggcgtccggagatgaaagccgtctgcgatcaggaaggcgcaaactacatctcccgccagaccaatattggctttaaggccggtaacttgcgaaacggacttgagcaaaccgacggtgatttcctgatcatttgcgatgccgatacccgggtcttccccactctgctcagccacacgctgggctactttcgtgaccctgacgtggcctgggttcagacaccgcagtggttcttcgacctgccggagggggaaaacctcgcgcgctggcttgggcgaaaagcgggcaaaacgggatacgggctgggatggctcgcccagaagcttatcgggccagtaaccgttggtcgcgatcccttttttaacgatccgcgcatgttttacgacgtcattctgcgacggcgaaactgggccaacgccgccttctgctgcggtgcggcctctgtacacaggcgcgaagcggtaatgcaggcagcgctgcgcagctacgtctggacggttgaagaagagatcgatcgccacacgcgggatatacgcgatccggtcatgcgcgaaacccttcaggacgccatgcgccctcacgtggccttcgacacggaactcacgccctataaatttcacgtttcagaagatatttatacctccatcctgctccacggcgatgccgcccgccgctggcgctcggtaatgcacccgcggatcgaatcgaaaatgctctcaccgcaggatatgctgacgtggatgatccagcgcttcaaatatgccgcgggttcactggatattctgttccatgacaatattttcagccgccgccgttttaagctctctttgccgcaaacgctgatgtacgccaccaccttctggtcctatctggcctgcgtgtggaacactgttttcctgatatcgcccattgtttacctgtttaccggcattccgcctgtatcagcctggtctgaacccttttatcttcattttttgcccttttttattgtttcggagctggcgtttatgttcggcacctggggaatatcagcctgggatggcagagcatcgtatctctcattcttctccatgaatttgcgcgcgctcaacacagtcctgcgcggagagcagatcaaattccacgttacccccaaagagaggcagacgggacggtttctatacctggtgaaaccgcaaatcgccatcgtcgtgctcacgctggcggggctgatttggggcggtattcaggttgcacgtgagcaggttgacgatccgtccggctacgttatcaatatcttctggggtgcagtcaacattgccgccatgctgccgctgatcttcgccgccatgtggaccccggctgaagaagaggtgagcgaatga

SEQ ID NO: 120488 - DNA, 1332 bp, Enterobacter cloacae
atgagaaaacgcgacgcacttttgtcagcccgcagctacctcaccattctgctcggctttctgctgggattcgctattgtcgtctgggttgaaaaacagatgccgacacgcgttgagagcagcgcagggatatcgctgagtaacgatttcccacccttgcccgctccgcgtgaactgacattcgaagaagccatctgggcgcgggtggcctggcaatattatgtgaacaacacgcagccgaatggcctggccaacgcgcacgacggcgaaccctggctcagcctgtggagcaccggcagctatctttttgcggttgcagccgccaggcagctcaacgttcttacttccgaggagtttgatgaacgcatcgcggccgcactggcggccctcgcaagccttccactcaatcctcaggggctgcccgccgcctattaccatgccgacacacttgagaccctgggcaaaccggacgcctcggctatcggcatgggccgcctgcttaacgccctgcaaacgctgctgtggcgttatcctcagcacgctggcgccgtacgcaatctgctcgatcgctggaagatgggcgccctgattgccaataacaccaccagccaggccgcggtcccgctccaccattgggcgctggcgacggacgagccgagaaacagcttcggctatcgtctttatgcaagccatacgcttcggctgatcgacagcgcggcgggactggcagtgacgaatccaccagaagggcagcagatgatcgacatcgacggaataatggtgcccgacgaggggctgcgtacgccatggggtcgccaaccttcgcttatcagccttccctatttattaacggggcttgagctgggttttgatgcgcagagcgcagaaatcacatggcgcataatgcagatccaacagcgtcgacatagccttcgggtccgcaagccgccgatcagcaccgattacgccgagcccgcgccggattacgtcaacgatctgcccaatcgccagccgctgcaaaatagcgctctgcttgacgccacgccggagcaaacggcgatgacttcgacccgcaccgcctttgcctggtacgccctgttccgcaacggctggagcgaagcactgcgccagcaggtgcaaaagctacaggtaccaggcaagggctggcagcgcgggcttaacctcaacagcagcgtgaacgagatcgttgatgccgataccaatgcggtcgtcctcgaaagcctggcgtacattgcccacggtcagatgctttgtctggcctgccctggccccgccactccccaaacctcttcagcaggagcgaagccatga

SEQ ID NO: 120489 - DNA, 1548 bp, Enterobacter cloacae
atgaagctgaaatcaatactcttttttcctcttctggccgggcttgtggcgtgctggctctcactctctgcggcacaggcagcggctggacttcccgcttctgattacccaccgcgtagcggcgaactcacgcctcgcgagatggctattgccaaaaacgcctggcaatatttcgttgctaactatcagcccacaaccggcctggtaaatgccgttaataaatacccctcaaccactatgtgggacagcgcctcttatatggccgcgatgacggccgcaagggagctggggattattgataaagctgagttcgatcgcagaatgctgaaattactcgctaccctgaacaaactggatttattccgcaacgaactgcccaataaagcctataacaccatcacaggtcagaaggttaactaccagaacaaacctggcgagattggcttctcggcgctggacatcggcaggatgttgatctggctgaaggtcattaaggagcgctatccggaatacggcaacagcattgataacgtgctgctgggatggaacttcaccaacgtcatcaacccctgtggaatgatgtacggagcctacctggaaaatggccagccaaagtacgtgcaggaggggcggctgggctacgaagagtatggtgcagcgggctttgcgctgtggggctttggcacctgtcaggccagccagcctcagccctacgagctggctgagatctactgcgtaatggtgccttatgactcgcgcgatccgcgccttaccagccagcataattacgtcgtaaccgaatcctatgtgctttacggcctcgaatttggtttcgacaaaccgacggacagggaaaacagcccgcgtgactacacccatccgtggatgaaaaacttcgccgacagggtttaccaggctcaggagaatcgctacgccatcaccggtattttatctgctcgctctgagcatcaactcgatcagtcaccctacttcgtctacgacaccgtctttagcgacggcttcaactggaacaccatcaccgataaaggcgtgtacgttcccaatacggccgccgtctctctgaaagcggcgctcgggatgtgggttctctggaattcgccttataccgaccgcctgctggacgccattgaaaacgccaacgaggcgggcaaaggctactatgaagggctgtacgaaaacggcgacggccccatcaaagaattcacggccaataacaacggcatcatgcttgaagcattgctgttcaaaaaagagggcaagctgatgcagttcaacagcgataatcccaaagatccccactttgccccttccctgtgggaaaaaaagctggtggatctctttgagcctaataatgcctcgcgcaaccgtccattcctgaacagtacgcccgcagtgaagacatggtgtgaacaaaccgggaccactctgcgcaccaaacccgcttgccaggcctgtcaatgtgctacctgtaatacggacgagcctgtgaaactgccgccggtgaccgcacaatgcttaagaccttag

SEQ ID NO: 120490 - DNA, 1395 bp, Enterobacter cloacae
atgcttaagaccttagcccgctggctggctgccgccgtcctcattcttattatcgccttcgccctgttcagctgcgaaagcgcagggtggcgctggctgaccaaaggcggctggcacaccaccgctcgcatcagtagcctgaccccacaggagcgggagtgggcgggtatcgcctggcgctattttgagaataacacccaacctcagacagggctggtcaacggtagcgataaacagccacgcgttacgctgtggcaaatgggcgatacgcttatcgccctgctggcagcccgcgagctgggtctgatccaggcggccgagtttgatgcacggctgacgcgcctgctcggaacactcaatcgcctgacgctgaccgaaacccgcacgccaggcagactctattccagccgtacggccacgcccatcgatttcacaggaaaaccggcgcagcgcggatggtcggcgaaagatatggcgcggctgatgctggccctgcgtctcactgccgagcgagcacctgagtaccgcgaatatctggaaaaaatcatcctgcgctggaatttttgtccggtggtggataaagacggggagctgtggtctgcgtccgagcagaacgaacagctgttggtacgcgacgaactgcggctgggtgaaagcgaatatgccgccagcgcgtttcggctgtggggattcccggcgggcaaggcattttccccgccttcccagaacgtcatcatgtaccagcgcagcctcgccgttgacgcgcgcgatccaagaacaacctggcagccatcgctgctctccaccctccccgcgatgctcccgggtctggagtttggctggcaggctcccggagtggccgtcgatattcaaaaaaggctgcgcgcccgggccgaaggagtatggctcagccaaaaaacgcgctgggagcacgacggcatactcaccgcacgcgccgatttttacctctctcaggcgccatggcacgtcgaggacaccgtctggggaaatggttacgcctggaatacgttgggcgatgacggtaaaagctatccccggctggcacaggtgaccaccaaagcggtcttcatgctctggacgctgtgggaaaacgaatataccgatgccctgatggctataacccgacacctgaataacccgcaacagggctggtttgagggccgcgttgaggccaccggcgatatcaacccgacgctaaccctctcgacgaacgccatggtgctggaagcgctgctgtacaaacacaacgccggaccgctgtttgaaaacggccttgtgaagaatgatggctattttgcccgccgcacgtcggatcctttcaatccgcccggcctctgcctgcccggcgaacgtgccttgagggccgcaccatga

SEQ ID NO: 120491 - DNA, 435 bp, Enterobacter cloacae
atgaaattttatcgcgatctctttgacgccagcctgaaccgcgtcctgccggagagtgataaacggcacttttttgaaacgttctgggaaacgtttgtccatatgtcaccggagacagaacagcactttgcccgggaccagggcggagatggccagcagacgatcttcaagagctttttcgccatgcttgccgttgacggtgcgctgtttgtacccgattttctggaacgcctggcgcgggagcagagtgatgaaggactaggcctgccaccgcgatttttcggcctctggcgggaggcaatgctcaggaccgtgcgcgcctgcgatccactttgcgatgaagagatcctcacagcctgggcgatggcaattgcccccgggctggagtatctgcgccgccaggcggagctgcactataaggccagaggtgagtaa

SEQ ID NO: 120492 - DNA, 2697 bp, Enterobacter cloacae
atgcgagccacatcccgtttcgatctcaacgcgctgcctgtgggggtgatgatttacgatcccgccgagcatctgctggcctggaatgaccagatatcgcgcttttacccggtgatcgccccctggctgatcgccggcgcttccctcgagagcctggcggagaaatttattgatgcgggttataacatcgactccacccgccgccggaccctgcgtgaagcgatcgttcgcaactgccgtcagtcaagccatcgagaggtgcggcagtcgggaaaccggcggctctacgtgcagcatcagcgtctcgccgatggcggcattctcagcctgcataccgatattaccgagcttgacgacgcccagcgctcgcgccagcagctgcacgatgattttttactgaccgcagagtccattcagatcggcatctggaactggcaggtctctcacgacagcctggaggtgaacgatacgttgctggcgatggtgggtcagtcgcgtacgcagctgcactacccgctgcgctttttactgaatctggtccatgaagaggatcgtgccgtcctgcgcaacgcgatgatcgcctccaggcaggagcacatgccggtgtttgaaagtgagattcgcgtgcaacacgcgacgcagggctggcgctggatgctggtttcgggacaggtggtcaccctcagtatgcagcagcaggccgaacgggtgatcggcaccctacaggacatcacccgccgcaaggaggccgagttgttagccattgaagcggcgaaagtggcccgggaggccaacgaggcgaagagtgcatttctcgccaacatgagccacgaaattcgcaccccgatgaacggcattctgggcatgactcagctctgcctcgatacacagctcacccccgaacagcgtgaatatctttctctggtgatgagttcagcgcagtcactactgcatatcatcaatgacattctcgatttctcacgcattgagtcaggtaagatgaccgtcgatacagagccgctggaaatccgcccctttgtgcagtcgctcatccgcccgcatatgccctccgccagcgaaaaaggcattgaactgctggtggatatcgctccgggggtgccggaagtgctcatcgttgatggtccccgactacgtcaaattctgactaatctcctgggcaacgcgctgaagttcacccatcacggtgaggttatgctggcaatagagcctacagaaagtgaagggcactggcgttttcgcatacgcgacagcggcattggcatcccgatggagaaacaaaaagccattttcgaggcgttcagccaggccgatagctctaccacccgccgctacggcggtactggcctcgggctgaccatttctgctcgcctggtaagtctgatgggcggagagctaacggttcagagcgagccgggtgaaggcagcgaatttgcttttacgttgccactggaaggtcagttggctgtctcagcaaccgatgctcctgtagcacgctttaacggcgaatcggtactggtggtagacgacaacagtaccaacctgcggctgctggacaccatgcttcgccagatgggtctgacaccgacctgtgttaacaacgccggggaagcgttaagcctgaccgcaaaaaggggatactggccgctgatcctgctggatgcccagatgccggatatggacggtgtatcgctggccattgagctctctgttatgccgcaggccgagcaaagccacatcattatgctcagttccatgagccgccatttcgatgccaatatgctcaagcgcatcggggttgcccactatttgcataagccggttgcccaacgtgaactctatcaaaccatagccagcgtcctggcacccgctccccttacctctcccgcggctgtgcccgcttctgcgcccgttactgcgcaggccagtctgcgtatcctgctggccgaggacaacctggtgaatcagaaagtcgccagacgcctgctggagcagctcggccaccgttgcgaagtggtatccaatggccgggaggccctcgaacgctggcgtgaacagtcctgggatttgatgttggttgacttgcaaatgccagaaatggacggtgaaacggccattcgcctgcttcgtgaggagacactgacgcgggggcgtagccaccagcccgccatcgcgatgaccgcccatgccatgcagggtgacaaggcgcgctgtctggcaatgggcttcgacggctatattgccaagccggtaagtcaggaggcgctcagggaggagatagcccatgttctcgccggagaagataagggtctgccagatgaggcacagctgttaaaacagtgcgcggacgatcctgaactggttaatgaattgctggcgctgttcggcaacggtcttgacgaggcggtggcagccatggcgctgaacattgcgcataatgaccgcgatgccctacggcgggccgctcataagcttcgcggcgaagccgtcaccctcggtttcattcgtctttcagaagtgctccagcaattggagagtcaggcggtctcgctgaaccagacggggctgagcgttttacatggcgagcttatcgaggaggccagacgctctgcggcctggctgcgccgcagagcacaggaggttaaagatgatcaggcttcttctgctgctggcaattag

SEQ ID NO: 120493 - DNA, 2199 bp, Enterobacter cloacae
atgatcaggcttcttctgctgctggcaattagccctctgctggcccaggccagccagcccgtcacctggtcactggccggaatgtggcgcgtgcatgacgccaacctcagcacctttgatggcgccagcgcgcctgaccgcgactggcgatcgattgcggttccggccaactggtacagcgccggatacgatcatcagggtgccctctggtatcggcacgaatttaccctgcccaggcgcgcgcccgataccatggccaccctggtctttgatggcgtggactattttgccgacgtcacgctcaacggcaggcatcttgcccatcacgaggggtattttcagcgcttctcggtagacataagcgatgctttgcagcgacacaataagctcgccgtgcgggtggacagtccctgggaagatccgaaaacaatctggccgctgcataaaacgatggttaaaggcgtacttaaccagcacgatacccgccctggcggggcctggtcagaggacggccaggatgccaactccggggggatctggtcgccggtaaagctacatttgagccgcggagtgaccatcgacgaggtaatactgcgtccggactggcgtgaagggctgagcaaaccagcgctgcacgccgagatccgctaccgggcgttgtctgccggtgacgtaactttgcgcctgtcggccacgccagacaattttacgggcccgcctgtaaagcaggaattccctgtaaaccttgcgagaacggacggaaagccgcaatcgcttcgcgtcacgctgccaatgcaaggcgccaggctctggtggccagtgggctatggcgggccaaacctgtaccgagtgcgcgcaaccctgacggataagcaaggagtgatggataccgcagttgcccgtaccgggttacgcaagatagtgaagcagcctgacaacaagggctggctctttaatgacaaacgcctgtttatcaaagggagtaattacatcggctccccgtggcttagcaccatgacacgcaaaaaatatcgccgcgatttcaggctggtgcaggcaatgaacgccaacgcgatacgcgttcactcgcatgtggcaggccgggcactttacgatgtggctgacgaaatggggctgatgatctggcaggatgtccccctgcaatggggttacaataacagcgaggccttcgcggataatgccgcgcgacagacccgcgagatggttgaacagtttggtaattccccggccattatcgtctggggcggtcataacgagccgccatggaattcaccgtggatggaaaaacgctttcccgactggaataaaaacctgaaccagacgctgacgaaacgcgtcggagacgcgctttcgcaagatacctcgcgcatagtgcatcgtttttctgcggtggaagaacactactgggccggatggtactttggcaccatgcgcgatcttcttggccccgccaaaaccgcgatcatcacggagtttggcgctcaggcgctaccgcgactctcaaccctgaaaaccatcattcccgcccgcctgatgtggccgaaaagcaccgccgccgacgatcccggctggacgcactggaaataccataacttccagcccttccagacctttaaatttgccaatattccgcggggcaataccattcaggagatgattgccaacacccagcgttaccaggcagagctggtggcaatggcggcagagagctatcgtcggcagcgctaccagccggtaactgccctcttccactttatgtttgtagaaacctggccctccatcaactggggcgtcgtggattatctgcgtaagccgaaagcgggctactacgccctgcaaaaagcctatcagcctattctgccgtcgattgaacccgtgacggcggtgtggcgtcagggaagcgaagcaacggttcgcctgtgggcgatcaatgacacctggtccgcctgtgaggcgtgtcgtctgaagtggcaggtgaagcaaaatggtcgggtgctggctaaaggcaatacaagcctcacgcttccccccgattcgggcagcaggatcaaggacatcaccgtcacaccgaccaccaggcataacgttaccattgagtatgagatttcggatcgcgccggtaacaccgtgggttccaaccagcgcaatgagagagtggaaagccctcctgagcaatga

SEQ ID NO: 120494 - DNA, 168 bp, Enterobacter cloacae
atgccgctgccaatggtcgaggaagatttcgcagcgggaaaacgggttacgctgaacgtgcagatgcagcccgacgtcgggaccggtttttccatgcgggcagtgcacctggaagaacatgcgcccggccaggccagatgctggttcgttaacacgctgaaaggctga

SEQ ID NO: 120495 - DNA, 11424 bp, Enterobacter cloacae
atgagccaaatatctgttatatctaaattaactggcgtggaaacgaccacggaagggacacagataacactcgatcactcctcaatcgttaaacttaacgtggatcgcgccgacatctcaggttactcccgcagcggaaacgatctggtgattaccctcaactcgggcgaagtgattaccctcaagaatttctacgtcaccgacgcgcagggcgtgagccagctggtgcttgaggagagcgacggtgcgctgtggtggattgaagatccaaccggtgccgcaacctatgaatccatcgcctccaccgatgcattactggcggcgtcagggagtgatgccggcggcgccgctgcgtggccctgggtgctgggtggcctggccgccgcaggtgggattgccattgcggcgggaactggcggtggaggtggcggagatgacgataacaacagcccgaatcccggcaatccgggaaatccttccgagccagataccacgcctccggatgcccccaccaatctacaggtctcacctgacggcaaaaccgtcaccggtaccgctgagccgggcagcacgattaccctgaaagatgccgatggcaacaccatcggaacgggcaaggcgggcagcgacggaaaatttacgattgatctcggtacgccactcaccaacggggaacagatcaccgccaccgccaccgatccatccggcaataccagccagggcggtcaggttacggcaccggatctcaccgcaccggatgccccggccaatctggaggtctcccctgacggcaaaaccgtcaccggtaccgctgagccgggcagcaccgttaccctgaaagatgccgatggcaacaccatcggaacgggcaaagcgggtagcgacgggaaatttacgattgatctgggtacgcagctcaccaacggggaacagatcaccgctaccgccaccgatccgtccggcaataccagcccgggcgttcaggtaacggcaccggatttaaccgcgccggatgcaccggagattgtcaccgtcaatgataacgtaggcgccgaaacaggcccgctgagcaacggacaacgcacggacgatgcccgcccgaccttcagcggcatcagtgaagccggcaccgtcattaccttctatgacaacgggaaaccgattggcaccgccacagccgatgccaccgggaaatggagctttaccccgtcgaccaacctgtctgaaggcaaccacgccattaccaccaccgcgaccgatgccgcaggcaatactagcccggcgtccacggcggtaagcttcgtggtcgataccgtcgcgcctggcgcgccagcgatcgtcagcatcaccgatgatgttgcgcctggcaccggcacactcgggagtggaagcagcaccaacgacccacggccacagctcaccggtacggcggaagcgggctcgacggtcaccatctatgataacggcattgccattggcacagccgttgtgggcagtaacggaagctggagctttacgccgtcggtgaacctgagcgaaggcagccaccagcttaccgtgcgcgccaccgacgtcgccggtaacactggcccggcctcgccggtctttaccgtcacggtagatgtcaccgcgccgcaaacgccttccggatttatcattaacgacgacacgggcgtactgaaaggggcgatcggtgccgggcaatttaccgatgcttcagagccgcgcctgacgggcagaggcgaaccgggcagcacgatcacggtttacgataacggcgttgttatcggcaccaccaccgttctgccgaacggtacctggagcatcacgccgacgagtccactggcagaaggcgcacactcgattaccctgcgggaaaccgatgcggcaggcaaccagagcggtctgtctcagccgatcaactttaccgtcgatcttacgccgccagacatgccggttgcgacgctcaactccgcaggcacccagatcaccggtaccgccgagccgggcagtaaaatcgtcatcaccaacaatgccgggctgcaaatcgggaccgccactgccgacagcaacggcaactatgtcgtcaacctgaaccctgcgcagaccaacggtgagattatctccgtggtcgcctccgatgccgcaggcaaccagagctcaccggcgctggtcaacgcagcggatatcaccccacctgccgcaccgggcaacctggtggtggcggaagacggggccagcgtcagcggaaccgccgagccaaacagcacgattatcattaaagcgccggacggtacgatcatcggccaggccaccgccggcccggacggcaccttcaccatcccgatttcgccagcccagaccaacggcgaagcccttgaagtgacggccaccgacggcagcggtaacaccagcccgtctggctttgccgacgcgccagacagcaccccaccgctggcgccggaaaacgtggtgatctctgccgacggcaccaccgtaaccggtacagccgagccgggcagcaccgtcaccatccgtgaaaatggcgtgaaggtcggggaaacggtcgccgacgatcaggggaatttcagcgttgaactgatcccgccgaaagccaacggcgaagccctgaccgccgatgccaccgataccgccggaaacaccggcccgaccgcgccgtttgacgcgccggacatcaccgcggcacaaaccccagtcatcacgggcgtggtggatgatgccccaggcgtcaccggtcctgtcagccagaacggtctcaccaacgacaacacgccaaccatcaacggaacgggcgagcctggcaccaccatcaccctctacagcggtactaccgtgcttggcaccgcgctggtttcggcgaacggtcagtggtccatcacgctggaaaccgcgctaccggacggcgggcacgtgctgacggcgacggcggttgacgccaataataacctcagcgggacatcgaacacctggagcatcacggtggataccgccgcgccgggcgcgccggccattacgcaggtcattgatgacgtaccgggccgcacgggtgcgctcgacaccaatgaaactaccaacgacacgctcccgacgctgaacggtaccggtgagccgggctccaccgtgacgatccgcctggacggacaggatattggtactgccgttgttaacagcggtggcgcatggaccttcactcctgctaccccattagtgaacgggcagcatacgttcaccgtcgtcgcgagcgatgcggccggtaacgccagcgcaccatcagccggctttacccttaccgtcgataccaccccgccaccagcggccaccattgacaccgtctccgataacgtggggcccgtgcagcttccgcttaacagcggggacaccaccgacgacacgctgccgcagttgcagggaaccgcaccggacggcaccaccatcacgatctatgacggaaccaccctgctcggcacggcggtgctcgacggcagcggcggctggagctttacgccaaccacgccgctgacggacggcccgcactcgctgacggtccacgcaacggatgaggcgggtaacaccaccatctcgccgccgtttgaactggcgatcgacacgaccgcgcctgcaacgccggatattcctgagatcaccgtcaacccggacggcggcacgccggggacggctctgaatccaggggagaccacccgggataccacgccaaccctgagcggctcgggcacgccgggggatatcgtgaacatttacgatggcgctactaaaattggtgaagccgagatcgatggcgacggtaactggagctggacgccggatgatccgctccctgacggcacctacgatctctccctgacggtcactaaccaggacagcgccgggaacgaaagcgcgccgtccacgccggtgaccattaccattgatactgacgcgcctgcccaaccgggaaccccaacggtgacagacagcgtaagccagatcaccggacccgtgctggatggcgaatccaccaacgatccgcgtccggttctgagtggcaccggtacgccgaatgacgtcattaccatctatgaccaggtgggtacaggcgagccgcaggccgtgggcagcgttacggtggacggtaacggtaactggagctggcgtcctgagagcaacattggcgaagggacgcacgaatacacggcgaccgccaccgatgaagccgggaatgaatctgtgccatcagccggtatcacgataacggtcgataccctcgccccggatactccggttatcagtgccattggtggcgtgcagaatggcgagtctaccaacgacactacgccaggcatcggcggaaccggcaccaccggcgagacggtgatcatctacaacaacggcgtggaagtcgcgcgcgtagaggtcgtcaataatgaatggtcctataccctgccgacacaaaccgacggcccgctgaatatcaccgtcgccgcggtggacgatgccggtaacgttagcccggtaagtccggtctttacggtggaggttgatacgcaggcgccaaccgtgccgcaaattgacgccgtctctgacagccagctgaacaacagcgtgctttacacccgcgacggtacgccaaccctcaccgggattggcgagccgggttcgagcgtcaccgtctccgttgatggtgtcgcctcgccggtggtcgtggaggttcagccgaacgggacatggtcctggaccgccgaccctgcgctcaacgaggggccgcataccttctcagtggtcgcgagtgacgcggcggggaatacctccgccagctccggcgatctcagcgtgacggtggataccctgccgcctgcaacgccaacgaatatgaccattgccgcggagggcaccccgctgaccgggacggcggatgacggaaccacggtgacggttcgtgacgccaacggcaatatcatcgggaccggggtcgcgacgggaggctccttctccattgccctctccccggcccagttggatgccgcgacgctgacgctgatcgccacggaccccgcaggcaatgccagcccgtcaaccacctttgacgtgccggactccccgctcgatctgcctgcggtgccggtgattacggcgatcaacgatgacgtcgatcctgtcactggcgatgtgaaagataaaaccaccaatgacatcacgcctacccttaccggcaccgccgatccgggcagcgtgatcgccatttatcaggatggggtgctggttccgctgaccaacgttgttgcggatgcaaacggcaactggagctacacgcctctgttgccgctgacggaagggccacacaccttcgccgtgaccgctacaaacactaccaccggcgcgaccagcgggcagtcgcctgtcgcgaccgtcaccgtcgaccttaccgccccgacagcgccagccatcggtgcggtgaccgatgacgtaggtccgatcaccgggccaatcgccgacgggcagagcaccaacgacaaccgtcctaccctgaccgggacaggcacggccggggacaccattacggtgtacgatgacggcgacccgctgggcaccgttgttgtcggtccgactggcacctggagctacacgccgcctgcgctggacgacggcagccacaccctgaccgtgaccgccaccgatccggcaggcaatgagagcaccccgtcggccgggatcaccattgtggtcgacaccgtctccaccacgccggtgattaccagcgtgacggataacgcaggcaatgcggcaacgcctgttccaagcggcgatccaaccaacgacaccacgccaaccctgaccggtaccgctgagccgaacagcgtcgtcgccatttttgatggcaccacgcagattggtaccgtggcagcagacggtaccggcgtctggacatttactcctgaaaccgccctcggcgaagggacgcatgactttaccgtcagagccacggatccgcagggcaacgtcagccagccgtccaacgcctggagcgtcgaaatcgatcttactgcgccacaggtgccggcgatcgttacggtcagcgacaacgccccgggtggtgtaaccggcccgcttaccgccgggcaggtgaccaatgacaccacgccaaccctgagcggcaccggccaggcgggcaccactattcacgttctgaataacggcgtggagattggtaccactacggtcgacggcaacggtaactggacctttacgccggatccggtcctgacggacgggacgtataacctgcgcgtaaacgccagcgatgatgttggaaacgtctccgccaactcgccagtgttcgcctttacggtggataccactggccctgcggccccggtggtcaccacggtgatagacgatgtcagcccgggaacgggaatcatcgccagcaacggttccaccaacgacacccgtccaaccttcaacggtacgggggaagtgggcgcaacggtgcacgttattgtcgatgatgtggaaatcggcacggcggtcgtcaacgcccagggtaactggaccttcacgccgaccaccgcgctgggtgaagggccgcataccattacctttaacgccaccgatgccgcaggcaataccggagtcacctcgccaccgttcaacctgacggtggatacgtcggtgcccgaagcaccggtctttacccctgccaccgacaatgccggtcccgtgctgggcccggtcgcctcgggacaaagcacagacgacaccacgccaacgctgaacggcaccgcggcagccaacgcgaccatcaccatctatgagaatggtcagcaggtgggcaccgccgtggcggatgccaacggcgtatggagcttcaccaccggcacgctggcaaacggcagccacacctggaccgccacggcaaccgatgccgcgggcaacgtcagtcctgcctcaccaggctttacgctggttgtggatacgactgcgcctgccgcgccggttatcacccaggcgattgacgatgttggcaccatcaccggggcgattggctccggccagaccacgaacgatcctctcccgcgcctggtggggaccagcgagccgctggccaccgtgaatatctacgaaggcactacgctggtgggcaccggtactgccgatgctaacggcaactggaccgtggatatcaccgtgccgctgggcaccgggtcacacacctttaccgcagaagcaacggatcaggcggggaacaccggcgcgccgtccgccgacttcagcctgaccattgacaccacgccgccagcgctaccggtgctgaccagcatcaccgacgacgtcggtaatgctgcgacgcctgtcgccaacggcgggttaaccaacgatgcacgtccaacgctcaccggtacggcagaagccggcgcgacggtaaccatctacgacaatggggtacagattggcaccgcggtcgccaccggcggcgcgtggagctttacgccgtccaccccgctggctgacgggccgcataatctgaccttctccgccaccgacgccgtgggcaacgccagcgcacagaccgggggttacaccatcaatgtggatgccaccgcccctgtcgcaccggcaatcacctcgattgtggatgatgtgggaaccgtcaccggccctgtcaccggcaccaacccaaccaacgacacccgtccgaccttaaacggtacggcggaagccaatgccaccgtacgtatttacgacggcacgacgctggtgggaaccgtcactgccgatgccaacggcaactggacgctgccgcaaaccagcaccacgctgatcgaaggcgcgcatagcttcaccgccaccgccaccgatgccgcgggcaataccagcgcgccatcgccgattatcacgatcaacgttgacctgacgccgccagcagccccaaccgggctggcggtgatcaccaacgggacgcaggttaccggtacggcggaagcgggaagtaccgtcaccatcaccagcagcaccggaaccgtgcttggcacagccgttgcggacggcagcggaaacttcagcgccaccctcacccctccacagaccggcggggagtcactgattgtctttgctaccgataaggccggtaacgcgggtatcaccacctccgtgattgccccgatcaccacgatcccgaacgcgccggttatcgctaacatcgatgataacgtcggcacggtgacgggcaacctgaccaacgggaaaaccaccgatgacaccacgccaaccctgagcggcacggcgcagccgaacgcgaccatcaccctctataacaacggggtgctgatgggcacggtcaccgcgaatgccagcggcaactggagcttcaccacgccggtgctgagcgaagggccacatgccttcaccgccacggcgagcaacggctcgggcaccagcccgatttccacgtcgaccaccgtcattgtcgatctcactgcgccaacggctccaaccgggaccttcaacgcagacggcagcgtactgaccggtagcgccgaagcgggcagcaccgtcaccatccgtctggcggacaattcaacggtcaccgccacggcagacagcaacggatcctggagctacaccttcctcaataaacagacggaaggccagacgctgcaaatcaccgccaccgatgcggcagggaacgtctcgctgcccggctcagcccttgcgccggtggtgccgctctctgccagcaccaacgttgaagagctggcgctgacgaccaccgcaacggtgaccaactcgcagtacagcgactatggtttcctgctggtgggcgccgtaggtaacgtgctgacgctgctcggcaacgacaccgcgcaggtaggtttcaccgtcggcaacggcggcagtgcggatattgccgtgaacgccaacgccacgggtgccgttctttccctgctcaatacccttgagctggtggtacagcgctttgacgccgccaacaatacctggaccaccgtggtcgataccggacagccgcagttcgctgacctgctgaccctcggcgcgacgggggtgtcgctgaacctgaccggtctggcggatggtcagtatcgcgtcctgagctacaacactaacctgctggcaaccggctcttacaccagcctcgatgtggcggtgaaagagaccagcgcaggcaccgtgtccggcgaaaccaacattgtcggtaacgtcatcaccgacgtggatccaaccgcaggcagcgacaacgccccggcgggcaccaccgtcaccgcggtcaccaacgcccagggcaccaccaccagcgttacggctgacggcacagtgattcaggggcagtacggcacgctgaccatcaacctggacggcagctatacctataacctgaccaacaccagcgccgccgtcattggccgcacggagaactttacctacaccatcacccacaacggcaccagcgcctcggcaaatctggtgctgtcgctgggcgaaggcaccagcagcagcggtatcgtggccgtggacgataccgcctcgctgaccttcgataccaccgtggaggcgatcaacaacggcacctcgtcgcagggcggctttaccctggtggggatcaaccttggcaatacgctggggctgaacctgctggacgatctggccaacccgatcatctataacgtggaagaaggcaccacccgcaccatgaccgttcaggcgtccgtgggcggcgtcgcgctggcctcggtgttcgacctttacatctataagttcaacaatgcgacacagaccttcgagcagatgcgcgttgaacccggctggctgcgcgcgccgctgctgggcggcacctccccgcagctgacgctgaatctgcccgccggtgagtacctgttcctgctcaatacggcggcggggatcaccgcgctgacggcctacacgctgaacgtcttgcaggatcatgtctacagcgtggcaagcgtgagcgagagcaccaccggcgatgtgctggcggatgatattgcgccagcgggtaccgtagtctccgacgttaacggcgtggcggtgaacagcagcggtctgacggagatcaccggcgagtacggtacgctgcggatcaacgcggccggagagtacacctacaccctgaacagcggggtcggcgcggaccatatcagcacgccggataccttcgtttacaccatcaccgcgcctgacggctcgaaagacacggcatcgttgaacatcaccccaaccgcgcgcccaatggatgcggtaaacgatgtcagcaccgcgatggacgtcacgtcggttcaccatacggccgcctattccgatacgacggtcgggtcggcgagctggaacgctgcgctgcttgcctcaacccagggcagcgggagcgggaccttcgtggtggatcctaataccgcgctgcataacgtggttctgtcgtttaacgtcgcctcgctgctgacgcttaccgggttaacggtggactggacgctgtccaacggcgcaaccaccgtcagaaccggctcgtttaacggtgggttactgctgggcggcacggcgaccatcaacctgacgggtctcgatctggaggcgggaacctatacgctgagctatacgggcaaaatggggccattgggggtaggaaatatcaccatcaccccaagcgtgaccggcaccagctactcgctgtcgcagttcgacgcgacgggtacccacaccgttgacggcaatatcttcgacggcaccgactccgcaggggcgatggaccagctccactcggttgatacccgcgtgagcattaccggctacgacggcgttaccactacgctggatccgtacaccggcagcacgatgtcaaacatcacgggccactacgggacgctggcgattgccgctgacggcagttacacctacaccctcaacccgggtatttcgctctctaccattaccagcaaggaggtctttaactacacactgaccgatgccaacggtgttaaagataccgcgtcgctgaccattgacatggcgccgaaatttgtcagttcggagcataacgatgtgattagcggtacggcctacggcgacacgttgatttatcaggtgttgaacaacacggcgggtaacgccaccgcaggtaacagcacgggcgaccactggacgaacttctccctcacgcagggagacaaggtcgacattggcgatctgctggtggggtggaacggtagcgcgtcgacgctggggaactatgtctctgtttcacaaagcggtaacaatactgtgatctccatcgaccgtgacggcacgggagccgcctacactaaatctacactcgttacgctggacaatgttcagaccacctacgacgagcttgtaaaccagcaacacatcattacctga

SEQ ID NO: 120496 - DNA, 1404 bp, Enterobacter cloacae
atgggaaagaagatgccttactggtggctctcgtgctgcctgatatctgtgcccgctatcgcggcaaaccctgcggcgatgattaataccggacaattaagcgaaacgcaggaactcccctctttaaatggccgcgtggcgcccgtagccagcaaagccgcccccggcacgctacagctgaatgaagcggttaaccgcgccgtgacctggcatccggccatcagtgaagccgtcggcaaactttatcagcagagcgaaaatgtggacgtcgctaaatcgaaatattatccgcaaattaacgctggcatggataacggctatagccacgacggcgacgataatggctttaccccctcgctggtgctttctctttcgcaaatgctgtacgacttcggcaaagtcgcaagccaggtgcgcgccgaaaacgcgggcgtcgcccagcagcaggccaacgtgctggtgagcatcgacaccatcgcccacgataccgccatcgccatggtgcaggtgcagacctggcagcagatggtcgagaccgccaaagaacagctggatgccctgtcctccatcggcaccctgacgaaacaacgtaatgatgaaggcgcaacgtcactctctgacgtggtgcagaccgatgcccgtatcgaaggggcgcgtgcgcagctgatgcagtatcaggcgagcctcgacagctcgcgcgccacgctgatgagcttgctgggctgggacagcctgaacgcggtcagcaatgactttccgcaaagcctggcccgcagctgcgacatcgccgagccggacgatcgtctggtgccctcggtattagcggcctgggcgcaggccaacgtcgcgcaggcaaatctcgattatgccaacgcgcaaatgacccctaccgtttctctggagccggaagttcgtcactacctgaacgaccgctacgcgggcaacgaaacgcgggaccgcacccagtactccgcgtgggttaaagtgcaaatgccgctctatcagggtggcggcctcaccgcccggcgtaacgccgccggacacgcggtggaatccgcccagtccaccatccagcgcacccgtcttgaggtgcggcaaaaactgctggaagcgcgcagccaggtgatgagcctgatgagcacgcttcagatccagggccgtcaggaagcgctcagcgcccgcacccgcgagctgtatcagcagcagtatctcgatcttggttcccgcccgctgctcgacgtgctcaacgccgagcaggaggtgtatcaggcgcgctttacccaacagcaaaccgccggacagctgcatcagcttcagctcaactgtctgtacaacaccgggcgcctgcgtcacgcgttcgatcttgaaaaccgcaccatccagaccgtggagatccagccatga

SEQ ID NO: 120497 - DNA, 2193 bp, Enterobacter cloacae
atgaagcaacgcgatatcccgcagggtgaaaacatgacggatcaggcgctagagcagtgggcgcaggcgtttggctacgtggcgacgcgctatcgcgttgcctgctcgccaggctcgctcgtcgcaggcgcgccgtggctgaaaggcaaaccgatggtgcccgcgctgacgcagctcgcccgtgaagccgggctgacattccagttgctgacggccgatcagcacgctatcaacagctggcgtctgccggtggtggtggagctgaacgacggtaaaatcggcgtcatcgacaatttcgacggcgaggatacgcttgaggtcagctttttcgacgacagcacgcacaccaaccgcctgtcgatgagcgcgatgctgcctgccatccgccacgtcatcgccctgcgtccgctggcggcgctgaaggacagccgcgtggatgcctatatatcaaaataccgcccggactggctctaccggctggtgatgcgcgaccttcgcccttacagctgggtgatgctggctgcactgttcattaacgtgctttccctctcgggcatcgtcttttccatgcaggtgtatgaccgggtgatccccgcccagtcctatccgacgctctatgtgctgactatcggggtgctgatcgccacgctgtttggctttgtgctgcgcgtggcgcgcggacacattatggatctgctgggcaaacgctcggatctgcgcgtctcggatcgggtgttcggccacgcgctgcggctgcgccacagcgccattccgcgatccaccggcagctttatctcccagttgcgcgagctggagcagatccgcgagatggtcacctcctccaccatctccaccatcgtcgatctgccgttttttatcctgtttgtgattgtgctggcgatcatcgccccgcagctggcgtggatcgctccggtggcggcggtgatcatggtcctgcctggcctgctgctgcaaaagaagctggcggagctggcgaagcagtcggcgcatgaatcaaccctgcgcaacgcggtgctggtggaaagcgtgcaggggctggaggacatcaagctgatgcaggcagagaaccgctttttgcagcagtggaacagctatatccagatcaccgccgaatccggcctgcgcacccgcgaactgacgcagaacctgatcagctgggggatgaccattcagagcctggtctatgccggggtgatcgtggtgggcgcgccgatggtgatcgacggcaccttaaccaccggttcggtggtggccgcctcgatgctcgcctcacggatgatcgccccgatggcgacgctatgcggcgtgctggcccgctggcagcaggtgaaggcggccaaagaggggctggacagcattatgcagctgccgaccgagaaccagcgcgaagagacaccgatccgccaggacgtgctgcgcggccactatcttttcgagcaggcgcagttccgctatcacccggaagatccccgcatggcgctgcgcattaaccgcctggagatcaaagcgggcgaaaaagtggcgatcctcgggcgcaacggcgcgggcaaatcaaccctgttgcaggcgatggcgggcgggatggatctggcgggcggtgaactgcggctcgacaacctcagcctgccgcatctggacgtggctgacgtgcggagaaacgtcggctttatgacccaaaacgcccggctgttttacggcaccctgcgcgagaacatcacgctcggcatgccgcgcgccaccgataaagagatcttcgaggtgctggagatgtgcggcgcggccagctttgtgcagaagctgccaaaggggctggattacccgattatggagaacggcgtcgggctgtccggcgggcagcggcagtctattctgctggcgcggatgctgctgcgcgacccgaatatcgtgctgatggatgaaccgaccgcctcccttgatgaacataccgagcgggaatttattcaacgtctcggggcgtggctcggcaaccgcacgctggttgtcgcgacccaccgcgtgccggtgctggagctggtggagcgcgtggtggtactcaaagatggcatgctggtgatggacgcgccaaaagcccaggcgctgaacaacagccgtatgcagcaacagcagcaggcaaccggacgggagtggaaaaatgaaaatcagtcagcgtga

SEQ ID NO: 120498 - DNA, 1200 bp, Enterobacter cloacae
atgaaaatcagtcagcgtgacgttgccgcagtagaagatctggataacgcgctcgactccgaaagcggttataccggcgcccggcgcatcgttttcttctccctggtgatgtttgtggtgctcggcgtctgggcgtggttcggcgtgctggacgaagtctcaaccggcaccggaaaagtgatccccagctcacgcgagcaggtgttgcagtcgctggatggggggatcctcaccgagctgaacgtgcacgaaggggatcaggtgcaggccggacaggtgctggcgcggctggatcctacccgctcggaatctaatgtcggcgaaagcgcggcgcgttaccgcgcgtcgctggcctccagcgcgcgtctgtatgccgaggtgaacgatctgccgctcaaattcccgccgtccctggcgaaatggaccgacctgaccgccgccgaaacgcggctctacaactcgcggcgcgcccagctggaggacacgcagcgtgagctgcgctccgccctggcgctcgccaataaagagctggcgatcacccagcggctggtgaaaaccggggccgccagccacgtggaagtgctgcgcctgcaacggcagaaaagcgacctggagctgaagctcaccgacgtccgttcccagtattacgtgcaggcccgtgaagcgctgtcgaaggccaacgccgaggtggatatggtgtcagcgatcctgaaaggccgcgaggattccgttacccgtctgacggtgaagtctccggtgcgcgggatcgtgaaaaacatcaaggtcaccaccatcggcggcgtgatcccgcccaacggcgagctgatggaaattgtgccggtggacgatcatctgctgattgaaacccgcctctcgccgcgggatatcgcctttatccaccctaatcaggaggcgctggtgaaaatcactgcctacgattacgcgatttacggtgggctgcacggggtggtggagaccatttcgccggacaccattcaggacgaagcgaagccggaggtgttctattaccgggtatttatccgtaccagccaggattatctggtgaataaggcgggcaggcacttctcgattgtgccggggatgatagcgacggtggatattaagaccggagagaaaacggtgctggattatatgatcaaaccgtttaaccgggcgaaggaggcgctgagggagcggtag

SEQ ID NO: 120499 - DNA, 1182 bp, Enterobacter cloacae
atgtctgcaaacaaactcgccagcagcgcgcagggcctgcaatcctctgccatccgtgaattattaaaacatagcaaaatggcaggcgtgatttcgctgggtggcggtattccaaatccagacctgttcgatcatgaaggtttaaaaatcgccgctgatgccgtgctgtctcagcattttggcgaagcgttccagtacggtctgacggaaggcgtcccggggctgcgcgaagagatccaacgcatctgtgaaggtcgcggcatcgcctgtaaagccgatgacgtggtcattacttccggctcgcaacagtcgcttgacgtgctggcgcgggcgttaatcaacccgggcgatacggtcgtcgtggagcggcctacctacctcgccgcgttgcaggtctttggcctggcgcaggcgaaatttgaatccgtcggtaccgacggcgacggcatgaaagtggatgaacttgaagcgctggtggcaactaaaaccatcaaagcggtttatatcgtgccaacctttggtaacccgggcggcgtgacgctctccgaagcgcgtcgtaaacagctggtggaattatcgaagcgctatgacttcgtgattatcgaagacgacccgtacagcgagatcaactacaccgacgaagcgttccgcccgctgattgctcatgccaaagatatcggcaatgaggataacgtggtgtacacctccaccttctctaaaatcctcgcgccgggcacccgcgtgggctgggtgctggtgccggagtggctaaagcgcgcggtagtgaacctcaagcaaaccaccgatctgcacaccagcacgctgtcgcagctgatgacgtacgaatatctgaaaaccggtcgtctggcgaatcagattaaaatgatccgcgaagcctatcgccagaaataccagacctttgccagtgaactggaagcggagctgggcgatgtgatgtcgttccacaagccaaagggcggcatgttcctgtgggcgaaaatgaataacggcatcaatacgacgaaatggctggaaaaaacgttgagcaacggcgtcgtgtttgtgccgggtgagttcttctactgcaacgagccggaccacaccacgctgcgcatgtctttcgttaccccaacggatgagcagcttaaagaagcggttcgacgcctgagaatttccctgtaa

SEQ ID NO: 120500 - DNA, 732 bp, Enterobacter cloacae
atggcacaaaacatctacgacaacccggcattttttgaaggctatgcccagcttccgcgctcggttcagggcctgaacggcgcgccggagtggcccgcgctcaaggcaatgctgccagatttaaccggtaaagcggttgtcgatctcggctgcggctacggatggttctgtcgcgcagcgcgcgagctgggcgcgtctgacgtcacgggtgttgatatttcagaaaaaatgctcgcccgcgcggctgaactgactgatgacaatcggattcactatcagcgtagcgatctggaatctctggcgctgaaagcgaatagcctcgatctggtctacagctcgctggcgctacactacctgccggagctggacacgctattcgccaacgttcagcgcgcgctaaaacccggtggcagcctggtcttctcgatggagcacccgatttatacctgcgccacccgtcagggctggctgaccgacgacagcggcgagcggttctggggcgtgaatcattatcaggacgaaagccagcgcgtcagcaactggctggcggactgggtgattaaataccaccgcacgctgggcaccacgcttaacgcactgatcaaggccggattgacgataagcgaagtcaatgagtggggaccaacgcagacgcaggttgacgcctggcccgcgctggccgaagaggcggaacgcccgatgctggtgctgatcgccgcccgtaaggcttaa

SEQ ID NO: 120501 - DNA, 999 bp, Enterobacter cloacae
atgagccagaccacggagaaaaaaccgcgtttaaccacgtcggcgatgattgcctctatcgcggaagagggccaggagacgcgagccgcaccgttcggccaagcgctggtgaagctggcggaacagcgaccggagatcgtcggcatgacggcggatctgtcgaagtacaccgatctgcatattttcgctcaggcctacccggaacgcttctttcagatgggcatggccgagcagttgttaatgggggccgcgggcggcatggcgaaagagggttttattcctttcgccaccacctatgccgtcttcgctacccgccgcgcctacgactttatccatcaggtgattgctgaagagcacctgaacgtgaagatctgtgcggcgctgccggggctaaccaccggttacgggccgagccaccaggcgacggaagatattgcgattatgcgcggtattccgggcatgacgattatcgatccctgtgacgcaatcgacacggaacaggcggtgccggcgatggcagcgcacgatggccctgtctatatgcgcctgctgcgcggcaaggtgccggtggtgctggaccagtacaactaccagtttaagattggcaaagctgcgctgctggaagaggggaacgatgtcctgatcgtcgcctcaggcctgatgaccatgcgtgcgctggaggcggcgaagcagctgcgtaaggataacgtcagcgtggcggtgctgcactcgcccaccattaagccgctggacgaagagacgatcctggcgcaggctgcgaagccgggacggctggtcatcgtggcggaaaaccacagcagcgtaggcgggttgtgcgaagccgtcgcgtcgctgttgatgcgcaaccgcgtgaacgtggatttcgataccgtcgcgctgccggacgcgttccttgatgcgggcgcgttgcccaccctccatgaccgctacgggatctcaaccacagccatggtggagaaaatccggcgcaggctgtga

SEQ ID NO: 120502 - DNA, 846 bp, Enterobacter cloacae
atgacggataccacagttcaacaggttgccgccgcggcctggcgcattcgccgctacgcgctgcgcatgggcgaagtgcaggggcagggctacatcgggcaggcgctgggctatgccgatgtgctggccaccgcgtttgcccacgggatgaaccttaagccgggcgagccggagtgggaggggcgtgaccgttttttgctctctcacggccactacgccattgcctgttacgccgccctgattgaagcggggatcgttcctgaagaggagctggagacctacggcgcggacgacagccgcctgccgatgtccggcatggcaacctacacgccgggcatggagatctccggcggttcgctggggcagggcttaagcattggcgttggcatggcgctggggctgaagcgcaagcagagcgcggcatgggtcgttaactccatgtcggacggcgagctggacgaagggtcaacctgggaagctgcgatgtcggcggcacatcacggcctgtcgaacctgatcgtgctggtggacattaaccgccagcaggcggatggcaactcgcacgcgatcctcggctttgagccgctggaagataaatggacctccttcggctggtacgtgcagcgcgtcaacggcaacgatgtcccttcactggtaacggcgtttgataacgccaaacgctacccggaaaaccagccgcgcgtcattttgtgcgacacgctgatgggcaagggcgtgccgttcctcgaaaagcgtgacaagaaccattttattcgcgtggatgctgacgagtggcaaaaggcactcgctgtgctggatgccaacaaacctgaaggagtgctgtaa

SEQ ID NO: 120503 - DNA, 750 bp, Enterobacter cloacae
atgctactgaaaaataaagtcgccgttattaccggcgcggcttccgtacgcggtttgggtttcgctacggcgaaattatatgctgaacagggtgcgaaagtggtgattatcgatttaaacgctgaagccagccgggctgccgccgcgagccttggcgacgaacatctgggccttgcggcgaacgtcagcaatgaattacaggttaatgccgccattgagcaggtgctggggaaatacgggcgcatcgatattctggtgaataacgccggcataactcagccgatcaagctgatggatatcaaacgcgaaaattacgatgcggtgcttgacgtcagcctgcgcggcacgctgctaatgtcccaggcggttattcccactatgcgcgcgcaaaagtcgggcagcatcgtctgcatttcatcggtatcggcccagcgcggcggcggcatctttggcggcccacactacagcgctgcaaaagcgggtgtgctggggctggcaaaagccatggcgcgtgagctggggcccgacaatgtgcgcgtaaactgcatcacgccgggtcttatccagacggacattaccgcaggcaagctgagcgatgagatgaaaacgtccattctggcgggcattccgcttaaccgcctcggagacgcgcaggatattgcccgcgccgcgctgttcctcggcagcgacctctcttcttactccaccggtatcacgctcgacgtgaacggcgggatgctgatccattaa

SEQ ID NO: 120504 - DNA, 1332 bp, Enterobacter cloacae
atgtctcgtatagaacaagctgtcccctacataaagactaaaaaaaccaattaccgtttcgttgtgctggcattaatttttattgtttatgccattaactatgctgaccgaacaaatattggtgcagtactgccgtttatcattgacgaatttcatatcaataatttcgaagccggtgccatcgccagcatgttttttttgggatacgccctgagccaaattcctgcgggcttttttattgccaaaaagggaattcgcggcatggtggcactgtcgatattcggcttctctgcctttacctggctgatgggcaccgcaacctcggttctgggcctgaagtgtatccgcctggggctggggttaacagaggggccgtgcccggtcgggctggcctccaccatcaataactggtttccgccaaaggagaaggccacggccacgggcgtctacatcgccgccaccatgttcgcgcccatcctcgtgccgccgctggcagtgtggatcgccatgacctggggctggcgctgggtcttcttctcctttgcgatcccaggattggtcattgccgtcctgtggtatctgctggtacgcaccaggccgtccgagagcgcattcgtctcgaaagcggagctggagaccattaccgccggtcaggagaccccggacgccagacgggaaaatatcgtgatttcaccaggctttgcacgcctcgatcggctgatccgcgtgcgggaattagccccggtaagcacggtgaaagggctgtttacctcgaagaatattctcggcgactgcctggcctattttatgatggtcagcgtgctgtacggactgttgacgtggatcccgctctatctggtgaaagagaaaggctttacgtttatgagcatggggctggtcgccagcatgccgtgcatcggtggatttatcggtgcgatttttggcggctacgtctccgacaaactgctcggccgccgacgtaaaccgaccatgatgtttaccgccatcagcaccgttttaatgatggttattatgctgaatattccgcaaagcaccgtcgcggtttgcgtcgggttattttttgtcggcctctgtctgaatatcggctggcccgcttttacggcttatggaatggctgttgcggacagtaaaacctatccgattgccgcgtccattatcaatagcggcggtaatctcggcggatttgtttccccgatgctggcaggttatctgctggataaaacaggtagttttaattccgtgtttatttatttcggtatttgcgcagccattggcttaataatgattatgctgctggaagagccgaaataa

SEQ ID NO: 120505 - DNA, 921 bp, Enterobacter cloacae
atgtccgcgcaggatcgccagacgttatcgctgccctcgctcagaaatttgcaggcgtttatcgccgttgctaacgccctgagcatccatcaggcggcggaacagctcaacgtcacgccttcggcggtaagccaccagatcgcgtcgctggaatcgtggctgggcaagaaattatttatccgcagcggcaaaggggttcaactcaccccgacgggagaaaaatatctgcgggaggtctcggcggcgatgagcgccatcgggcgcgccaccgatcaaatcgtgaaagaaaaagacaatgctgtgcttcgcgtgcactcttcccccaccttcgggctgtcctggctgttgcgccgtctgggcagattccgcgccgaatatcctgatatcaccatcaatctcacctgctcctatgagaacctacagttcgccagagataatatcgacattgatatccgtcacggtattccggactgggacgcctaccgggtgatgaccattaaaaacgacacgctggtggtattggcctcgccggactatgcagaagagcatcccatcagcacgcccgccgatctgctgcaacagtcgcttatctcgtccaccagcactctcgtgaactgggagaaatggttcgcctggcacaatatcgacaggccctggcttaatttcagcctcagcttcgaccgctcctacatgagctttgaagcggcgcgcatggggcttgggtttattctggagagcaaaatgatggctaccgatcacctgaaggatggctcgctggtgcaggtgctgcctgatgaaatgggtatcgccatcaacgcgcaccatctggtgatgccgcacatgaacgaacgcgcgtggaagatccagcagttcgtcgagtggattgaccgtgagttgcgattgtcggggtatcacctgtag

SEQ ID NO: 120506 - DNA, 1581 bp, Enterobacter cloacae
atgaaaaacatgaaactggagtggaaaagaggtgactgggcagcttatttcgggttgatgaccaacaacctgaccaatttgctgaccatgatggggctgctcatttttgtcgtcggcatcccgaaggagattgtttatggacgcatcgcgccagccttcgggctggcggtgctggtggcgagtctttgctatacgtggtttggcctgcaaatggcgcgcgctaccggacgaacggacgtcaccgcgttgccgtccggcccgagcgcgccgtcgatttttaccgtgaccttcctggtcttaatgccggtttaccagcaaaccggcgatgcggatttcgcgattcagattggcctggtgtggtgctttgtggaagcaatgatcctcgcaggcggttccttcctgggtgagaccattcgcaagatgatcccgcgtaccgtgctgctgtcgtgcctgtccggtcttggcttgctgctgctggcgatgaacccgatgttgcaggcgttcgaagcgccgaccgtatcgtttatcgtcctgctgctgatcttcattaactggttcggtaaaaagccgattttcgcccgtatcccgaccggcctgctgttgttaattgccggtactctacttgcgtggatctccggcctgcaaagcccggatgccattaaagcgtccatgtcatccttcggctttaacccgccggaagtgcacgtggacagctttatgcaggggctgccgcacgcgctgccttatctggcgtccgccgtaccgctggggctggcaaactacatctttgacctggagaacatcgaaagcgcccacgcggcgggggatgaatacccgacccgcaaggtaatgctggcgaacggtctggcctcgatgctcggctgcctgatgggcaatccgttcccggtcacggtctacgtcggccatcctggctggaaagcgatgggcgccagcatcggctacaccctggcgtccggcgtgaccatgttcatcgtgccgctgttcgggctgggggcctttatgctcgccatcataccgatgaccgccatcgtgccgattctggtgtttatcggcgtcgtcaccgccaaccaggtggtgagggaaacgccgaaagtggaagtgccggtgatcttcatctgcctgttcccgtggatcgccaactgggcgcttaccatgatgaacagcgtgatgagcgccgcggggaccagcgcggcgaaaattggcaccgacgtgctgcacagcaaggggatctactacgaaggcttgatgcatctcggcaacggcgcgccgctcgccagcatgctctggggctgtatcgccatcttcgccattatcaacaaaccgctgcgcggggccgtcgccgccgcaggaggcgcgctgctggcgctgtttggcgtgatccacgccccggtggtgggctttgccgagggcagttccctgatgtttgtcacggcctacctgatgatgggcgggatgtttgtggtgaagcatgtgctggatacctctgttaatccccctctccctgtgggagagggccggggtgagggcaccagaacgcaccttctaaaggaaacaaaatga

SEQ ID NO: 120507 - DNA, 999 bp, Enterobacter cloacae
atgaaaaaggttctctgcgcgttaggcctggcggttgcatcaatgagtacagctctggctaccacgtacccgctcacgatagaaaactgcgggtataaagaaaccttcaccaaagcgccggaacgcgttgtggccctggggcagaataccgtcgagatcctgcttctgctgggtctggaagataaggtgaaagccagcgcgttctggccgaccaaagtattgccgcagctggctgagcagaatgcaaaaatcaaaaccctgaccgtcgaaattccgacacttgaatccattcttgcgcaaaaccctgattttgttcctgcacagctgccgctgctgctcgggcctgaaagtaaggtcgcaaagcgtgaagatctggccaccgttggggtaaacagctacttgtccccgggcatgtgcgccactaaaaaagccgcaggcgacatgtacggcagccgccagacgctgtgggacatgacctacctttatcaagagattgaggatttcgccaagattttcaacgtggaagcgcgcggtcaggccgttatcgccgacttcaaaaaacgtgaagccgacctgcgccaagagtttggcaaaaacaacaaagacctctcctttgttttctggttctcaagctcctcaccttcggctgatgcctatgtcggcggcaaaaacagcgcctctggctttattgctaacgtgctgggcggccataacgccattacctctgagaccgaatggccgaccgtgggctgggaaagtattattgccgctaatccggacgtgattgtggtctccagcctggatcgtaaccgctgggcgctggacaacgccgaagaaaaaatcaaattcctgaaaagcgatccagccgtcagccagatggaggcggtgaagaagggtcatattgtggtgatggacggccaggccatgaacccgacgattcgcacgctttacggtgctgagcaggtcggcgaacagctcagaaaactgggactggactga

SEQ ID NO: 120508 - DNA, 1038 bp, Enterobacter cloacae
atgaccaccgccgtacttcagatgcggcagggggtgctcctgaccacgtcatgcctgctcgccttcgtgctgttgtttctggtgatcgcccttggcgtcagcatcggtgagttgtctatcccgctcaataacgtgttctacgccatcagcaataagctggggctgactgacgttccgctcaaccgcatctacgagagcgtcatctgggactttcgcctcagccgcgcgctggtggcggcctgctgcggagccgggttggccatctgcggggccgtattgcagagccttttgaagaatgcgctggcggaaccttacgtgctcggcgtgtcggcgggagcgtcaaccggggcggtgtcagtcgtcgtattgggtctcggcaccggcgcagtatcgctttctgcgggcgcgtttgccggagccttcgccgcctttgccttcgtcgccttcctgaccaacggcgcgcgcggcggcaatgaacgcacgatcctggcgggcgtagcggcctctcagctgtttaacgccattaccgcctataccatcagcacctctgccagcgcgcaacaggcgcgcgacgtgatgttctggctgctgggcagctttagcggcgtacgctggccggaattccagctggcgctggtagtggtactggcggggctggccgtctgtctttattattcccgtgcgctggacgcctttacgttcggtgatgatgccgccgcctcgttgggcattgccgtgccctgggtgcgcctggccttgtttaccaccaccgccctgatcaccgcgaccatcgtcagcatggcgggctctattggttttgtcgggctggtcgtgccgcacgttatgcgtttcctgttcgggccgctgcaccgcacgctgctgatagccagcgcgctggcgggggcgatcctgatggtgctggccgacatcgcctcgcggatgctgattgctccgcaaagcctgccggttggcgtcgttaccgcactggtgggcgtaccgttcttcgccgtgattatctaccgctcaaggaataagtaa

SEQ ID NO: 120509 - DNA, 762 bp, Enterobacter cloacae
atgagcatctgcgccgagaaaatcacctggaaggtaggtaaaaagatcattgtgaatcatgtttcgctgaaggtttcccggggcgaaacggtgggcctgcttggccctaacggctgcggtaaatcctcgctgttgcgcatactggcaggtctgcgccgcccggatgccgggtgcgtgacgctggacggacaggacattgcccgcattgccaaaaagcagctggcgcggcgcgtggcgtttgttgaacagcacggaatgaccgacgccaatatgcgcgtgcgtgacgtcgtcaaactggggcgaattccgcaccattctcccttctcaaactggagcgcgcaggatgacgaaaccgtcaccgccgccctgcaacgcgtggatatgctggatcgcagcgaacagggctggctgagcttatccggcggcgagcgtcagcgggtacatatcgcccgcgcgctggcgcaaacgcccaccgagatcctgctggatgaaccgaccaaccatctggacattcatcatcagatgcagctcatgcagcttatcagtgagctgccggtaaccagcatcgtggccattcacgatcttaaccacgcatccatgttctgcgattcgctgattgtgatgcagcaagggcagattgtggcgaccggaacgccgcaggaaatcttatccgaggaactactctgggacgtcttcagggtgaaaaccagaatcgagatctcgccgtaccacggcaaaaaacacatccattttatcgtgtag

SEQ ID NO: 120510 - DNA, 1221 bp, Enterobacter cloacae
atgcctcttcgcactgccaccacgctctggccgcccgttctgctgggcagccagttcgtgtttaacattggcttttacgcggtcgttcccttcctcgcgatcttcttgcgtgacgatatgctgctctccggcgggctgattgggctggtgcttgggctgcgcaccttttcccagcaggggatgtttattgttggcggcgcgctttcagaccggtttggcgcgaagagcgtgatcctcagcggctgcatcgtccgcgtggtgggttatttactgctggcctttgggcaatccctgtggcccgtcattctgggggcctgtctgacgggcgttggcggcgcgctgttctcaccgtcgatagaggccctgctggcaaaagcgggaacgcaaagtgaggcaaagggtaaacgcagccgcgcggagtggtttgcgctgtttgcggtgtgcggtgaacttggcgccgttcttggcccggtgatgggtgcgctgctgacggggctgggtttccgccaggttgcgctcgcgggggcgggaatatttatcgttgcgctcgtggtgctctttttctgcctgcccgcggcgcaccgcagcacgaagccgctgaaaattctgccctggtggacgacgttccgccagccgcgtttcgtcgcctttatcatcgcctacagttcgtggctgttaagctataaccagctctatctggcgctgccggtggagatccaacgcgccggcgggaacgaaaaagatctggggccgctgtttatgctggcctcggtgctgattattgttctgcagctgccccttgcccgtttcgcccgaaacgtcggcgcggtccggatcttaccggtgggctttttgctgctttccgcctcgtttgcaagcgtggcgctctttgccgcgacggagccgccggagggctggctgcgcctgctgccctctgcaagccttgtcacgctgctgacgctcggacaaatgctgctggtgccgtcggctaaagatttgatcccgcgctttgccgaggagtcaacgcttggagcgcactatggcgcactctcaaccgccggcggcatcgcggtgctggtggggaatttaggtttaggcagcctgctggacaaggcgctggtgccctcgacggaggccatttacccgtggctgctgctggcggtgtttccactgtgcagcgcggtcgcgctgagcgtgatttgtcgtccactgcggcgctga

SEQ ID NO: 120511 - DNA, 1428 bp, Enterobacter cloacae
atggcatttgatgatttgagaagcttcttgcaggcgctcgatgagcaagggcaactgctgaaaattgaggaagaggttaacgccgagccggatctggcggcggccgccaacgcgaccggacgcatcggtgacggtgcgcctgcgctgtggttcgataatattcgcggcttcaccgatgcccgtgtggtgatgaacactatcggctcgtggcaaaaccatgctatttcgatggggctgccagcgaataccccggtgaaaaaacagatcgacgagtttattcgtcgctgggacaaattccccgtctcgccagagcgtcgtgcaaatccggcctgggcgcagaacacggtggacggggaagacatcaacctgttcgacattctgccgctgttccgcctgaacgacggtgacggaggcttttatctcgataaagcgtgcgttgtctcccgcgatccgctcgaccccgatcacttcggcaaacagaacgtcgggatctaccgtatggaagtgaagggcaagcgtaagctcggcctgcaaccggtgccgatgcatgatatcgcgctgcatctgcataaggcagaagagcgcggcgaagacctgcctattgccattacgctgggtaacgatccgatcatcaccctgatgggcgccacgccgctgaaatacgatcaatccgagtatgagatggccggtgcgctacgcgaaagcccgtatccgattgcgacggctccgctgaccggtttcgatgtgccgtgggggtcggaagtgatcctcgaaggggtgattgaaggccggaaacgtgaaattgaagggccattcggtgagtttaccggacactactccggcgggcgcaacatgacggtcgtacgcattgataaagtctcttaccgcaccaaacccattttcgaatccctttacctcggcatgccgtggaccgagattgattatctgatggggcccgccacctgcgtaccgctctatcagcagctaaagtcggaattcccggaagtgcaggcggtaaacgccatgtacacccacggtctgctggcgattatctccactaaaaagcgttacggcggttttgcccgtgcggtcggcctccgcgccatgaccacgccacacggtctgggttacgtgaaaatggtgattatggtggatgaagacgtcgatccgtttaacctgccgcaggtgatgtgggcgctgtcatcaaaggtcaatccggcaggcgatctggtgcagctaccgaatatgtcagtgctcgagcttgaccccggctccagcccggcggggatcactgacaagctgatcattgatgccaccaccccggttgccccggacaaccgtggtcactacagccagccggtacaggatctccctgaaaccaaagcctgggccgaaaaactgaccgcgatgctggcggcacgtcaataa

SEQ ID NO: 120512 - DNA, 1995 bp, Enterobacter cloacae
atgcatatttcccctcctattttattaccatattccccgaatggcattttcagcgactgggtttttcagtgcatgcctgtcgatactgcacgtaattatcccgtaaatcctgtgggtgcatggcacgggggcatacatattcctcatacagatatttccagtgcacaggccaaccccatccgggcaattgctgacggtactattatttatgccaggtctccatccgaaaacaaagataaaaagccactggcttataatgggaaaacggacgatgggtgtgtactgatccgacataagatattgattggcgaagatcctgtcgagtttgttttttattcgttgaccatgcacctgaagcaggttcgatttgaaattttgtctaatattggacagcgtataaaacgtgagcaagtcttaggtacgtcgggtgtcgtggatggaaaaaatgcattccacttccagatttgttgcgagcaaaaaatgctcgatgtactgtgtggtcgaattgatggagggataaatattgcgttaccgggaagggtaaagcctgtatacggtagtgagtactattatttcccagcgggtactcctgtttatggggatattcctaaaggttttgtgcacgctccagcgaaccttacgacggaagatttatatattatcaacagtgggggagatacaaaaacgctgcgaaaaaaaaatgatggtttctatgaccacatcggcagtgttgctgtgggcgtcaattatatcagcgaagcatcaggggttgattccctgaaaaatgccatgggatacagtcagtgggttaagattgcgatccctggtggaagtgggtgggtcgatgtctgtactaataatataatgacttacagcgaggccgaactacctgactgggcaggatggtctctgattgatgacgacgcatccagcgatagccagtgtaattcaaaaattataaaaaagttatatgcagaaaaaaagaatgatgatgcaaaagatctgcttaaacactcaatttgcaagtttccattcgagtgggatttttcaacattcgatgcgcgtttttcatgggtaaaaacaaaaacagatcatctacccgagccattgaccgatgatgattacaatgaactcaaggaacacataaagtcgttatgcttctttgataaattgcctgctgaggtacagaaggaactcagtggtcagatttggcattttgaaccccgagtatttatcacgcagatacaaaaagcagagcgccgtttgatctttaaaaccatcaaaaaaatgaatgacttcactgctgatgatatgcggtacggtgatatggcgaaagagcagatactcgctcagggaaaaatgaacaaagttgacatttgggggcaggagtttaaagttaactttttcaattttgacaagactattgatgagcattttaagagcatggatagtatggggtactggactgcttggggagaatattcaagtcttataaatatcatgctcaaaaagtttaaagcgaacgaaggtggggttttaaagcataatcttttgaataaggcattttctaaacatgtaactacagtggaatgtgttaataaaattaaggggtttattaaatcattacttgatgacaatggttatatgagtctttcggttaatgacttaaacgtgttaaatgaaaaaataaggaatggtgttaagcttcctaaattcgataactatgattggtttaatggtttaggaataactatccatgatacttattccacgcaaatttatcttaattatatagatgttagtgacggtaaatttaaagccgaaatttcatttcaaatacaggatcactttggtttagatgttgctgatgttaatgggaaatggtttgaagactttccatggttttgttcatggttcattcttcagcgttatacggaatttggatatatgccattcattaacgaggctgagttttcaatggttgttgaagggtga

SEQ ID NO: 120513 - DNA, 474 bp, Enterobacter cloacae
atgaagtttaaatatatttttttagtgataattatcggcgttataataagcgtgatttatttgtttttaaaaccagcaaaagtatctgggatatatcaagatataacttatgacaagcgctggggtagtgaatgtaaatcaactattgtattggtagataatgctccgctgacgaaatcaaaccttgctaaattatggagtcgagagaaaacattcattttggataagtggaagccttttgttaataaatgcgattatatactttttataaaaaacaagactgagcctcctcatgatagtgaggaagttaagtactgggtaggtgattatcagttatgtcttaaaggtaagatagatagttgcatttcgaaagatgaaaggttgttttatataggcattgataagcaaatatatggcgatagattgatcggagagtttggcaataaaaaactttatctaagttttgtggactga

SEQ ID NO: 120514 - DNA, 225 bp, Enterobacter cloacae
atggatattgtacttttccctggtcagaacgcccgcgcatgggctgaaacaatgataaatcttgaagcccgcaagctcatcaatactgcgaatattgtcggagggcaacatctcagcgacggactcgcacggattaaatttatggatgatattcggcagtttgtgatgcaacaatttagtgctacccggcagccagaagtgatgaggagtgcatggaatgcctga

SEQ ID NO: 120515 - DNA, 804 bp, Enterobacter cloacae
atgaactcaacaaccaatgagttttatattgaatttaaaaagatattttataatcatttctttcttggtgatggaaatatagatcatgatggttggcttaaaatacttaatgaagtggtcaatagaataaaagacagtctactcgacgaagatttttatttcccgatactagccaacggtctagaaaaagatgagataaatttaggtatcgcttcgatcattcccaaagaaaacatcttctcggatatccaacccaattttacaaccgacgtaattgaactagccgaagagttttgtaattcacaattacatccttataaacacttccttaaaataaccataaaaaactgctctaaagagagaaggaagtatttatctaagcaaatcgccaactttatcgttggaataatacaattatttagtgaacattttcaaatagattcagacgtggttgctttatcattaaacccgtatcctaactacgagtccttttacattacaaataatgatgatggatacaatcattgtttttcgagcaaaggaacaattgttcatagcgcagtgttttggcaaaaattcaaacaagagaatgcatcagaacttggtagcataataaaacagattataattcatgcaacaaccccaaaatcgaatcccgttttggtggataggctcatagatgcaatatttatttttagaagtgcaatgcaagataatgatgactcatcaaaaatcgtaaaactaactacagcacttgaacgccttgtaaacacacaaaagataacatcacttccacatttataa

SEQ ID NO: 120516 - DNA, 1212 bp, Enterobacter cloacae
atggaaaaaataaaaccacggctctatcaactgacgatcgctttgagcctcatctctttgatactggctttagtcagttcagggaagcaaagagagtttttctatattgctatttacgtcagtattattggcctggctttcgaatataaaaaaatcactctgcgaccttttactatagcgctgcccattctgctgattggattacttaacctcggctggtatttactctatgagtatcataacgagggactcaacctttacagcgactatctcggtgccagcaaaaaattaattttagcgagtgtcctgattttctatattgaccgctttaagttttatatcgataaggacaccttcaggaaatttttcttcttcgcaacggccttagggtttgtgctcgccacagggtatggcttgtggcaggcctcacaaggtatgactcgcgttgagatggcaattaaccgtgccaccgtttcagcctatgtttattctgtcctgtcactggctttcgtatacagtctttaccttcaacagaacgtgaagctgtatgttgttgcgggcttcacaatattaatctcttacttcgtcatactgttgacggggacccgtgctgcgatgggtttatatctgcttctggcaattgtgctcacgctttatcatttcagaaagattcatcttaaatccgccctcatcttcctatgcattgttgcaggcgttgtaatcgttagctacaaaccattgatttcgccgaaaataaaacaaacccaacgtgaggttgaacgttatcaacaaggttttgaccgcacgtcattgggcgcacgtttttcgatgtggactgtcgggatcgagaatggtcttgcgcatccgttagggcaatcgctggaacagcgtgaagcgtggacgcggcagtatattaaagacggacatccgcaccttggcagtgcactcgaatacatcaaagttcatctgcataatgaatttattgagaaatactctttgcaggggatccccggcgtagcggtaatgctctttttcttcgtttcgatgattgcgtatgccctacgaaacagaaacgcgctgctgctaacgtcaatgcttcttttgcttttgtatggactgacggatgtcatactgctcagttcagaagccttaatcttctttatgattctgtttgcgttaagtacacctttctcacaaacaaagcagcaataa

SEQ ID NO: 120517 - DNA, 900 bp, Enterobacter cloacae
atggcttttttaagcgtcattattgctgcgcataacgctgaagctacgctgcacgccacgctttcaagcctgctggcagcaatcggtcaggacactgaagtcattattttcaatgacagttctgaggatgccacgcaggcaataattgaagagtggtcgccgaaatttcctcagatcatcacgcgcaccgtgaactttcgtaacgtaggccgggtacgaaacagcgctgtcgcgctggcatcgggagagtatattacgatgctcgacagtgacgattgcttaaagccgggcagcctcggggacgcaatagccttcctgaaagcgcaacgtccggatatgttactgacacgtttgcttgagattcgcgatccccggaaaatgacttcagactggcagggatttaatcctgtgccattgccacgaaatgaagcagtcgctcgtttcttacgccataaagactttcaggcacatctcattggccagtttattcatcgtagcctgtacgagagtaaccctattcctccgatgttatgttatgaggatttcgctgtcttccctggaatgctgatgcaatcgaacaaaatagtctatcaacgccaggggcattattattacatcaagcgtcgcgacagtttgtcgagcactctggacgccagcaaaatttcaacgcttgtcgaatgcacgttacagatggaaagaacatttccgtcaagctacaagcatctcgtcaattgccactggtttgatatttacagcaaccatcggtcctgtcttacagaccaacaattgcagctcgtgaaacaacgcgtaaaggccatgtatacattgtcttttttcctctccaccgatgttcgttttagctataaaaaaagggttattgaggcattatggaaaaaataa

SEQ ID NO: 120518 - DNA, 657 bp, Enterobacter cloacae
gtgacgaactacctgaaactggccgaccgctcgctcacatggcaagactctcccaagcacgccacaaagccgctcttcaagccgacgacctggccggctattcttgataaacctgacgttatccgcatcggcatcagtattgcggcaggcaataaagccaaaaccgtccctccggttatctggaagcggattgttgatcaactcgctgatttaccctgcgagttttatgtcttcggcgcgccaaacgaacagtcgtggatggatgatatcacccgcctttacggtgaaatccctaattttattaatcttattggcaaaatttcgctagaagagcttccctgggccatttcaaagatggactgctatatcgcgtctgactcggggaatgtctatatcgcagacgccgtcggcgtgccggtggtcctgctgtttggaccgtgttgtcattacgaacagcgtccgcttggcaatgtgatgctgatcgggaatgacgacaacatttgttcttatgtgtttgaaacgcgctattacttcccgcaagaacgggaagcgctattctctgtcactgactccgcgttacacgatcttcagcagtttgtccgtacattacccaaagcccgctcactggctagcgctaccgacgctcaaggaaactaa

SEQ ID NO: 120519 - DNA, 1212 bp, Enterobacter cloacae
atgaactcgcttttatatgcgcttttcgaagcgctgcggtgctatcgctggctccgcctgctggcctgcgcctttatctttagctccctgggtaatggcttaactcaggttgttgttttcggattattgttacagtggtcagccccgtcagcgctgttaaccctcgccttcctttttgctacggtgcccggttttatcggcagcctgattggtgaaaagctgtgccagcggttttcacctctctacctgttgatgctgaccgaatggctgggcttgctcgccctgctctttcccctttcaggcgcacattaccacagcataccggcgctgcttgcggtgcaatccacagaagcgttgctgagcgggatgagctggcctgcgttaacgcttctgtttaaacgcggactgcatgaggcagaactgcctgcggcaacgtgtctggaaaatgtgatttttgcctcccaggttttgttaggaaccgggctgggtgtggtgttgttccagcgcatcccggtcttcgccttactggtcatcgacgccgccagttttatgggatcgctggtcatgctgtttctcgcagaacgccagtatgtagcgcgtccagcaccgttgcctgtcggggaccctcaacctgtggcattgcgctggcaaactctgacccttcgacaaaaacgcagtttgctgattttgcctgcccttgctgccgtaggctcgcctgcaatggcgttgctgccagcactggcgcagcagatcaaccccgagaatgccgctgggcttgcgctgcccttgctttttgccagaagcctgggacagctttgtggccccttgctgctcagaaaagagagtctgacgcgctttgcagcaagaacgcctttgctacttagctgtcttgctctttttctggcagcctatgggttgcttccgtttttatccgcatgggtcgtgcttgcgctggggatgatctttatcgcgcatctggcgtcgaatatcgtttttgcggcgggtacgtttggggtactgagtaattttcaggctatacagatatccgctgccagcggtaaggcctggcgctggcaaacgttgagcgcttccctttttacgggcctcgccgcaatgacggcgacgatattgggagcggctcagacgctatatgctgtctctgctatcgcactgctgttggtggcgctggtcctggcccattattgtgaataa

SEQ ID NO: 120520 - DNA, 303 bp, Enterobacter cloacae
atgaagattgtgtggtctaaaacagcagagaagcagttttctaaaatcgatcctcgatatcagaaccgcattaaattcaggctggagaagatggacgataaaacatcacctgtcgcggatatcaagaaattatcttctcccgaaaaccactacaggttgcgattaggtgattacagggtcatttacaccttcggagacccgccgggtgatatctgctacgtagtggcagtaaaacgccggacaaccactacctaccttcatgaggagcatacggaatatgactattcagttcatcaaggatga

SEQ ID NO: 120521 - DNA, 699 bp, Enterobacter cloacae
gtgcccgaaatcaatcaacatggtcaaaccgttaacgatattgtcccggactggaaatgcgcccgcgcgttaacccgtactctgctcaccggccagtattgccgcctggagccgctggatgctgaccgccattcggctgatttgtttgaagcctatgcgctgggtgacgacagcgactggacgtggcttgccagcacccagcctgtgagcgttgaggccactgcgcactgggtgctgggaaaggtgctggatgacgacctggtgccctttgccgttatcgatctgcgcaccgaaaaggcggtagggctggtcagctatatggcgatagaacgctttcagggctcggttgagatcggccacgtcacctggtcgcgcaggatgaagggcacccgcgtgggtaccgaagcggtgtggctgctgctgaaaaatgcctttgagcatcaatatcgccggctggagtggaagtgtgattcgatgaacatcgcctcacgcaacgcggcggagcggctggggtttgtctgggaagggcgcctgcgccagaagctggtgcgtaaaggccgcaaccgcgacagcgatatgctttcgattattgacggcgaatggccggaaaaggatgcggctctgcgggcttggctggcagcggagaattttgacggggaagggcggcaggtcaggcggttagaggaatttcggacgtaa

SEQ ID NO: 120522 - DNA, 456 bp, Enterobacter cloacae
atgacaactatcccttccctgtcttacgcgctttctgaggaaagtgctgttcatcaccttcttcacctgcatcttcccgattctgcggatctcttcgagctggctgacgcctgcactgcgtatgtgagcgtgctggttgaaacggatgacacagtgacattcaccacgctttgcgagcgcctgctggctgcgctgaagcggctgcgcgagtgctgtgactcagaacttccgccgtatctggttgaacggctcattgccggggaaaagatcgcctcctgcgtgccggaatgctggcaagaaacggcgctacaggtggattatgccgtggcgttaacgctggcgataatgggcgggtcgttgcctgcgaacgtggcgaaagaactcaccgggctgttgcatgatatggtctggctgctggcggagtttgtaaaagagccttatataacggcgcactga

SEQ ID NO: 120523 - DNA, 759 bp, Enterobacter cloacae
atgattaaattgacccggccatctgagccaaagatcttatgcgataatagcgcaacttggactcgtaacattatgagtctagtagccaaatatggttcttttaaagaaattccttcttcagaaaaagaggctgcattaaaattttatcgacatgatgatataaggaatgctctgaaggaaagttcattccgtaaatgtgcattttgcgaaggaaagccagaggaaaccggttttgctgaggtcgagcatttttatccaaaatcattatatactgataaaacttttgaatggacgaatctcctatattgttgtaaggcatgcaataacaaaaagcttgatcatgacacacagctattgccaataataaatccttatgaattggatcctcatgaatgttttacctatacagatataatgatcgaggccaaacctggagccaatcaagatattgctgaaagaacaattaaggtgtgcggcctttcagagaaaaggcttttttctcccagaagtgcgattcttgcaagttttcgcattttcgaagctgacatacatgatgctttgacagaatttcaacaggcgcgcactttacccaataagaagaggcgcgcatcgatgattagcaacgccctttctacgattgaagaattggtactgcccagcgcgaaattctcaaattactgtacgcatctgctttccacctcagatgtttatcaacaagcaaaaaaaactctcgaagagtttacccgccaaaatatgtga

SEQ ID NO: 120524 - DNA, 891 bp, Enterobacter cloacae
gtgctacccccacttgtcattggtgcacaaagaaaaataaactataaatctgtatctggtgtcactagagaggatgacagtcagcaaagtagaaggatatattgcgatgatgcacttggatttctatataataataactcgcgagatgttaaacaatggttgattaatcgttattttattatagataaatcttgggccattgaagaaaaatcgaactgggagcatttgctacgctctttaccagctattggaccatttgatagtgatttccggtatattgatacagaacgtgatctcgaacctgtattctcaatttatggaaaaaaatgttttttagaggagatttcatcaggctttcaagccgttctatatattataattgctgtatttgaatggatagaagcatgtttgcctgaaggcgaaagagatgtaagaaaagcgtgtggaactgtgctgatagacgaactggataaccatcttcatcctgaatggcagttcacagtgagacaggggcttgcaaaaattttcccggaaattcagtttattataactacgcattcgcctcatcttttggcttcagctaaagaaaatgaaataatattactcccttcctcatacccggaagaaaaatatgactttgaaccttctgataaagcatattctggctggagtacagatctaattcttactgaattaatgggagtggtaagtctcgataacaaagactatgaaattctcgttaaggcatgttacgacgatataaaaaacaacgatcttgataaacttaaaattaactatgctcatctagaatcaatatgtcatccggacgatgaaatattgattatactgaaaactcgcattgcagggatggaggcgaaagtcgatgattaa

SEQ ID NO: 120525 - DNA, 219 bp, Enterobacter cloacae
atgcccgtagaacgactacatgtgaaaagtttgaaaaaatttcctgaagttaacgtccattttaatagtaggtttaacttcattacaggtcccaatggttgcggtaaaacctctttgcttgcagctattgctcactgccttgcctggaatggagtatactccattccaggcatcaggatgacagcgaatattggattgatgttagtgagaaagatataa

SEQ ID NO: 120526 - DNA, 990 bp, Enterobacter cloacae
atgcaaatgattaaacagtgctttttcttactggttctgggaaccgccgcgttatttatgccgcatgcgaaggcgacctgtactaccccagacctgccgaaaatgatcaacgtggcctctatctccgttcccacgacgctggccgttggcgaaacgatcccgggtacagagcaaatcgcccatatcgccggtaattgtgacaatgcggaagataaggggctggaaattgtctcttgttactacggcactgggtctgagattccaggcctgaagggtgtctacgattcgggagtccctgggatcggtgtggccctgatgaacgatcaggggcagcgcatcagcggagccggaggcgttaactgcatttccacaggaacgccgttgggttatgtttccagcgatggcaaacagacctttaatttcgacgttacgctggagttggtcaaaaccagcgataccgtagcgtcaggcacgctgaatcaaagtcagacccgttttgggatcggggtttatcaccacgaagggctgggcgatcccaacaccatctcctatgcaggcaacgttattctgaaagaggtcacctgctccgtcctgccgaaaaacctgacggtcaatctgggggatttcccggtcagcgattttatcagcgtggggatgctctcttccccggcacgaaactttgacgtcacggtgaactgcaacagcaccgtacagcctgaagtgaaaattaccagctcaaacggctatgaaacggccttcgaaggggtgctgaaactcacgcagcagaccggcgtcgcgacgggcgtcggtgtccgaatgctgttcgacgacaatatcgccacctttgatacctacgttaacacccgaagcgaagccattgccaacgaaacgctgaccataccgtttgaggtgcgttacgagcaggtcagcgacgtggtcactcccggtccggccaacaccgttgccaccatcacgcttgcttataagtaa

SEQ ID NO: 120527 - DNA, 498 bp, Enterobacter cloacae
atgcgagccgcaatagtgttaggcgtatgcttgctctcagcttgctcagttaagccggaacagagcgcgccgacgcgagtacattctttttacgccacgtatctgatgtcacttacaagtagcgacaatgaatattcgccgtctgatctgcgcgtatatgtctctgctgacacgattaagagactggatgatatagagtcgatacccgaacaagacctgcttggatctgattacttcgcttatgcgcaggactatgatcccgcctgggtgtcggcgttaaatgtcgggccagccaaatcgtttatgggaggtgaggttatgccagtctggatcgggagagaaaacggcggaaaagtagagttgcaggtattcgttcgtcgtgaggctggcgcatggaagatatacagggttcgtgatgtcaccgacaactatgagcatcccatattcaatgccggagcaattgcccaggcaaaagttgcagccgaaagcgggctttaa

SEQ ID NO: 120528 - DNA, 921 bp, Enterobacter cloacae
atgctgaattatgtgtgtaaacgcctgctggggcttatcccgacgctgctgattgtggccgtgctggtgtttttgtttgtccatatgctgcccggcgatccagcgcgtttgattgccggaccggaagcggatgcgacggttattgaactggtgcgtaaacagctcggtcttgaccagccgctgtacaggcaatttctgcgttacattggcaatgtccttcagggcgatttcggcatctcaatggtgtcgcgtcgtccggtgtcggaggagattgccagccgctttatgcctaccttctggttaacgattgccagtatgagctgggcggtagtgtttggcctgggagcggggattgtcgccgccgtctggcgcaaccgctggccggataagctcggtatggcgctggcggtcaccggcatctctttcccggcgtttgcgctgggcatgctactgatgcagattttctccgttgagctgggctggttgccgaccgtcggggccgacacctggaagcactacattcttccctctatgacgcttggcgcggccgttgcggcggtgatggctcggtttacccgcgcctcgtttgtcgacgtgctgagcgaagattacattcgcaccgcgcgggcaaaaggggtgagtgagaaatgggtcattctgaagcatggttttcgtaatgcgatgataccggtggtcacgatgatggggctacagttcggcttcctgctgggcggctctattgtggttgagaaggtctttaactggccggggctggggcgcctgctggtcgactcggtcgatatgcgtgactatccggtcattcaggctgaagtcctgcttttctcgctggagtttattcttatcaacttagtggtggatgtgctatacgccgccattaacccggccatcaggtataagtaa

SEQ ID NO: 120529 - DNA, 639 bp, Enterobacter cloacae
atggcaaccgaatcgtatcaatcgttcattttacgcaagtcagaggatggtcgagtgcttctcgagtacctgcaacgcgtggccgaggttaagaaaatcctcccccgccgtcatttgtatatgcagattggaaatgaacgatattgttatctcattttgaaggggcacgtaactgtttgtcgtagaagcgacgatctggttattacaacggtatcggctcaaggtatcgtgggcattgctaatttacagcagatgcagctggatgcttatattaaaacgcacgtcgcttgcgatatcgcaatccttaaaatgtcgacagtttacgaagtaatcagtgctaatctgctttgggaacatgtggcaaagcatatgatggacattgccggaagattatttgcccatggtaaacagctttctgcccctacggcctatgagatcattcgtacccagctcaacgagctattcaatgaagaacccgcggtcagaaataacaccacagctgaaaaatatatctgcaataaaacccatctgtcgcgaagcggggtcatgcgcatactggcggggttaaaagcggggggatacattgaaatgcagcgtggagtgctgataaatattgctaagttgcctgagaaatattga

SEQ ID NO: 120530 - DNA, 663 bp, Enterobacter cloacae
atgaatactaaaatttccaccggtacaaatctgggtataccatctgcactggtagcaaaacccattgcagacatcgtcaaaattatcgaacaaatctctccttatgctaaaagctttcaggctaataaaggggaaattttgcgttattattacggcaataaacgcacagtctatttacttcatcagggaagcgtaacgctaaaccgcagaggggacggtatggtgttaaactctgaaaaggccagctttattctcggtgtcagtaatcagctttcccagaccgaggacctctatctgcgaattaatgaagatgcgcaaatgagccgcatgccgctggaacggtttaacctgctgattgagagttttggcctatgggaaagcttatgtaaagtattgatatacacggcatcgcgtgtttatgagcattgcactcttatttcgcaaatgtcgtcctatgagatcatccgcttccagcttctggagttgatgaacgaatcagaacgaatccgcaccagcatcacggcagccaactatatcaagaaccggacttatctttcccgcagcggcatcatgcgtattattgccgacctacgcgatgccggttatatcgaactcaaccgtggtattttgcttagcatcaaacatctacctttaaagtattga

SEQ ID NO: 120531 - DNA, 531 bp, Enterobacter cloacae
atgaaaaagaatattatcgctgctgctttcgttactaccgctgcactgtctatgtctaacgtattcgctgctgccggcacagtgaactttaacggtgaaatcctggacgcagcatgcaccgttgatgtgggtagtcaaaaccagaccgttgagctcggcagttatcaaaaatctgaattcacaacggcgggcgacgtaactgctgcaaccaaattcagcatcgtgctgaaagattgcccggcaaccgtaacttcagctgctgtgcgtttcgacggtacgcctgatgctaccgactctactctgctggctatcgacagctctgtagctggcgcggctacgggggttgctatcaacctgatgactgctgacagggctcatctgccattgcagggttctaacggctacagctatgcgctcacttcaggtgtagataacactctggatttctacgctcagtataaatctacggtggctaccgtaactgcaggcccggccaactctgtagctaacttctctgtgatctacaactaa

SEQ ID NO: 120532 - DNA, 678 bp, Enterobacter cloacae
atgcactttctgagtaaatctttaattgcctgtacgctgctttctgctggtgtatcagcggccaatgccggagtggtaattggtgggacgcgtgtcatttatgacggcaataaaaaggaatcctctattagcgtcaataatccggacacgacgccctatttaattcaatcgtgggttgaaacgcaaaatgggggagctgagaaagcgccttttattattactccgccattgtatcgactggataaagaccagcaaaacgtcgagcgtatcgtattagccggtgcgcttcctcaggataaagagtccctgtattggttgaatatcaaagccattccagcggcatcacgcaaagacaataccctgcaaattgcggtaaaaacccgcattaaactcatctaccgcccggcagcgctcaaaggagttattctggaggaactggcggataaactaacctggcagcgtagcggcaatcagattcaggttactaacccgacccatgtagtgatgaattttaacgaaataaacgttaacggcaaaaagctggaagacgtttcttacgtattaccaggttcaacggcgcgttttgaactgccgaaaggcgttagtggcggggcggtgacctttaaaattattaacgactacggcggcaccggaaacgtacataacgccacgatgtaa

SEQ ID NO: 120533 - DNA, 2532 bp, Enterobacter cloacae
atgagtagccataagcaggaaaaactattcaaacctgcacgtctcgcgtttttaatcgcatttgctctgggggcggtctcaacaaccggccatgcacgcgattattttaaccctgagctgattgaactggataacccgggcatgaagggagccgacctgtcggcgtttgaatccggttcgcagctgcccggcacttatcgcgtcgatgtcattcttggcgaacaggttgtcgatacccgcgagattaaatttgaggcggtgacaggcaccgatggcgtagcatcactgcagccctgtctgagcgtcgcccaacttaaaagctggggcgtgaaaaccgagctgttcccggatctggcctctgagggcgagtgcgcgaagttgaacgccatcccgcaggcctctgcggagttcctgttcagcgtccagcgtctggtactcagtattccacaggcggccctttctccgcaggcgcgcggctacgtgccgcccgatatgtgggatgaagggatcaccgccgcgatgctcaactacagcctgagcgggtcaaataactggtcgcgcaatggcaacggcagcgataccaacagccagtacgccaacctgcgtccgggtattaatatcggcccatggcgcctgcgtaactacaccacctggagccgcgacagcaaaggtaacgacaagtgggatacggtctatacctacgggcagcgggcagttattccgctgaaggcgcaactcacagcgggggatagctcctctccagcagacgtgttcgacagtattccgttccgcgggggccaactggcctccgatgacgatatgatgccggattcgctgaaaggctatgcgccggtagtgcgtggtattgcgcgcaccaacgcgcaggtggttattcgtcagaacggttatcagatttaccagagctatgtggcgccgggtgcgtttgaaattaccgatatgtacccgaccggtggcgcaggggatcttgatgtcaccgtgaaagagagcgacggcagcgagcagcacttcaccgtggcttttgcgtcactgccggtgttgcagcgtgaagggcgctttaaatatgcggtgacaggcggccagtatcgctcgtacaacagcgacgtggagaaaaccccgtttgctcagctcaccggcatttatggcctgccgtatggtctgacgctgtacggcggcgtgcaggaatcgagtaagtatcagtccctggcggcgggtattggtaaaaacatgggtgacttcggcgcgttctccaccgacgtgacgcagtcgtggggcacccctgaaggcatgccgaagagcagcggccagtcctggcggatccgctacagcaaaaactttgttgagacgggcactaactttgccatcgccggttatcgttactccaccagcggctattacggcatgcaggaagtgatggactcctacggtgacaacagcgcattgcaggaccgccgtcgcaaccgcgccgagctgaccatgagccagaacatcggccagaacctcggatcgctgatgctgagcgccgtgcgtgaggattactggaattccggaaagaccatggagtcctacagcgccgggtataacaacgcctggaacagcgtgacctacgggatcacctatacatacagcaaaaacggcagtaccgatagctacggccatacgaccagctatgacaaggatcagcaaatagcgctgaacgtcagcgtgccgctggagaaattcctgccgcgcacctgggccaactacagcatgaaccacagcaagaacaacggtactacgcacaacgtgggcctgaacggttcggcactggagaacaatgcccttaactggaacgtgcagcagggttacggcaccgacggcgtggggtataccggcaatgctaatgcggattacaaaggcacctacggtgaagtaacggcgggctacggctacgacaaagacagcgatcgtctgaactacggtctgcagggcgggatcattgctcatgccgatggcgtgaccttctcacagccgctgggggaaaccaacgtgctggtgaaagcaccaggggcgaaaggggtgggcattcagaaccagagcggggcgaaaaccgactggcgcggctataccaccgtgagcaacctgacgccgtaccgcaagaacgatgtggcgctgatgaccgattcgctaccggatgatgtagagcttgagttgacgaataaaactgttattccaacacgaggcgctgttgttcgtgcagattttaacgcaaatgttgggatgagagtgcttatgaatttaactctgatgaatggtcaatttgttccatttggcgctattgcaacagtaattgatgaaaataataaagcttttatcgtaggtgataaaggacaggtctatttaacaggacttacacagaaagttaaagtgaatattgtctggggagatgatacgaagagcatgtgtcaagtgaattataacggtgaaaatcagcgtgagggagggatagtcataataaatgaagtgtgtaagtaa

SEQ ID NO: 120534 - DNA, 1005 bp, Enterobacter cloacae
atgcgattttttaaattatttttgcttgttgttggattgttttttggtatgtcagcatactgctgtacttatacattcattggttcaccatataccgttaactatggtaatatcattgttcaaagagacttggctattggtcaacccatttctaatgaaatatatggtagtttggctcaggcttatatatgtaaagccactggtacggaaggatcagctagtggaatgaaaagcgtcatacttccatatgtgtctactgcaagcaatgggctcagaatttatcaaacaaatgttcccggtgtaggtatctcctttggttggtatgagcaaaccagtgcgggtgcgggtacgtatacaggaaataactaccttgttggccaagatagtgtagtttatggctggaacagctatggtaatgatatttttaattacaagttccagccctttatacaactatggaaaactggaaatattacttctggtgctttatccgggcaaatcgcagcttttattgcttccgattacggtggtagtaatccaacaaatgatattcctatttatgcaggctcaggaagaattacgcaagttgcgtgttcaattactacaccaaacttagtatttccaattggagatgttctggccgctagctttggaagtacagttggtactacgcctaccaattcaaataatacacaaaacctcggcctgaattgtgatgcaggcgcaaacattactatttcgttaatgggaacgcagaaccctgatgttggaacggcaagcgtattggctttaacaaaccagggagatgccgatgtagctcaaggtgtaggtgtgcagcttttatataatggtagcccgctcatattaaataaccgtcttgtactgaaaagctcgactggcgggcaggaaacattcccgattaccgcccgctattatcagaccagaactaccgttactaccggtaaggcaaatgcatctgcaacgttagatctcacttatcagtga

SEQ ID NO: 120535 - DNA, 516 bp, Enterobacter cloacae
atgaaaaatttaagtgtgttagcagctgcaacaatggctcttatgattaatagccctgctcaggcaggcgaccccgtcaccctcaatattactggaaacgttattgcctcaccatgtcaggtgagtagcgacagtattacgaaatcggtcgatcttggacaaaatatccaggcctcttcattgcaaacagcaggttcggctaccgaatgggtaaacttcgatattaacctgaatagctgtcccgctggcacaacgaaagccattatgacgatgcatggcaccgccgatcccgctaatccaggggatatgtatcgtagtaccggtacggcaaccaacctggccgtccagctacaaagtcaggcaggtgaccagttgggtgatacaaaaacgctttctggcaccatcgccaataacgcctatacctacaaactgcgtgcacgggcttatacccagaatggcggcgtgacgccaggcagtattagttcggttgtgacggcaacgtttgtatatcaataa

SEQ ID NO: 120536 - DNA, 510 bp, Enterobacter cloacae
atgcttaggagtaaatggcttactggcgtattcatgatgatgttgtcatggctatccttcgctgatgcgtcgctgacgttaaccggcaaggtggtcgctagtccctgtacagttgatatcgatacgatcaacaaaaccgttgacttgggtaccctgcagcgcagggatctgcaaacggcaggtgaagcgggagagtggcaggacttcgacctgctgttaaccaactgtccggccgggaccaccaaagtgacggcaacattaagcggcacgcccgatccccacgacgccacggcatggagtaacagcggcaacagcggcaatatggcgctacgactcgcccgtcgcgatcgtatccaaacagttgcgccgggcgattcgctggctcagagcgtcaacatcagcacacgttcagcctcattcccgctttcggccaggatgtttaccccgcaaggaaatgccactgccggtaccttccagtcggtcatgaatgttgattttacctggcagtag

SEQ ID NO: 120537 - DNA, 297 bp, Enterobacter cloacae
atgggtgccgagctttggctggatgatattctacccctacagatcatagatttagccgatgagctggcgagattcgatggtgttaaaattgataaaagcgtcgtgttgcagaacccgttacacttaagtccacttatcaaacattgcgcccggcaggtccagttcgtattagttgaaggggtggaaaatagcatgcattttgacatggcggaaaagagtggaagcaatcttcttcagggatttatgtggccggaagagcagttttttatcagctataacccggattggctatgctaa

SEQ ID NO: 120538 - DNA, 615 bp, Enterobacter cloacae
atgctaaaggttttgattcaagaatctgacgtcatgtttcgcagtggcatgaaatattttctcagtgatttattctaccaacgtttcaatctccaggttggatttatgattgactatacgtctgaaaatatttatgaagccgatgtgattgttatttcaatgtgccagggagagagttatacatgcttcccggagctgcgtgctcggcgtaaaggcattattatcggggtacttgatggaaatgattttcacgaacattcgccatcatgtttttctgatataatttatatcacgcgatgtgagccactaatcaggatcacacataaaattaccctgtcatggttaaagtggttagtgagcgagagttttcctgaatataagtcatgccacgggtgtaatcacattaatttatctctgagccaacgggagattatggcacgcttgtatatgggacgctcggttcaacaggtcgcgacagaaatgaatgtaacttataaaacgattgcggcgcataaatactttgttatgcgtaaattcaatcttaaaaacgattatcaactatttcgctttttgggtatgctgcgtcaaaaatgcgcaacgcacttgttcctgtaa

SEQ ID NO: 120539 - DNA, 1119 bp, Enterobacter cloacae
atgcctcgatcctcgctgattttccttccagtcttgctattcccgctttcactgcttgcagcgcctgagacggttaaggttgacgtgctacagacaaaactggatcacccctggtcgctggcgtttctgccagataacaaggggctgctcatcacgctcaaagacgggcagcttaagcactggcaggcagggaaagggctctccgatccgattgtcggcgtgccgaaagtgtgggcgagcggccagggcggactgctggacgtcgcgctggccccggattttgcacaatcacggcgggtctggctcagcttcgccgaggcaggtaatgatggcaaagcgggtaccgcggtgggctatgggcggttgagcgatgacctgtcgcgcattgagggcttccaggtggtgttccgacagatgccgaagctctctaccggcaaccactttggcggacggctggtgttcgacggcaaaggccatctctttattggcctgggtgaaaacaaccagcgcccgacggcgcaggatctggacaagcttcagggcaaggtggtgcgcctgacggaggacggaaaagtgccaccggataatccgtttgtgaacaccgccggagcgcgcccggaaatctggtcctatggcattcgcaacccgcagggaatggcgatgaacccgtggagtgacacgctgtggctcaacgaacacggaccacgcggtggggatgagattaacattcctgagaagggcaaaaactacggctggcccctggcgacgcacgggatcaattacagcggcctgaaaatcccggaagcgaaaggcgagcacgttgagggcactgaaaaaccgctgtttgtctggaaagtgtcgcccgccgtcagcggcatggcgttctacaacagcgacgtcttcccgcagtggaaaaacaagctgtttatcggcgcgctgaaggagaaagacgtcatcgtgctgagcgtgaagggcaatagcgtgacggaggatgggcgaattcttggggataaagatcagcgtatccgcgatgtgcgcgtcgggccggatggttatctgtacgtgctgaccgacgagacggacgggcagctttggaaagtcagcccgtccgggtcgtaa

SEQ ID NO: 120540 - DNA, 627 bp, Enterobacter cloacae
atgattacgctgtggggcaggaacaattcgactaacgtgaagaaagtgctctggacgctggaggagctggatttaccgttcaaccaaattatggctggcatggcgttcggggtgaataaagacgccgactatctggcgatgaacccaaacgggctggtgccgttgctgcgcgatgacgagacagacgccacgctgtgggagtccaataccattgtgcgttatctcgccgcgcagtacggccagggtcgcctgtgggttgaaaatccggcccagcgcgcgcagggcgaaaaatggatggactgggcaaaccagacgctttccccaacgcaccgcgtgatcctgatggggcttatccgtacgccggaagccgatcgtgattatcccgccattcatgccgcccaggacgcgtgcgagtcgctgtttgcgatgatggacgacgaactggcgaagcatacctggttctccggcgacacgttcggcgtgggcgatatcgccgtcgcccccttcgtctggaacctcactaacatgggtctcagctggaccccgcgccctcaccttgagcgctggatccagcagctcagcgagcgcccggcgtatcgcaacgtggtgatgatcccggtgacctga

SEQ ID NO: 120541 - DNA, 480 bp, Enterobacter cloacae
atgtctacacccgcacacctatggctagaagacgagaacggttcgccgattatcggtagctgcatgatgcccacgcgtcttggttccatagagctaaaatcgttctcccacggtgtaaccattccggttgatccaagctggggtaaactcaccggcacgcgcgtccatcgccctattacgatagttaaagaatttgatcagactaccccgcttctttaccgcgccgtgtgcgaagggagagttatgaagaaggggatcattaagatgtaccgcattctggagtccgggatcgaggccgaatatttcaatatcgtgatggaaaacgttaagttcacgacagtggcacccttcatgacccctaacgggatgagcagcacccatcttgaaacgctcgaattgcgttacgaagcaatctcatggaagtacacggaggggaatatcatttaccgtgacacctggaacgatcgctgctgcgcctga

SEQ ID NO: 120542 - DNA, 183 bp, Enterobacter cloacae
atgggctttttaagacgctggttcaaatctcaggctcagtttttcttctggacctatgtcccgatcatcctcacgttcatttttggctatgtccttgacgtttacttccctgaggttagccagggattcatcctcctgttttacctggtaacactgggactggcttactggatatggcattga

SEQ ID NO: 120543 - DNA, 708 bp, Enterobacter cloacae
atgtaccattctgaagagatcatccgccagcttcagagccaaaagatactggcaatgaagctggaccgggcggtacgtgatgtaggtgaagaggtaaagagccacctgaataatataggtgccggtgcccaacgcctgctgtactacacctcctgctttactgatgaatattacgatgtatgcacccgacaaaacctggaggacgctcgattccgaaagggcatattccatctcatttctcgctggaacatcgtctttgacctaatcaacacgtacgtagaggagctggttaaggattattccccggcagaattatcagcgatacagcatgctctaatgcgcgctaacgtttatatatccaccagcacgctaacctcgtattcattctctgcaggcgtcgcatcgactgtttgcctctatgtgacccttccaccttcagggttaaaggtcgtttcaggattaacgggcgcggctattggagggctggggatatacggggttgtgcaaaaagctgctgacagcgctcatcgcctgcaagtgatgcatcccgcctactatcaagcgttatacctgcaagaactggagatgatgtatttcctggtggagcctgcttttatgcgcgcgggcgtgctaacccagcaatggactgacagtcaaagcccttatgatgctgctgacacgatcctgaagctaatgggtagacactga

SEQ ID NO: 120544 - DNA, 870 bp, Enterobacter cloacae
gtgaactatatagatcaatttatcaattttgtttctaccttgtacactcctagaagagcctgcacaacattatttatgatatgtggtggagtcctatccttatgtaaaatattaccgcttctacatttatggctaacgactgcaataaaaccgatagcacaaaactatgaaacttatattttattaatttcacttgtaataggtgtttcattaggaattgttgttttcagcatagttgatttgattgtattaacaatctatgaacacctcatttctaaaaagaaaaaatcccaaagtgaattaaaagcgattaaggaaaagaatatacgtgacgaagtaatattttcaaattttaaaactgcttacttccatctcagtattgataagattaatattattagaagcttaatcacattcccttcccttagctttcatagcgaacatgaagatgtaaaattccttgaaaaatcagggtggattgaagcgttaacttacatcagtgatgaggagaaggtatatcaacttaatcaaacaatcaggttatatgctgatgatagatggaacgaggaagtaaatttcaacacggatcattttcatagctttgacgcagaaacagctatatccattattaatgccatgtccgatgtaaaaatcaaggcagaattagatgagttcaacttttcattttataagagcgacattgaaaaatgttttgaagtaagtgagtttaccgagacgctttactctttaagattcaaagaaagatatgaaaaaaagttttccgagctacacctcaaacctttcagaagtgagcgattattttctataaaggttcgtgaaaacattccagatttagacattcctttttag

SEQ ID NO: 120545 - DNA, 390 bp, Enterobacter cloacae
atgtcatcaaaaaatcaatcccagtatttttcaattgctgtatacatccctgaggagttgaagcagacttttgtagaagaatgcagtattgtcggcattgacgccaaaagagtacaatgtttctcctccaatccaggcatacgtgaatatctgagcattttagttgaacgtgggcagaagtttgcgccataccttcttaaggtactgaacttgttgcagtcaaaatccaaaataagaattgaagtcgcagccgatagaaaaatcatagacttacaaggtgtaagtgttgatgatgctctaaagttgattcaagctgctgatgccattcgggtaattgaccagcaagaaccggaagatatgaacagtgattccgcaaaacacacaatctga

SEQ ID NO: 120546 - DNA, 1659 bp, Enterobacter cloacae
atgctactcgaacgtgtggagattgtcgggtttcgcgggattaaccgcctgtcgctgcaactggaacagaacaacgtcctgataggcgaaaacgcctggggtaaatccagcctgctggatgccctgacgctgctgctttcgcccgaagagaacttgtaccacttcgttcatgatgacttctggtttccgccgggggatgtcaacgggcgcgagaaacacctgcatatcattctgaccttccgcgaatccgagcccggccgccatcgcgtgcgtcgttttcgccctatgtcggcctgctgggttccctgtgaagatgggttccagcgtattttctatcgccttgagggcgaaatggcgcaaaacgacggggtattaaccctgcgtgaatttcttgatgagaaggggaatccgatcccgctcgataatattgacgagcttgcccgacatcttatccgcctctcccccgtattgcgcttacgcgacgcgcgttttatgcggcggatccgtaacggcaccgtgccgaatatgcccgaggtggaagtaaccgcccgcgaactggatttcctcgcccgtgaactggtctcacggccgcagaacctcaccgacggccagatccgtcagggactgtctgccatggtacaactgctggagcactacttctccgagcagggaacggggcaggcgcgccaccgtctgatgcgtcgccgctcgcacgatgaacaacgaagctggcgctatctcgatattatcaaccgcatgatcgaccgccccggcgggcgtacgcatcgggtgatcctgctgggtttattctccacgcttttacaggcgaaagggacggtgcgcctggatcgggacgcgcgcccgctgctgctggtggaagatccggaaacgcggctccacccgattatgctttccgtggcgtggcatcttcttaatctgctgccgttgcagcgagtcaccaccacgaattccggagagctgctctctctgacgccggtagagtatgtctgccgcctggtgcgtgaatcgtcgcgggtcaccgcctaccggctcgggcccggcgggttaaatgccgaagatggccgacggattgcgtttcatatccgttttaaccgtgcctcttccctgtttgcccgctgctggttgctggtggaaggggaaacggaaacctgggtgataaacgagctggctcgccagtgcgggcaccactttgatgccgaagggatcaaagtgatcgaatttgctcagtctggcttaaaaccgctgatcaaatttgcgcgccggatggggatagagtggcacgtgctggtggatggcgatgaggcgggtaaaaaatatgcggcgaccgtgcgcagcctgctcaataacgatcgtgaagaggagcgggaacatctgaccgcgctgcctgcgatggacatggagcactttatgtaccgtcagggatttgacgacgtctttcaccgcgtggcgatgatcccggtggatgtacccatgaacatgcgtcgggtgattgccaaagctatccatcggtcgtcaaaaccggatttggccattgaagtcgcgacggaagccggcaggcgaggcgtggagtcggtgcccacgctgctgcgtaaaatgttctcccgcgtcctctggctggctcgcgggagggccgattag

SEQ ID NO: 120547 - DNA, 957 bp, Enterobacter cloacae
atgtcttccatcgtcgatacaccttattcaacgctgccccagcctaaatcgggctggcaactgtttaaaagcctgacatcgggttccctcacgccggggctggcgtggcaaaatccggcctatcgacgtaagtttatgttgcgctcgctggcaacgccgttcaccactgcgcgcctgctcggaaaccttgcaaaacagccccgtctgatgcagatcctgcgcgtgcagcccggcctgccgtgccgcctgcaccggccgtggctgaccgtaaatatgggtcgtcagaatacgctggacgcattgaacgatcactatcagatgatgagccgccatcttccggcgtcgctgctgaacggctacctctccagccagggcatcacgctggtgacgttaacgggcaaagaggaacagcagtttagcgttcgcctgagcgcggatgcgtttctggacaaagaaggggaagcgaccctcactttttgcgaccaccagaacacggtgctggccgagctgacctttacgctgtgcaaataccaaggcaagacaacgctcttcatcggcggaatgcagggggcgaaagcgcatgtcccgcacgagcacattcagctggcgaccaaagcctgtcacggactgttcccaaaacgtctgctggttgaagcagtcatgacgctggcaggcgccttcccggtcgagcagatcctcgcggtgagtaacgccacccacatctaccgcagctggcgctatcgcaagaaaaaagagggaaaattgctggctgactatgacagcttctggcgctcccttggcggacagcagcaggataacggcaactttgccctgccactgaccatgccacgcaaaccgatggaagagattgcgagtaaaaaacggtccgaataccgccgccgctataccctgcttgatagcctgatccaacaggtttcgcaggcgactgaccgctaa

SEQ ID NO: 120548 - DNA, 1626 bp, Enterobacter cloacae
atgtggaagtgccggcggtgtatgcgggcgtcgagcgcaaaaaaacgccttgaacgcgcgaaggcgctgttaacgcgtcttgggctggcggagcgtgttgattatcagccttcgcagctttccggcggtcagcagcagcgcgtgagtattgcccgcgcgctgatgaacggcggacaggtgatcctcgccgatgagccaaccggtgcgctcgacagccattccggtgaagaggtgatggcgatcctgcatcaactgcgcgatcaggggcatacggtgattatcgtcacccacgatccgcaggtggcggcgcaggcggaacgcattatcgagattcacgacggcgagctggtcagcaacccgccgccgcgtcagtccagagcggcggcggcgaaagaagctttgcctgcgtccaccggctggggccagttttccagcggtttccgcgaggcgctgaacatggcctggctggcgatggcggccaacaaaatgcgcactctgctgaccatgctcggcatcattatcggtattgcctcggtggtgtcgattgtggtggtgggcgatgcggcgaaacagctggtgctggcggatattcgggccatcgggactaacaccatcgacgtttaccccggcaaagattttggcgacgacgagccgcagtatcagcaggcgctgaaatacgacgatctggcggctattcagaagcagccgtgggtgaactccgccacgcctgccgtgtcgcaaaacctgcgtctgcgctacggcaacatcgacgtggcggccagtgctaacggcgtcagcggagattacttcaacgtctacggcatgacctttagcgaaggggcgaccttcaacgcggagcagctggcgggcagggcgcaggtggtggtgctggacgcgaactcgcgcagacagcttttccccaataaaacccgtgtagtgggggaagtgatcctggtgggtaacatgcccgccacggtgattggtgtggcggaagagaaacagtccatgtttggcagcagcaagatcctgcgcgtctggctgccatacagcaccatttccgggcgcattatggggcagtcctggcttaactccattaccgtgcgagtgaaggagggctacgacagcgcgctggcggaacagcagctcgagcggctgttaaccctgcgccacgggaaaaaggatttcttcacctggaacatggacggcctcttgaaaacggcggaaaagaccacacgtactcttcagctgttcctgacgctggtggcggtgatttcgctggtcgtcggcgggattggggtgatgaacattatgctggtgtcggtgaccgaacgtacgcgggagataggcatccgcatggcggtcggggccagagccagcgacgtgctccagcagtttttgattgaagcggtgctggtgtgtctggtgggaggcgcgatggggattgcgctttcgatgatgatcgccttcgcgctccagctcttcttaccgggctgggaaattggcttctcgccgatggcgatcctgacggcgtttttatgttccaccttcaccggtattcttttcggctggctgccggcgcgaaacgcggcgcggctcgatccggtggatgcgctggcgcgggaatag

SEQ ID NO: 120549 - DNA, 1608 bp, Enterobacter cloacae
atgtctgctcaaagcatatcaagccttttgaaggctaataaatggattgatacaaatgtaggtaagtttgaatttaaagaagatatcggtgagggtggaaatagtaacgtctttctcttttcaaattcagggcatgattttgcaataaagtttttaaagccaaataacgatcataggaaaacagatagatttaaagatgaatttttctgtgtatctcaaatgccatctaacaaacacatcgtacaatattaccacttagataaaataacagtcagtgattttacctattttattatcatcatgaagccatatgctcgctcgctaaaaaaagattttgccgataatagttcagcagaaacatatgaaaaagatttacgaaaattatttaatcatttgttttttgggttgaggcatattcaccgacatggtgttatacatagagatctcaaacctgaaaacattttcattgatctcctgagtgactcatatgttattggagattttggaatatcccggttcgatgatgaattctatgcccgtctatctcagacccgagcaagtgaacgattggcaaactataaattctcagcgccagaacaatcctctgcaatacatgaggtcagtgtacgcagcgacatttacgccttcggtcagattatgcaatattttggcactggggatgtaagcaaaggtggtggaagagaaaaattattgtacactaatgctagcgaatttattgccatcttagatgagattatagggaagtgcatcatgcataaccctaatgatagattctcatctttagatgagatggccgaatattacaattctaaacttgaatccaacaaaaaactcagagaagctcaatccagacaaaaagaagagtcagaggcttgggctttcctttatgcgtttgatgatgcaatagtgcggtctattcctcatataaataggataggaaaaataacttcaagcattgacattgcatcgttcctttcaagcatcgatagtacaattagctcagacagcacaaaagactcactatggatgatcatgtcagatgggggagacttaaactacaatggaactaaaataataaaagacacacacgttgaggtggattatggtgggtatgccacggaaataaatatagattcaatatatgtgtattatgatagtcattatcatcataagaacttctttatagtcaccactactagtatgcctccttttgtttttagcgatataaccgacttaacaaagaaaaaaaccagaagtaatatagcatcgagcgaagaccattgtattgaatggcgtgggtatcacttagatccagatgatgtaagaaataagtatgtaaatattgaaggggtgacatatagtgttaatcgggaggagttcagggacataactcgcgtgataagaagagacgcattcctcattgttcctgtgggcactccatcctcacatatgaacgatcgatctgttgcaacggatctcataaatgcttgcttaacaaatccgaatgggttggtgaaagctgatgtagacctttatttgaatagaattcgaggccattatcagtcttggattcgcaatagcctgtaa

SEQ ID NO: 120550 - DNA, 441 bp, Enterobacter cloacae
gtggatagagagttaagagagcacgtcatgattgaacgtgtcgaaatgattgcgcgtctgactactgagggtatttgtcaggagcgagaccgtgaaattgccttaaatttgattgcggaaatagcaaaaggcaacctaatgaaaaacaataatttttccgttgttttttccgcgccacctgttggtgaagcctttgctaaggagggcaaggtgaaagtaaacatcacgttggataaagaccaaaaaatcggccagccggtgattgatgcttttcaatgtgaattgactaggcgaatacagtctgtttttccgtcaacgcacgttacggttaaaaagggatccataaccggtgtcgagctgatggggttcgataaagactcagaccgcgaagcgctggatagcatccttcaggaagtttgggaagatgagagctggcgttag

SEQ ID NO: 120551 - DNA, 228 bp, Enterobacter cloacae
atgaagaaagaattaacaaacatatttttggccgaaaccgatccactgatggccgtgattgatattgccaaacgtgaagagcgaaaaggtcgcgcacttgcggtttcaatccgtcttgaggcgctggcaacccatatcaccaacaaagggttaagcagtattgaagcggccgaactgctgcgccgtgaagccacccgctttgagaacgaatcacaggagctgcactaa

SEQ ID NO: 120552 - DNA, 339 bp, Enterobacter cloacae
atggctcttgaagctttgccgcaaactgtaccgttaatggccggcgaacgcctggccggactcaactatgctgcagaattacgcgcaaaacacctgggcgacagcagcaaagagcttgagcgttttgttgccgatatgcgtgataaacgcgatccgcagcatgaagaaaatagccgggctttatccgccattttctttctcgcgaaaataccgggcgcgcgtcatgagctcaaattaagtgagctaactactgaggagaaaaaagcgcttattacggcgatgaatcattttcgcgcagtggtgagcttatttcccaaacggctgacgatgccgaattaa

SEQ ID NO: 120553 - DNA, 201 bp, Enterobacter cloacae
atgttgaaaaaggaaccgtctttcgcatccctgctggttaagcaaagcccggctatgcactgcggtcatggttggattatgggtaaagatggcaagcgctggcacccgagccgctcacaagctgatttgctagctggtttatcttcccgcaacaagggggattcatggctcttgaagctttgccgcaaactgtaccgttaa

SEQ ID NO: 120554 - DNA, 510 bp, Enterobacter cloacae
atgtttgattttcaggtttccaaacatccccactatgacgaagcgtgtcgagctttcgcacagcgtcacaatattgcgcagcttgctgagctcgctggtatcaaggttcaaacattacgtaacaagctcaaccctgagcaaccgcaccagctaaccccctttgagatttttacgctcaccgatctgaccgaagactcgaccctcgtcgatggttttctcgctcagctccattgtctgccgtgtgtgccggtcaatgagctggcaaaggacaaactacaaacctatgtcatgcgcgccatgagtgaacttggcgaactggcgagcggcgctgtatctacagagcgtcttaccccgtctcgtaagagcaacatgattgagagcgttaacgctggtattcgcatgctctcacttaccgccttagcgctacaggcgcgactgcaagccaatcccgcaatggctagcgcggttgacacagtcagcggcatcggagcttctttcgggctcatgtga

SEQ ID NO: 120555 - DNA, 264 bp, Enterobacter cloacae
atggcttctgaaattacaattgtgaaaattccaagtgagatcgtgtcacctcacgagtttgcagctttggagcgagtctctattgctaccgttcgtcgttggactactggcgacaatccttgcttaccaatcgagccgcgcgtcataaaacctggccgtaaacgtgcaagtggtatggttcgcatctactacgcacgcttcaaagaagagcagttgcgtaaggcgttgggtcattcccgtttccagctcgttattggtgcgtaa

SEQ ID NO: 120556 - DNA, 630 bp, Enterobacter cloacae
atgcgccaaagccgaaacagtcaatgcgggattgcgaattttatgaaaatcaattcagaaatcagtaacgaacacgttttagataggatttgtgagatctacgggtttgggcaaaaaatccaattagcccggcatttcaacatagcggccagctctctacagaaccggtacactcggggcgccatatcatatgacttcatagtccattgctcccttgaaacaggtgcgaatgttgagtggctgctcaccggaaaaggggaaaagctatccagtataagcacaaccacgactcctgaagtcgaggagttatcggttaaatcattcactttaagtgaaggtcgtttaattgaaggtgcagaactgaggatttcaaaaggattttttagtcggagtccgaacaatcctcagcgcatcatcgctgacaatgcctctcattttatcgagcctaatgccctactttcagacggtgcatggcttgtggagatcgagggtgcgaagagcattcgtgaattaacagttctgccaggcagaagactgcacgtagctggcgggaaagtacctttcgaatgcggtgtagacgaaatacaaacattaggtcgcgtggtgggtgtgtacagcgaggttaactaa

SEQ ID NO: 120557 - DNA, 1014 bp, Enterobacter cloacae
atgaccgtacggaaaaacccctcgggtggctggctttgcgagctttacccaaacggagctaaaggcaaacgcattagaaaaaaattcgcgacaaaaggagaagcgctagcctatgagcaacacaccatacagaatccgtgggatgaagagcgagaagacaggcgcacattaaaagagctaattgactcatggtatagagctcacggcataactctaaaagatggcctcaaacgtcaacttgctatgcaccatgctttcgactgtatgggtgaaccgcttgcacgtgatttcgatgcacaaatgttttcgcgttatcgtgagaagcgtttgaaaggtgaatacgcccgatctaacagggttaaagtagtctccccacgcaccttgaatcttgaacttgcctattttcgagctgtttttaatgagttaaatcgcctaggggaatggaagggtgagaacccattaaaaaatatgcgtcctttccgtacagaagaaatggaaatggcttggctgacacatgagcagatctcaatgctgctttcagaatgcaaacggcatgacaacaaagacttagaaactgtggtgaaaatttgccttgttacaggagcccgctggtctgaggctgaagggctgaaaaaatctcagttatctaaatacaaaatcaccttcacgaaaactaagggcaaaaaaaacagaaccatacctatcagccaagagtttcacaacgctttgatcgaagcaaagaggggcgagaatggtcaactttttagggattgttatggtgcgttcagagcagctttggaaagaaccggaatagagctgccagatggtcagcttactcatgttttgcgccataccttcgccagccactttatgatgaatggtggaaacatattggtcttacaacgagtgctcggacatactgacattaaaatgacgatgcgctatgctcactttgctaaagaccatttagaagatgcagtcaggctaaatcctttattcaatacaggatactaa

SEQ ID NO: 120558 - DNA, 1239 bp, Enterobacter cloacae
atgatatcaggtggctacgtaaaaacaatcgagggttcttatcgattagagtttcacaataagagtgccggacggttaattagtaaaaaatatagttcgctgcaatcattgaaaaaagcatcttctaaaataattgaggcgctgttagatgctaaaaactataaaaagcacgtatatgaaaatggttatgcttttttaggttgttttaatcctaggttcatcgcgtatagtacaagatttaaaaatttagaatccgcaatcaatttcgttaaagaagttagaaggtttattattgacaatgataacatcgctgagatatttaatacttgtcttttagatgatagcaaaaatgtaataaaaataaagaaagtttctcaatttcttgatgagttagaaaaaatacctctaccaccttcatctatgttttattttagaggtcactcgagttatttatataaaatggagccggggatatacagaaagccggatttaataaataatgaaaatgttatttacaatgaactcttggtaagatgtcctagtgactttatacatacagcatcaacctttgaaacactagtcaaaatgcagcattattctttgcccacaaggctattggatataacaactaacccattgattgcattgtatttcgcctgcgaatcctttaagacggattcttatgatggagaggtgaaggttctaagtattcctactaatgaagtaaaatattttgatagtgatactgttaccgtcatttcaaatatagcaaagcaggaaagaactttcagtactacttgcttggatgatgctaaaaatgaaaagttaatccattttttagatgatatcaaacgtgaaaaatcgtattttataaatagaattaagaaagcttctctgacttcggttgtatgtgttaaacccaaattgaacaatgctagaatcataaggcaggatggggcttttctagtttttggaatgaagtcaaataagtctcaacccgcgataataccatcaagatatcagcttgaaaatggaattagattctttgttgataaaaactcgaaggaatccattctcgctcagcttgaaaagattgggattaatgaagcttctatatatccagaaatagataaagtttccacatatgtcagcaacaggtatggtaaaccagtagatcttcgtgatgagcaagatgaggtaattgaaagacataaaacagatggcagtagtagtgtgtga

SEQ ID NO: 120559 - DNA, 1647 bp, Enterobacter cloacae
atgtccagattcttttttaacgaccgcaaacagcttgtcaacgatgccattgaaggcatacttctctccgcgccgcacggtaatctcgtcaaactggatatcgatccggccatccgcgtggtggctcgcggcgactgggataaaagccgcgtggcggtgatctccggtggcggctccggccatgaaccggcacatgccgggttcgtcggcaaaggcatgcttaccgcagcggtgtgtggcgatctgttcgcctccccaagcgtggatgcggtcctcaatgccattgtggcggtgacgggcgaccgtggctgcctgctgattgtgaaaaactacaccggcgaccggcttaactttggcctggcggcggaaaaagccaaacgctacggcctgaaggtcgagatggttatcgtggcggatgatatcgccctgccggataacaagcagccgcgtggtatcgcgggaacggcgctggtgcataaaattgcgggatatgcggcagagcaggggaaatcgctaaacgacgtgcgggatattgcgcaacaggcctgcgataacctctggagcctgggcgtggcgatgcaaacgtgcaacctgccgggcagcgatgatgaaggggggcgcattaaacaaggccatgtcgagctgggtttgggcattcacggcgagccgggagcttccgtcgtggatacgcaaaacagcaaagccattatcgacacgctggtgacgccgttacgcgcgcaggcgggggaagggcgttttgcggtgctgattaacaatcttggtggcgtatcggcgttggagatggcgctgctgaccaaagagctggcgcactcggcgctgaaagagaacattgcgtatctgattggcccggcgccgctggtgagtgcgctggatatgaaaggcttttcgttaacgctgctaaagctcaacgatttcttcgagaaggcgattcacgccgaggtcgagacgctgggctggcagaagcccgtggcgttcgcgcccctgcgtaccgtcccacatagcgcccttcatgatcgcgtggaatatgccccgtcggacaatcggcaggtgagcgaggccgtcgcctcggtaacgaaaacattgatccagctggaaaatcgccttaacgcgctggatgccaaagtaggcgatggcgatacgggctccacctttgcgcaaggggcgcgggatattgcgcagcgacttgaggagaacaacctgccccttaacgacgtgccgacattactcctgctggtaggcgagcggctggcaacggtgatgggcggatcgagtggggtgttgatgtcgatcttcttcacggcggcaggacaaaagcttcacgatggacagccgctacctgaagcattgctgagcggactggcgcagatgaagcagtatggcggcgcagatctcggcgatcgtacgctgatcgatgccctgcaaccggcgctggaggcgttacagaaaggcaatattcaggcggcagcgcaggctgcgcagcagggcgccgaagcaacggcaaaaatggcgaaagccggcgcgggacgctcgtcgtatgtgaataaagagaatctggacggggtgatggatccgggggcagtcgcggtggcggaagtttttaagaccatggtagatgcaaaacggtaa

SEQ ID NO: 120560 - DNA, 984 bp, Enterobacter cloacae
atggcaggcttgtcccctttcttcgggacggtctatcagattatgcagttacagaaattagtcaatatgtttggtggggatcttttgcagcgctacggacaaaaggttcacaaactgacgctgcacggcggctttagctgcccgaaccgcgatggcaccatcgggcgtggtggctgcaccttctgtaacgtggcctcgtttgctgacgaggcccagcagcataaatctatcgctgaacagctcgcccatcaggcgagtctggtgaaccgcgcgaagcagtatctggcctatttccaggcctataccagcacgtgggcggaggtgcaggtgctgcgctcgatgtatcagcaggcggttgctcaagcgaacattgtcgggctgtgcgtggggacgcgtccggactgcgtgccggacgccgtgctggatttacttagcgagtacaaagagaagggctacgagatctggctggagctgggcttgcagaccgcgcatgacaaaaccctgcaccgtatcaatcgcgggcatgatttcgcctgctatcagcgcaccacgcgtctcgcccgcgagcgtggattaaaagtctgctcgcatctgattgtcggcttgccgggagaagggcagcagcacgggctggaaacgctggaaaaagtcgttgagaccggcgtggatggcattaagctgcatccgctgcatatcgtgaagggcagcataatggcgaaagcctgggaagcggggcggttatgtggtatcgaactcgacgactatacggtgactgccggggaaatgattcgccatacgccgccggagattgtttaccaccgcatctcggcaagcgcccgccgtccaacgcttctggcaccgctatggtgtgagaaccgctggacggggatgctggaaatcaaccgctatctacaggagaacggcgttcaggggtcggcgcttggccgcccgtgggttcccccgctaccggcgacggccgcctag

SEQ ID NO: 120561 - DNA, 468 bp, Enterobacter cloacae
atggtgctgggagatttgcagtcgctggcgacatctggcctgaccggggttctgatcaatgccctcacgctggccgtggcggcacggccagaagagaaacgccctggtcattatgaactccagggcacggatatctttatgaacgtgatgcagtttgccacgcaagagccgaagcagaaaaaggcggaactgcacgcacagtatattgatattcagcttctgctcgctggagaagaacgcatcttttttggggttatggggtccgcgcgggcgtgtgaagaaatgcatagcgcagaagattatcagctttgtcgccacatcaatgatgaacaatccattgtattaaagcctggtatgttcgtggtctttatgccgggtgagccgcataagccgggatgtcttgttgaatcggagggggaaattaaaaaagccgtggtaaaagtccgggccagcctgttaaccgcataa

SEQ ID NO: 120562 - DNA, 909 bp, Enterobacter cloacae
atgacaaccctggctattgatattggcggcaccaaactcgcggctgcgtgcgtggaggggcagaccattactgcccgtcgcgagtgtcagacgcctgccagccagacgccggaggcgttgcaggctgcgctacaaacgctgattgcaccctttacggcgcaggcaacgcgggtcgcggtggcatcaaccgggatcattcacaacggtattttgacctccattaatccgtctaatctgggcgggctggcggaatttccactggtggaatttctctcgggaataaccgatctgccggtgatggcgatcaacgacgcgcaggccgccgcctgggctgagttctgcgccttgccggatgatgacgatatggtctttctgaccgtctcaaccggtgtcggtggtggcgtggtcctcaatcgaacactgcaaacgggcagcggcggtctggctggacatctgggtcacacgctggccgatcccgccggtccgcgttgtggctgcgggcgaagagggtgcgttgaggctatcgcctcggggcgcggcatcgctgctcaggcagaaggcgtattgtccgggctggattcgaaagcgatattcagccttgcagcgcaaggtaatccacaggcacaggcgctgattgcgcgttcagcgcagacgctggcgcgtcttattgccgatgtcaaagccgtgactgattgccagattgtagttattggaggcagcgtggggctggcagaggggtatctggggctcgtggaggcgtatctgtcgcgggagcccgccgtctatcaggccgcacttcggcctgcacactatcgccacgatgccgggctgttaggtgcggcgttgttagcacatggagacgcgttatggtgctgggagatttgcagtcgctggcgacatctggcctga

SEQ ID NO: 120563 - DNA, 1005 bp, Enterobacter cloacae
atgcacgagttcctgttgcgtattcgcgctcagctgctgtgggcatggtcgcgtctggatgaagcagaaagctgcgcccgccagggtctgaatgtcctttcgagcttccagccgcagcagcagctccagtgtctggctctgctggtgcagtgctcgctggcacgcggcgacctggataatgcccgtaaccaccttaaccgcctggaaaatctgctcggcaacggacagtaccatagcgactgggtctccaacgccgataaggtcagggtgatttactggcagatgaccggcgataaaaagtccgccgccaactggctgcgtcacacgcctaaaccggaatttgccaataaccacttcctgcaaagccagtggcgcaatattgcccgcgtgcagatcctgctgggtgactttgagcctgccgagatcgtgctggaagagttaaacgaaaacgcccgcagcctgcgcctgatgagcgatttaaaccgcaacctgctgctgttaaaccagctttactggcaggcaggacgtaaaaacgatgcccagcgcgtactgctggaagcgttgcagctggcgaaccgcaccgggtttatcagccactttgtgattgagggtgaagtgatggcccagcagctgcgccagctgattcagctcaacacgctgccggaactcgatcagcatcgcgcccagcgcattctgcgcgagattaaccagcatcatcgccataagtttgcgcacttcgatgagaactttgttgaacgtctgctgaaccatccggaagtgccggagcttatccgtaccagcccgctcacccagcgtgaatggcaggtgctggggctgatctattccggctacagcaacgagcagattgccggtgagctggcggtggcggcgaccaccatcaaaacgcacattcgcaatctgtatcagaagctgggcgtggcgcaccgtcaggatgcggtgcagcatgcgcagcagctgttgaagatgatggggtacggagtgtaa

SEQ ID NO: 120564 - DNA, 1389 bp, Enterobacter cloacae
atgcgtaatttttggcaccacctcaggcttcccacactggtcaggcgaatgctggtcgcccagatgctgctgcttacgttgctctggtgtctctttttaaccttcattttgctggaagacctgcgtagtcctcccatactgacgggcaatgagacttacgaaaccgttttttccctggtagagagcatggacgatcgcccgcaggcgcgtaatgccgtgctggcagcgttcagcaaggcgctgcgggagggctatggcggcggtgaagacccggagctgtccatcaacctcattgttcgcaagaataacgagattattttttcttcggatggtgcgccaacgggggtaaaaaatagccgtctgggggtcatgcagcatgtccagagtgaggaccatacatggacaagccgtaccctcaaatccgcgcactccgacgtggaggtcaccctttttacccctgccggtagctggaatttctttatctatctgaactcgcgcggctactacgtcatgccgctgatgatatgcatcccttttcttctgttccccgcgtggctgtccatccgcatcgcgatgcgcccctggaacaaggtggtagatgaaatttcattgcgcacgccggacgatctctcgcctttaaaagccgtccccagacacagagagcttcgccagacggtcgacgcgattaatgactttctggccagggtgcgggaaagcgccgaaagggaaaaaatgtttattgccgatgccgctcacgaactgcgtacgcctctggccgcgatgcggatcaacgtcgaggcattgcagtcctgggtcatcagcgaaagccagcaggaactgcttgcgggcattgttcgcagcaatagccgtgctgcgcgtctcgtcaatcagcttctgctgatgatgcacagcgaagcacacatcagcacggtgatgtcgcctgtgccgctgacaacgcttattcaggagcgaatggctgccctggaaccgctggcgtccggacgcagaattgagtttgaattcttcgccgacgatgaaatccatgtcgcaggcattcgggaacgtctggtgtcgctgatcgacaatttaattgagaatgccgtgaagtacagccccgagggtggacgcattgaggtacaactgcaatcgcgtgataagtgcgctcagctgcgcgtctcagacgcgggccccggtatcccgattgaactgcgggagcgcgtgttcgacagatttttccgcgatcctaatcagacccaaagcgggagtggactggggcttgccatcgtcaaagccgttacgcagcaacacaacggcagggtcaatctgagtacgtcagccgaaggtggtcttatggtgaccgttgatttcccgaatccggcgttcgcatga

SEQ ID NO: 120565 - DNA, 1230 bp, Enterobacter cloacae
atggaaacacctgcactccctcgccgtctggcgctcactgcgggatgtaatcaactcattaactgggggatctccttttacatgccgggaacctttgctcatgccattacagcagaccgaagctggtcgtcccccgaaatctatctcggcctgacgctggccatgctggttatggctattgtctcgccgtttgtcgctcctctgctggcgcgttttggtggacaaagggtggtaatgagcgggaccttgctgatcgccgtaagctgtctgtcaatggcctttacgcccacactttcaggctggtatggcgcctggttgctgaccggcatcgggatgcgcctgtcgctgtatgatgcgcttttctccgctcttgtgaacctatacggaccgcaggcacgcaggacaatctctcgtgtcaccctggcaggcgggctggcgtccgctgtcttttggccgctgggagacgccttactgaacgtgatgggttggcaggatgcgctgaagatctacgccctgttcggtctgctcagtgccctgcttcttcggcgcttcccgcgccagcgctttacggtcaagcccaaagcatgtacgcaggtttcccctcatgacaggcgtaatggctggctttatgcaaccttcattgctctcatcaccttcgtctctaacggcacctctacacaccttcccgaatttatcgccagcttcggcctgccggtcgccgtcggcatgctgtggggaatggggcagaccggtgcgcgccttatggaggtgctggcaggggcgcgcctcactccgctaaaactgacgcttttcactgcgctcgccatgccgctttgttttctcatcggactgagcagcgacatgctggcctggtgtgccgccggatttgtgttcggctttggtgccattaacgggctggtgactatcgtcaaagcgacgctacccctggaactgtttagtacagagcgctatgccagccgcacggggcttctgcttattccaggccaactgatggcagccgcctctccgtttgcgtatgcgtggctgaataagtcgctgggtataacaggcggaatgtgggtttccgcaggactgacgctggtcattgcggggttcgcagtggcgctcgtgcgcagcccaggcaaacaaactgtatcgcactgtatcccgagcgctacgctgacaaaccggtacaaaacgcccgcagaagcaaacatccccgatacataa

SEQ ID NO: 120566 - DNA, 891 bp, Enterobacter cloacae
atgacgacgctcaatctgggacacctcgccacttttcgtctggtcgttcaacgcggcagcttttctgcggcagcagatgtaatgggtatttcccagcccgccgtcagcctgcaaatacgccagctggagcagtttcttcagacgcggctgatcgaacgtacggggcgtggaatcaaagccactgctgccggtgaggcgctacgggtgcacggtgaacgtcttgaactggcggttgaggagacaattcgttcggttagcgcgttcaatcaggaagtgagcggcaccatcacgctcggcacgggcgcgacggcctgtattcatctgcttccagcgctgttgcagcagcttcgtgaggagtatcccctgttacggatcggagtgacgacgggaaatacgccagatatcgtcagggcgattgaggagaatcggctggatatggggctggtcacgctaccggcgagcggtcgtacgttggcgattatgcacgcgatgcaggaagagtttgtctggattggcgcgcaggttcagccggaagaaggggagcagtttacgccagactctttatacgctcagccgctcattgcgtttgagtcgggcagcggtacgcgaacgttgattgacggctggtttgaagcccgcggactagccgtctcaccggttatgcagcttggcagtattgaggccatcaaacgcatggtacgtgcagggctgggctacagtattgtgccgcgaatggcggtggagcatgccgacgaccgggagggattacgcgttcaatcgttaacgcccgttctgcgccggcaactggcgatagtgatgcgtcaggataagatcctcagcaaagggatgacggtaattattcggctgttacagcgtgaacatggacgttag

SEQ ID NO: 120567 - DNA, 540 bp, Enterobacter cloacae
atggacattaggaataaaattgacaccattctgctttgtgacattgccaaacatctcgggattgaaactgaaattgatactgaactcgtaaaatatgcaattacctcaggtaactcatggatccttgatgctaagtactcattctttaacgcagaagaagcttctaagcaggatcgtgaatttgttattgatatattgaatatgtatcgaggtctatctgctgcaatccggaaattacctgaggatactcagcagagtctcaccgagagatttgaattaaggatgattgacaagaacattcaaatccctggattcgatggtaataatgaagcgcagtacttctctatcgtagaagcattcattaaattcgatcgatacgttgagcagaaagagcccattgaaaatacccacaacgaaacagttgatgactactcaaaaatgctggcggagtataaaaaactcgatgcaccgaatcgattgttcaatctcagtgcagaagaaatatcctcagttttaagacttgcacctcacggtatttaa

SEQ ID NO: 120568 - DNA, 195 bp, Enterobacter cloacae
atgactatgttgatcgcgagttgcgcggaaacttcacccgtcccggaggtgattgatacgggctgcctgtggacccggattatctacgtgacaaaccacgatattgacgttctggacaagcagaccaagcgcgacatcctggcgcataacaaagcgtggcaggcgaactgccagccaaccaaagacaggaaatga

SEQ ID NO: 120569 - DNA, 279 bp, Enterobacter cloacae
atgagcatcatcgaaatgatattaggcgctattactgcgctggtggccgtcgcgctcagtggtttttttgccgggaatgttcgcggtcgcggaaaagcagaagcaaaagccaaacagcagcgcaccgaagagagcgcagcggctgccgttgcggcggcagaacgtaaagcggaagtcactaaagaggccagtaatgtccagcagactgttaatcacatgcctgatgactatgttgatcgcgagttgcgcggaaacttcacccgtcccggaggtgattga

SEQ ID NO: 120570 - DNA, 630 bp, Enterobacter cloacae
gtgaatcaaacacaatttcagaaggcggcaggtataagcgccgggttagctgcgcgctggtttccgcatatcgacgctgctatgagggaatacggcatcaccgcaccgctagatcaggccatgtttattgcccagatggggcatgaaagcaccaggtttacccgtgttgtggaaaatcttaattatgcggctgaaaacctggtccctacgttcggcagccaccgcatcacttcacagcaggccgccgcccttggcagaacggcaacgcaaccggcaaaccagaaagcgatcgctaatcttgtatacggtggtgagtggggaaaagaacaccttggcaatcaggttgccggtgatggctggaaatatcgcggtcgtggtttgaagcaaatcaccgggctgagcaattatcacagttgtggtcaggcgctgaaactggatctggtgtcgtatcccgaattgctggagcgagatgattacgctgcgcgctcagctgcgtggttttatgtttccagaggttgcctgcttcactccggcgatgtggagcgcgtaacgctgcttatcaacggcggccgtaacgggctggaaaagcggcggaagctattcgaccttgctaaatcagtgctggtctga

SEQ ID NO: 120571 - DNA, 297 bp, Enterobacter cloacae
atgacgtggctaatgcagaacttaccatggctgctgcttcaccttaacgcagtggcctgcatcatgatcccgatacgtctgatgttcttcaggaaacggggtatgcggcgtcggcggctaatggagctcctcgcttacgccctcattctggcaccagcctatacagcctttcgaatctggcatggtgactacgttcaggtcgattacggtgaaattctcatcaatgttgttgtctgcgttgctgtctggcgtgcgggcggcaatatcgctcgtattactggagagagcacaacgtga

SEQ ID NO: 120572 - DNA, 405 bp, Enterobacter cloacae
atgtccgcagaaccaataactgcaacggtaacggcgggcgtggctgctggtacaaccggaattaccttcgccacgcttttcccagaggctacgcccgcggtgatggtctgctccctcgccggggcggcgctttatatcctcagctctgaggaccacaaaatctggaagcagataatttttgcgctcatttcgtttatcggtggcatttactgtgccggtactgcttcagaaattatcgccgcccttatcaacgccggactaaatcagcttagcccgcctgtcagcataaaagtttcacctgcgattggcgcgctggcggcatccactgtttcagtgactgtcctgctcagggtgctcaagcgctcacggaccggaaacttacccggtctgaagggggaagaatga

SEQ ID NO: 120573 - DNA, 711 bp, Enterobacter cloacae
atgagctggcaaggaattccttatccatcgtttatttcaaatactattgatgcaggtttaaccgtcaccaaaataccagaagttttagtaaatactggttttggttgggacactgttgctggttctgttgttgctgccttcattggtgcagcattgcccacagcgctcgcgtttcatacgctcagacgaaatgacaatttagcagcagctgagcgagccaatcagttagctgatttagccgaagccagggaaacacaaatacaactggcaaggatgacatttaatgctcaagttttatcttctaaccggcagcaatggataaataacctgagagagaatgtttcttgttacatctctcttttgggagtcgagttgtcattgcgaaccctgtatgatgttcaaaaaaaatcacctaatcaggctagtggcagccattttgatacattgcaacaatcaattgagaacaaaagaaaaattagtgagctggctactaaaattgaattgatgcttaacccaaatgaacttactacaaaagctttattacaatgcattcgagaagttgataaaattattagaaatgaagaaccattaatgtttttcaaggaaaagtctgaagcaagtaaacaatttgcaagaaaaatcaaaagtcttaaacgagtaactcaacgctgcctaaaaaacgaatggaagcgagtgaaagaaggtaaataa

SEQ ID NO: 120574 - DNA, 693 bp, Enterobacter cloacae
atgaatttacaagaactggaatatacgcggattgaactgcgccgcgcgctggcagatttatcaggaacggccaaaggacagttgcaggcgttcagtgagcatccaccagcagataagaacaaataccctcgccaccatcctgaaatcgtcatggagggtggggaaggttgtgggttaaaggttgtaaaaacgctggccactccactttatgttctcgagacaaggagccgtcgccgacctttaccgcctatcaaagatacggagttcgcttgttcagcatggcgtcgttcggtcaatggtctggatgagcatttgcaggcatggatacggtactgctatgggtatgatcttactttccggtaccagacattgatgtgccagcacgtgtgggaacagtttcagcgtcaacatagcggaaaaaaaatacaggggcgcgttactaaaaaactgttagggcttgtctggctggcggcgcaagaagttgctgcatcgcgtaataacgatacctatcaggagtatgctggtgcagctctggcgcgcatggtcagcgttgagcgttccacctggctcagagtgtattcaggccactgggcggctttcaaagcgtcgtttgctgagatggacagtgaggcactaagagaaattttgacacggtacgaagagtaccaagaactgaaagtggcggacatgtga

SEQ ID NO: 120575 - DNA, 1062 bp, Enterobacter cloacae
gtgagaggactgttaacagccgagactgttccgcgcctggggcttgtggtgttaaagccgggtagtgaactgatgtctctgtttcaacaggggcgtgtgctggtggagcctcagccaaaaagtatggctgggcttccgtcggggctcgtccctgatgccaggcagccgctggcagaagataagtccctcgaggaattcttcaccgacgagagagttatccgtgcagcaggcggtttgaccgcgttggaatcctggttagagcgtaacgtgaaggaatgccagtactcgcacactgattatcatcatcatgaactggtaacgatgcgacatccccctggatcaatgttgctctgttggcattgcgataaccagctgcgcgagcaaaccaccgcggcgctggcagaactggcccggcgtaatctcattaactggctgatcagttctattctgtcttcgcttggctacaacaacgagcgtgaactatccctcggtgaattgtgctggtgggccgtttattcaggcattgctgatgcaatcacggaaaggatggcccagcatgcgcttcgcttaccggatgagccgtttttatccgtatatcgagaaagtgacattgtgccgatgcccccggcaaaaagcattttgcagaagaaggtcacccctgcggtcacggctgcgaaattaaagcatggagcaaatcaggaagtggcctgtgaccagccaaaggttctggctctgcatgcggatcctgaatcccctgaatcattcatgttgcgcccaaaataccgcaggtgggtgaatgaggactatctccggtgggttaaaacccagccctgtgaaggttgccggcggccagcggatgatccacaccatgtcattggtcacggcatgggcggtaccgccactaaagcccacgatttgttcgtgatccctctgtgcagagagtgtcacgacaaattacatgctgatgtagcagcgttcgagaaaaaacacggtacccagctggagctgctattccggtttatgaatcgagcgctggcgatcggcgtaataacaaaagcgtaa

SEQ ID NO: 120576 - DNA, 693 bp, Enterobacter cloacae
atgaatcagttaaccgcaaagggtgttgtgacaatgtccagccgtgaaattgcccggctggtgcaaagcaaacatggtgatgtgaagcgctcagctgaacgccttgcatctgctggtattttaaccgcgccgttggcgcacaccccctacacacacccgcaaaacgggcaaacatacgaggagtattggttcaacaaacgtgattctctggtgatcgtcgccaggctatcgccagaatttaccgccgctgtagtcgatcgctggcaagagctggagaacagccaggccgtcagtgtcccgcaaacattgccggaggcattacgtctcgccgcagatcttgccgagcagaaagaacaactcagccagcagttagccgctgccgcgccgaaagttgagtttgtcgatcggtattgtactgccaaaggctcaatgtctttccgtcaggtggcaaagctgttgcaggccaaggaaacagatttccgcttgttcctcattgagagcgacatcatgtaccggcttggcggagtgctgacaccgcggcaccagcacattgctgccgggcggtttgaagtgaaaactggcactacgagcgaaacaaactacgcctttagccaggcacgttttacaccaaaaggcatcgagtggatcggcggcttgtggacggcacacatcgctaaggagcatgccgcgtga

SEQ ID NO: 120577 - DNA, 1938 bp, Enterobacter cloacae
atgcgtgaaattatcgttgataactttgctggtggtggcggcgcgagtaccggcattgaactggcgatcgggcgtagcgtggatatcgctatcaaccacgacgaaaacgctattgcgatgcataagacgaatcacccggacacgctgcattattgcgagtcggtgtttgacgttgacccaagcgcagccaccagcggcaaacctgtcggtctggcttggtttagccctgactgccgccacttttccaaagcgaagggcgctaagccggttaagaaagagattcgcgggctggcgtggattgtcctgcgctgggcgctggcagtacgtccccgcgtcatgatgctggagaacgtcgaagaatttaagacatggggcccgctgctggatgaagaattacgcccagatcctgagcgtgctggcgaaacattcgaggcatttgtcggcatgctgtcgacggggatcgcggcgaatcaccctgcgctggctgaggtttgtgaatttcttgccattgagccgcacggccagcaggcgcaacagctgatcgccgggcttggctatgaggtcgattatcgtgaactgcgcgcttgtgactacggcgcgccaacgatcagaaagcgtttcttcatggtcatgcgctgtgacggccgcaagatttattggcctgaagcgactcatggggatccaaaatcactggaagtacaaagcggcaagctggcgccatggcgtaccgcgtcggagtgcattgactggaacatcccggcccgttccatcttcgaccgcaaaaagccgctggcggaaaatacgctcaaacgtatcgcgcgcggcatccagcgctttgttatcgaaagcgcatcacctttcatcgtgaagtgtaaccacaccacgacgaaaggaggttatgactgtttccgcgggcaatcgttgttagagccattgcagaccatcactaaaaagcatggctacgcgctggcggtaccgcatcttactaaattccgcaccggggccaccgggcagccagtgaccgagccggttccaactgtcaccgctggtacgtcggcgcgcccgggcgggaatgggcacgcgcttggcgtagttgaggccgccctgacaccgttcctggctggcaatggcggcagtgagtaccaggcaaagccgcgcccgctggataaacccgctcatacaatcctcaagcagtcccgcgcgtgtgtggttgctcctgtcatcgcccgccagtttggtgccagtgttgggcacagggcagacgagcctagcgcaacgattactgctggcggtggcggtaaatcgcagctggtaaccccaacactgatccagatgggatacggcgaacgcccagggcaagaaccgcgtgttcttcaactgaataacccgctcggcacggtcactgctggtggtaataagtttgcgacggtgagcgcgttcctggcgaagcactatggtgggaattacacggggccgggtgttggtatggatgagcctgcccactcagtcactaccgttgatcatcacgcggtagttgcgtcgcacctggtgaagctgcgcggaacctgccgcgacggtcagaccatggatacacctatgccgacgattaccgctggtggccagcacgttggtgaggtccggacattcctcgaaacctactgcggtgaaagcgaggatgaatggctggtgacgatcgaaggagttaagtaccagatcgtcgatatcggaatgcgcatgctgcaaccgcatgagctttataaggcgcagggcttccctgacggctacgttatcgatcaggactatcgcggcaatcgttacgccaaagacaagcaggtagcgcgctgcggtaacgcagtaccgccgccgttcgctcgtgcgctggtagaggcaaatcttcctgaattatgtgcaaatcaaaaggcgggtgcagccgcctga

SEQ ID NO: 120578 - DNA, 897 bp, Enterobacter cloacae
atgagcatgaatgctgatagcaaatattgccgcgcgctggctcaactgcgctctaaaccaacccacgagttgaaagaggtcggcgatcaatggcgcactccggatctgttgttttgggggatcaatgcgatgttcggccctctggtgttggacctttttgccgacgacagcaacgcgaagtgtcctgcatggtataccgcagaagataacgcgcttactcaggattggtctgagcgtctggcagagctcggtggcgccgcgtttgctaaccctccatacagccgatcgcagtaccatcaaaagcaggcggttacggggatgacccacatcattaaccatgctatggcaatgcgagaaaagggtggtcggtacgtttttctcattaagtctgcgacgagtgagacgtggtggcctgaagaggcagaacacgtcacatttatccgtggccgcattggtttcgatcttcctgtttggtttgttcccgctgacgagaagcagcaacccaccagcgcattttttgccggggcaatcgctgtcttcgacaaaacctggcgtggtgaaagcttcagctatatcaatcgcaccgaactggaagaaaaagggcgtgcagcattgtcgttagctcaattcgccgcggcaaaaatggcccttccgtcggtgtcggaaaaagcaatgcctactcccattgcaacggcagatgcagagtcgcgcatctggcctctggaggttggtctggtattcaatcaggtcgagggggcggattctctgggggtgaaccaacagaacaagttgaaggccaacatcaaccaactctggctggagcgtgtgcctaccagcgaaataattagcgtggtcggtggtctggttagcagtatgcagggggccgtcaatgcgtga

SEQ ID NO: 120579 - DNA, 864 bp, Enterobacter cloacae
atgagcactaaattaacgggttacgtttgggatgcttgtgccgcttctggcatgaagctgtccagcgttgccatcatggcgcgtctggcagacttcagcagtgatgaaggtgttagctggccctccattgctaccattgcgcgccagattggtgctggtgagagcactgttcgcactgccatatctcagctggaaaaagacggttggttaacccgccagcagcgccgtaaaggcaaccgtaatgcatcgaacgtttaccagctcaatgttgcgaaattacaggctgctgccttttctcacctgtcagattctgacgcatcaaaatctgatgcctcaaaaaccgacgcgtcaaaatctgaggcatcaaaaaacggtgaaaaaggcggttttcacccgtcagaatctgggggggatccgtcagtaaatacaactactgatccatcagataaaaaacattcttgtccggttgctgcgcaacccgaccctgtggtggttatcactgatcaggcgaagcaggttttatcacatctgaacaagaccaccggatcacggtatcaggtctgcaaatcgtccttggaaaacatccgggctcgcctggctgacgggtttacgcccgatgagctgctgttggtggtggattacagcgtcgagaagtggggcgaggatctgaaaatggccgaatatctgcgcccaacaacgttgtttctgccatcaaaattcccaggttacctgcaatccgcaaataagtggaacgcagcaggacgtccagaacgacagtactggggctcaatccgtaagcatgatccgatgaaatttggtggaccagataaagccattccagctggcttcaggggagcgaaatga

SEQ ID NO: 120580 - DNA, 636 bp, Enterobacter cloacae
atgagctccaaatcttgtacccgcaccgttatacgcaggctacagaaactggggcagcatcggtaccacaggaaaaaggggaaagccgtgggtaacgaaccggaatggaaagttgataagcagccagcctggctggtggccgcaatcaaaaaaacgattaccgagctgcctggcggatattcagaagctgctgagtggttgggtgtgaccgagaacgcgctgtttaaccggctgcgtaccgatggcgatcagatcttcccgctcggttgggcgatggtgcttcaacgcgctggtggttcaaaccacatagcgaacgctattgcacgtcactcgaacggtgttttcgtgccattggctgacgttgaagaaatagagaacggtgacatcaaccagcgtcttatggagtcagtggagtggatcggcaggcattcgcaatacgttcgaaaagctaccgctgacggcgttattgatgctcaggaacgcgcccagattgaagagaacagctaccaggtgatggctaagtggcaggaacatttgacgctgcttttccgtgtgttttgtgcgccggaaaaaggtgacgcccgcgagtgtgcagctccgggcgtcgtggcagacaaatcttgtatggagaagtaa

SEQ ID NO: 120581 - DNA, 435 bp, Enterobacter cloacae
gtgtttagagtcgagttgctcgatgtcagcgccagtgctggcatgggccatatacaaggtagtgatgtcgtcgatgtcatcaggtccattgagtacaacaacgaaagagccgccgcattatttggtgggagaacaccagatacggtcaaagtgattaacgttcgtggtgacagcatggctgataccattgaaccaggtgatttgatattcgttgatgtttcgatcaatgattttgatggtgatgggatttatgtctttggttttgatgataaaatttacgtcaaaagattacagatgatcccagataaaattcttgtcatttccgataaccctaaatatcgggagtggtcagtggataagtccaatgaagacagattttacgttttcggcaaggtaatgatcagccagtcgcagtcagttaaacggcacggataa

SEQ ID NO: 120582 - DNA, 372 bp, Enterobacter cloacae
atgagtaatgaccgcatgaccgtagtgcccgatttcctgggcgaactggatgccggcgtgttcatgaacaagatcgcggcagctttaaacactaccgcgcttggcgttctgaacaacggtaccaaaggcaaagtagtcctcacctttgatattgagcgtatgggtaactccgtcgaagagaagcgcgtcaagatcaagcacaagctgaactacgtcacccctaccccgcgcggtaaagcctccgaagaagacaccaccgaaacaccaatgtgggttaacaaaggcggcaagctgaccatcctccaagaagatcagggacagttgttcggcattaacggcggcgttgacggaaagcttaaagcggctcagtga

SEQ ID NO: 120583 - DNA, 831 bp, Enterobacter cloacae
atgtctcagattttagacggcaatgcccttcagcaggtgaaagacctggttctttccggttaccaccttgctgctgttaaagaaacggcatgccctactgccctgctccctgatggtgtaaccgttgaaagcctcgagcgtttcgaaccggagcgttttcgtttccgcggatccatgagcacaaccagcatttctgattttgttcgttatgttgctggctacgccaacgaagccgaaccagcgcgctgctttatcgatgctgacaacatgaccgcacgctccgtcttcaatatcggtacgctggctaacccaggccatgctgataatgttgcttctatcaccctcaaaaagacagcaccattccgagccctgcttcaggtaaacggtgatcgtctaggccagaaagaaattgctgaatggctggaagactgggccgactatctgaccgcatttgatgccgacgggaatgtgttgtccattgcacaagcagctggtgctgttcgccgcgttaacatcaaacaagtctctgagtcagcccatgaagacgaagactttggtggcagaaaatccctgatgcagagcgttgaagccagtagtaaagacgtcatgcctgtggcctttgagttcaaatgcgtgccatatgaaggcctggctgaacgccgctttagcctccgcaacagcctccttaaaagcggggaaccagtctttgtgctccgcatcgttcaactggaagcacaggaagaagctatcgctaatgagttccgagatctgctgatcgagaaatttaccgatgagccggttgaaacctttatcggtaactttaaagcttaa

SEQ ID NO: 120584 - DNA, 540 bp, Enterobacter cloacae
atgagttatatacagacactttcaggtaagaaattcgattacctcaattcaaccgctgacgatgtagagatcgaggatattgcgactgcactttcccacatctgtcgcttcagtgggcatctgccggaattttacagcgtggcccagcactcggtgctatgtagccaaattgtgccgccagagtttgcctttgaagccctgatgcatgacgcggctgaagcttattgccaggatatcccggcccccctgaaagcgttgcttccagactaccgttgcattgaaaagcgggttgataagctgatccgggtcaaattcagcattacccctgatatgtcagcggtagtgaaatacgctgacctagtgatgcttgccactgaacgccgcgatctggatatcgacgacggttcattctggccttgtcttgaaggtatacccaccagcgacattatccagatcattcctcttcgcccaggccaagcttacggtcttttcatgactcggttcaacgagttgatggaggtgcgtaaatgcaacggatga

SEQ ID NO: 120585 - DNA, 198 bp, Enterobacter cloacae
atgcaacggatgaaaattaaagaactggttgccgtagctcatgctgcggctgggaaattgccaccagcagaagcttccctgatgcgtgaggttgccactcgcctggacgtaacattttctgctttgacggaatcgatggaccagcgaatgagccttgacgctgaaattaaccaccttcgccaggaagccattcaatga

SEQ ID NO: 120586 - DNA, 309 bp, Enterobacter cloacae
atgagcactcttaccaaagaatggcttcttaggacaatagcggagcttgaagaagaacgcgatgcgacgccaggcgcagtaaacgaagatgcaacgatggcacttgctgcgatgaaacgggcactggcctctctgatggctgagcctgtaacgacatcttacaagttgcctgagggatgtgcggttgtcccggttgagccaacacttgatatggttaaggctggcgctgcggccgtatctatagggatgcttattccagggatatacaaggccatgctcgcagcagcaccacagcaggaggatatttaa

SEQ ID NO: 120587 - DNA, 567 bp, Enterobacter cloacae
atgaaccatttaatgattgacctcgaaagcatgggtaaaaagcccacagccccaattgttgcgatcggcgcggtattctttgatccgcaaagcggcgtgctgggtgcagaattctatgcggccgtagatctttccagcgccatggctcagggtgctacccctgatggtgacaccatcctgtggtggctaaagcaatcagcggaggctcgcgctgcactttgtaccgacgataccagacatatcactgacgctctctctgagctgagttcgtttatcagccgcaattcagacaacccacgttatctgaaagtctggggcaatggcgccaatttcgacaacgtgattttacgttctgcgtatgagcgcgccggccacacatgcccatggcaattctggaacgacagcgatgtgcgtactatggttctgcttggcaagcaactggagttcgatcctaagcgtaacatgccctttgatggtattgcccacaacgcactagcagatgcccgccaccaggcgaaatatgtttcggcaatctggcagcgcctgctgcccaccagcactgagtaa

SEQ ID NO: 120588 - DNA, 1179 bp, Enterobacter cloacae
atggcggcaaggccaagaaaaaaagaataccgacacctgccagattatttattttttgataaagatcgcggtgtttataaattcactcttgttacaggaaagaagaagaatattggtaaggatcgggccatggctatagctattgcccgtgagtacaatctgagaatgagacctgaactttccccatccgttgataacctcattagagaatccggcggggttactggagaagccaaaccgtttgcagatcatgtggatcacatcatggctcgggctgttgaagatgaacgcccttctcaaagtactttagatgattggaacaatgacgcactacgcgtcaaaaagttcttcattaacataccggcttgcgatatcgagctggagcacgttaacgcctacatcaataagtaccatgccagcgcttccgcgaacgtgcaaaacagaaaagtcagcttcctcaaaaaactcttttcgtatgcggtcgatgaatccttgatgctcgataacccagcaaccaggaagaaaatgcgtaggaccgaagagaagaaaaggcaacgactgtcgctagagcatttcatggctatacgtcgtgctgcggcgccgtggttaagaactgcgatggatttggccttacagacgacacatgcacgcctggaagtgtctaggattcggtattcaatacgtgaaccaaagaacggtgtttgtggttgtgtctggctcgaacagccagatgatggaatatatggaacgctttacattcatcgtcaaaaggtacaaaaaaaggaagcatcgcacgttgcgattccaattggggatgagctaaagcgcataattgatgaaagtcgcgataatgtcgccagtccgtttgttgttcacaggattccagataggcaggttaaacgcagcaaagaggtatctcatccaactcaaatagctccagactatttaagtagatcgttctctgctaagcgtgacgagcttggcttatgtgacaatctaccaatggatgagagaccaacttttcacgaaattagagctctggcagcgcatctttttgatttgcaaggcatcgatcctcaaggacgaatggcacatagcgatgctaaatcgacaaagatttacacacaaaatcatattaactgggtaatagttcctcacggagaaattaaagcaggataa

SEQ ID NO: 120589 - DNA, 582 bp, Enterobacter cloacae
atggaaaaacatttccaaactaatgacacacctgaatcaagaaaggttttggaagggcagatcagagagtgttatggaagagtagtgtattcccataagactcatgagaaatgttcagatattcttctttctcgtttgtcaacgataaagttatcgcagataattctttctgctttgacaacaggtggtttcatcgctactttctttggtgcaggcgaaataggcactggtattggcattgttatttcaacattacttcttatccttaatgcgtacacgaaggactatgatcttggtgaattggcgcaaaagcataaacaagctgccaatgagatatggttaattcgagagcgttatttatctttactcactgacttagctatgggagaaaaaccaatagagcaattacagtctgaaagagactctttgcttgaaagtttacactcagtttattcaggctcccccagcacaacatttgaagcttataaaaaggcgcaggatgcattgaaaacaaaagaagatcttacattttccgatgaggaaattgatgcatttcttcctaaagatctcaaaagaaattaa

SEQ ID NO: 120590 - DNA, 882 bp, Enterobacter cloacae
atggggttaggtgagtggtttggtggattttgctccaatcttactgtaaaggatggcgggacaatttctactagatacaggaatattacgaagcgtttaaatacagatttttggggtagtgcctctgaaactactcatagtctttacgttggttcatatggtcgaaacactgcaacggaaagcatgagtgatttggatatgatttttcaactgccatactctgaatatactaagtacaatggttatttaggaaatgggcagtcagccttgcttcaatcagtaaagaaatctatagaaaaaacctactggaatacaagtatcagaggcgatggtcaagttattcttgtcccgttcaatgatggtattacatttgaggttgtccctgctttcattaatgtagataatagttacacttatcctgatgcaaacaatggcggccgctggaggacaacgaatcctaagccagaaatttctgctatgaagttaagaaatgaccttaccaataaaaatttagtgcaactttgtagaatgactagagcatggaaaaaggaatggaatgtacccataagtggtttacttattgatactttagcatatcaatttatagaaaattggggattcaaagataaatcatactactattacgattttatgagtcgtgacttctttaaattcatggctgaccaaagtaccagtaaagaatattggaaagcaccaggtagtgggcaatatgtttatgggaaaggtcttttccaatacaaggcaaaacaatgctataatattgcgctagaagctatatcgcatgagttagctaatcccaagcgcgagtggtctgctaaacagaaatggcgggagatttatggaaaaacatttccaaactaa

SEQ ID NO: 120591 - DNA, 1227 bp, Enterobacter cloacae
atgccgccgtgggcgctgccggctgcggcgacgcagatgggctttatgagccgcaccaaggacggttccgtggacaacgccaacgccctgcgctttgaggacaaggcgggcgcagagcaggtgtggatccaggccgagcgcaacatggacaccagcgttaaaaatgatgaaacgcacaccgttggcggcgcgcgcagccattacgtgaagaaaaatgagctgcatcgcgtggaggctaatcagatccaggccgtgaaaggcggaaccgagatcctgacgggtaaaggcaagctggatgcagcggtggagcagtacgtcattgcttccgggacgaagctgcggctggtctcgggcgagagtgctattgagcttaacgctaacggcaaaattaacctgatcggcaaagagtttaacttctttgtggaaggggatgggtatatcaccacaggcggtaagctgcatctgaatacgtcgggcaccaagccgggcacaacggcgccgggatcggggcataaaggggatattgatgcggcggtgcaggagaagttttctccgaataaaagtgctaagaatccggctcccgcagcttcagcgccagcagcaaccagaccaaaaccaacaacaaaatttgcatcagcgccaccattaaaagggagttacgtctatcaaaataattcctacaactctgatgtgatgcccttcagtgaagatgtagttaaggaaatcaataagtcaccaacgcttcagacacaattaaaagatctaaaagataaagggtgggctattcagccgggagcagcaggaggggggagttacgctgatacgaataacaaattgattgtcatggatcctgaacacatggaagatacagccacaacggtgcaaactctggcacatgaggcagggcatgcaacttatcctgttgcggtagattcttcgagtaaggaaagcttcatcaacagccagcttatggatgaaggtggagcaacgctgaataacattaaaatacaacgcgagatccttgcaaacggcggtattgatattgatatagcgggaagtgccgaaaacctaaaagcatataattctgcctatgataaaatggtaagtggtgagttatctcgcattgatgcagccaaagcaataggaaaagtgtatggtaaaggcgaaatagcctcagggactaatctaaattataatgattactatggaggattctatggaaagtag

SEQ ID NO: 120592 - DNA, 441 bp, Enterobacter cloacae
atgaaatacaccctccaggaaggttcctttaccctttttcctgccgcctggcaggacaacagcatgaacatcattcgcgatgacgaaagcgggctgtccgtggtagtcagccgcggcgttatcccggatggcagcgactacgaacaagagtttcaccgccagtgggacgtgctgcgtcctcagatgggtgagatcgcccagagcgaatttcagcacgtaaaagccgggcctgacggaaaaattaacgggctggaagttgagaccacctttgaccgtaacggccagcgcctgtggcaaaaacagctggccgtgcagacgccaggcaaaccggtactgatgatttttaccctctcggccttaaaagcctttacggaagaggacgaggcgcgctggagcgcactgaagcaaagtctgacgctaaacgacaaccggaatgtgtaa

SEQ ID NO: 120593 - DNA, 4434 bp, Enterobacter cloacae
atgagcgataacaacgcggcccgtaagggcgacgagattattcactccagcatttttgctgatattaccagcattgtggcggaaggtgccgcctatgcggtgattggcgcggcggtgggcgcagcagcgaccgtcgcggccccactgctgggagccggggccgcagcagcgggcgtggcggcgattggatccagctgtctgttgagcggcattatcggcggggttctggcgaacgtcgccgggatcaccgacgatatcagcaacgccgctgaagggctgggtaacgcgcttttcccgccgtcgcccgcgggcaaaatcaccaccggttcgagcaacgttctgacaaataaacttcccgctgcacgcgcagccgggacgttaacgcctgccgataccccgtcccctgagccgcagtcgccgggcagctttgccgactacgcgggtatgctgctctccgctgccggacagttcggcagcgagatgtggcagccgagcgtcgcctctgctgccgcgggaacctcgccgctggaagaagacaaggtggcttgcgaaaagcactccgggccgcagtatctggcggaaggctctaaaagcgtctttatcaacggacagcccgcggtacgcgcgaaagatcgcaccacctgcgaaggcaccgtttccgacgacgtctccccgaacgtgatcatcggcggcgacaccctcacggtccgcgatatcaaaagcggtaaaacgccgggtctggcgttggggatgattgcgctctccctgctgcgcgggcgtccgggcaagatcctgaaaaacatgccctgcgcgctggctgctgccggtggcgggatgctggctgatatggccgtcaacgccgtgttcggctcctcgcacccggttcacgctgctaccggcgtgaaggtgctgaacgacgacgatgaactcgatttctcgctgccggggcgctttccgctgcgctggcagcgcagctacaacagcctgaccacccgcgaagggcttttcggtctgggctgggctaccacctttgacagctatctgacgctggaagaaaacaatgccacctggttcgatgaaaccgggcgcgagctgagctttgaactgccgccggtcgaccgcgcgttttacagcattagcgaaggcatcattatccgccgcaatgagagcggcgacgtggcgatagccgacgatgacggcgcggtgtggcgtctgtataaaccgacccgcgctaacccagccatcatgcgcctggcctccctcagcgacgaatacggcaacgcgttgctgacggaatgggacgagcacggcaggctgatcggtcttcacgacgagccgcgagcgatcgatgtcaccctgcgctatgacgatgaacgtttcccgcagcgtgttaccgcagccagccatctcgacggcaaccagacatggccgctgatgcagtgggggtatgacgcgcgcggccagctggccagcgcaacggatgcctccggcgtggttacccgtgaataccgttataacgatgatggcctgatggtctggcaccgcttgccgggggggctggagagcgaataccgctggcaaaaattcgaccattggcgcgtggtggaaaaccgcaccagcaccggcgacggctgtcgctttacctatgatctagccgccgggcttacgaccgtcgaacactacgacggtcagacgcgaaagcattactggaacgcgcaaaacctcattgttcgctacgttgacgagagcggtgagaactggcgctacgagtgggatgacaacgaactcctaacgcgtcgcatcgatccgctgggtaatgccgttaccttcgtctatgacgacatgggcaaccgggtgcaggagatcgacgccgacggcaacacccgcaccaccacctggctggagcaccgcgcgcttcccgcggccattatcgaagctgacggcagcgccacccggttctggtacgacgaacatcacgggctgaagcgcgtggtggacccgatggggcagaccacgctgctgcgtcgggacgagtttggtcaggttgtggaagaagtcgatgccgccgggaacagccgctaccaggagtacaacgaggccgggcagatggtgcgtgcgacggactgttcgggccgtgtgacacaataccgttatcatccgctgggctggctggtggctgagacagccgccgacggtgaagagactcgctaccgctacgacgccgcagggcgtccggtgcagctcgatcgcccggaaggctggacggaatcgctcaaatggaacgaacgtggcctgccggtgaagcatgcgggcgccgacgggaaagagagcgagttcagatacgacgaagcggggcgcttaaccgccacccgaaatacgcagggtgaagaggtgcgccgccgctgggacagccgcgggcgtctgattgccctggaaaacgagaacggcgaagcgtatcagttccgctggggcgcagactcgctgctgctggaagaggtgggactcgatggcgtggcctcgcagtatcgctatgacgcctgcgggcgtacgatagcgcgcacctttgccgccggacatccggaggccatcacccatgctttcgcctggagcgcgagcggccagctggtcgcccgcaccacgccggaagggcagacccgctaccactacaccccgtccggccttctgagccggattgggctgcatcccgcgctttcagccgatgcctggagtgccgaggccgagcaggagcttgtgtttgagtatgacgcgctcgggcgcgtcacgcgcgaagcgggcgagcatggtgatctggcgtggggatatgatgcgctgggcaaccgcacctccgtcacgctgcccgatggccgcgagctgaaacagttctactacggcagcgggcatctgctcagcattgccctcgataagctgtcggtctccgactttacccgcgacgagcttcaccgcgagaccagccgcacgcaggggctgctgaccacccgcagcgaatacgaccgcctcggccgactgcaccgccgggacgtttttaccggcaatgcccagcgcccgtcgccgcgccgctggtcccgccgctgggattacgactaccgtcataacctggtgcgcgaagagcgggacgataacccgttcagctggtaccgctggcagtacgacagcgcaggccggctgctggttcaggacggcacgctgcccggccaggagcagtggcgctgggatgcagccggtaacccgcttgaagggtctgctgagaaggtcacgcacaaccgcctgacgcagctgaacggcattcgctggcgctatgacatccacggccgtaccgtggagaaggataacggccagacccgctggcactaccgctatgacagcgagcatcgcctgacagaggtcatcagccagccaagggaccgcaacaggccgcagacgctggtcagcttccgctacgatccgctcgggcgacgcatcagcaaaacgcgtcgccagatggtgggcggacagccaaccggtaacccagtcaccacgtggtttgtatgggaagggttccggctgttgcaggaagtgcacggggatgtgccgctgacctacgtctacagcgatcaggacagctacgacccgctggcgcgtatcgacggggttgatgccccggaaatcttctggttccactgtcagccgaacggcacgccggaacggatgacggatagcgaaggacaggtgcgctgggaaggggtgaacagcgcctggggcaagctgctgcgggaaagcgagacgcaggtatcaggatattctcagaacctgcgcatgcaggggcaatacctggaccgcgagacagggctgcactacaatctgttccggtattacgacccggactgcggaaggtttacgcagcaggacccgatagggctggcgggggggataaacctttaccagtatgcgccgaatgcgctggggtgggcagatccgtgggggttgagccgcgagtgtagcggtaaaacaaaacctgatttctatgttggtccaaatggccctagttcgactatgccttctacagcatatcgttatatggatagcaaatatgctccacagacaatagaaaataaatcagccccgttaagttattttgggtatacgaaatataaatctgcacatgaagccagggacgcctatcaaattttttatgagaaaggtaatcctgattcatggagtgatgcacgtttattaggtgagtttgatacattacaactgtataaaaatggagtgcctcaggtgcaagtacctcttgccaatggtggtcgagggcctggatatgagcttttcaccagtgcatatcctgagtatggtaaaggtggggcattacagttgctaccaatcgaacgtaattaccctgttatttttgaacgtgttactataattccggagtaa

SEQ ID NO: 120594 - DNA, 207 bp, Enterobacter cloacae
atgacagatgaagagttacgaaagaatcttgtttttttaataaaaaaatatgttccggaaagtcaacaaaaagcattttatgatgatatatcaaagtctactgtgccagtgaaaggtattttagctgactttaataaaatcaaaaccagaactgttgatgaagttgatggagatttaatacgggatatttacttttatttttgttga

SEQ ID NO: 120595 - DNA, 288 bp, Enterobacter cloacae
atgaatgataaaaaaatacaaatagttgagctactgatttcacatagtcaaatgttgttacgatccagagactatgacgaaaagctgaattactggggaaaaggcaatgtttctcaaggtgctgttcttcacaaagattatgttatattcgacccattactagaggacgcatttggagccaacgtcaatatcaaaatagataattcttttatattagatgaaactgctcaacgctgcattgtagtgccattttttattacaaataaaaataagcttcaggtcgcatga

SEQ ID NO: 120596 - DNA, 483 bp, Enterobacter cloacae
atgattgaatttaaattcaacccgattaccggtgagctaaaccttgatggtcttcctttaaaaatagatactgaagaaggcttttgtaagtgtgatttataccacgaattagtaaaacgcaaagctgtaaataaaaatatgtcgaatcactaccttgttgactcagtaatgtttttcgataaagaatttcaagttactatacgcccggtgtgctatggttttcattttatgcttcatcttgttgataaaaatagtcaatactataaatcattaaatgattggaatgcacgaactaatgttcacatgctaaatgaatcagtgaaaagcctgtctgattggctgaaagaatcactgaacctggacacgcctgataccacggaaacagacatcattaggtggaactttgagtgggggcgggtttcagtctcatatgagacaaagtcatttaatcatggggtatatatagtttggaatataaagtag

SEQ ID NO: 120597 - DNA, 156 bp, Enterobacter cloacae
atgttagaaatgaaacttgatgttcatactggatttgtagaaattaacaactaccccatcgaattaaaagatgttgatacttttaaaaattccgcattttacaagttttttctcgccattgactacagtaggtcctttttatttcgctatcgataa

SEQ ID NO: 120598 - DNA, 381 bp, Enterobacter cloacae
atgaaacttactaatcgactgaaaaagaagttattagtccttgatggcattgacaatgatttcatagagtatggaaaggaaataacatgccctgaatgcgagggggtaatagtctactctatcgtaaactcatatgagtttgacacgctcacagaagaggtaaaatgctttttggttaagaaaatgagaggtgtgaagctttatagtgaacataagaaatatagctatgatgaaagccaattagatgtttcgaaaaacacatgttcaaagtgtttaaaagagttttccgctatattaacgtataaagaagtgcagccagcccgataccgggtatatcttgtggggctttttgaaggtgatttgaagcagatcaaactttaa

SEQ ID NO: 120599 - DNA, 237 bp, Enterobacter cloacae
atgattgaaaatctcatttgtattaaagaaaaagacctgcttcaatgggcatgtggtgaaagtaacatactggttagtgtgccttttttaagctatgcattggtcgacttaacacgccagttagtctttgtgttaagcgagcctaagccattaccaaccgttttgaccatcttcaatgtgcagggcgaaaaactattttggtctgccctcctgaaggtgcgactttctattacttaa

SEQ ID NO: 120600 - DNA, 1536 bp, Enterobacter cloacae
atgtctgtgaatactgaaaccgcctccgcgcaggggcagaccaccgtactggaaaaagagggcgtttacgcctccctgtttgaaaaaatcaacctgaccccggcctccagcctgggggatatcaatgcgtttctggatgacgccgcgctttctgacgctccggcgggtgaacgcctgacggcggcgatgcaggtgtttatggactgcatccgcaaatccggtcagccggtggagaagctcgacaaaacgctgattgaccaccatatcgctgagctggatttccagatcagccgtcagctggatgccgtaatgcatcaccaggagttccagaaggtggagtccctgtggcgcggcctgaagcagctggtggacagcaccgactaccgccagaacgtgaaaaccgaaattctggatgtgtcgaaagaagatctgcgtcaggactttgaagacgcgccggaacttatccagagcggcctctactggcacacctataccgccgaatacgacaccccgggcggcgagccgattggctccgtgatttcatcctatgaatttgacgccagcccgcaggatgtggcgctactgcgcaacatctctaaagtgtcagctgccgcacatatgccgtttattggctctgtcggtccgaaattcttcctgaaagactccatggaagaggtggctgcaattaaggatatcggcaactacttcgaccgcgcggagtacatcaagtggaaatccttccgcgacaccgacgacgcccgctacatcggcctcgtgatgccgcgcgtgctggggcgtctgccgtatggcccggacaccgtacctgtacgcagctttaactacgttgagcaggtgaaaggcccggatcacgagaaatacctgtggaccagcgcgtcgttctccttcgcgtcaaacatggtgaagagcttcatcaataacggctggtgcgtgcagatccgtggcccgcaggcgggcggggcggtgaaagacctgcctattcatctgtacgatctgggcaccggcaaccaggtgaaaattccgtctgaggtgatgatcccggagacccgcgagtttgagtttgccaacctcggctttattccgctctcgtattacaaaaaccgcgactatgcctgcttcttctcggcgaactccgcgcagaaaccggcgttgtacgacaccgcagatgccacggccaacagccgcatcaacgcccgtctgccgtacatcttcctgctgtcgcgtattgcgcactacctgaagctcatccagcgcgagaacatcggcaccaccaaggaccgccgtctgctggaactggagctgaatacctgggtgcgtagtctggtgacggaaatgaccgatccgggcgatgagttgcaggcttctcatccgctgcgtgacgcgaaagtggtggtggaagatatcgaagacaacccgggtttcttccgcgtgaagctgtttgcggtgccgcacttccaggtggaaggcatggatgtgaacctgtctctggtgagccagatgccgaaagcgaaagcgtaa

SEQ ID NO: 120601 - DNA, 1344 bp, Enterobacter cloacae
atgaaaatttatcgtccgctgtggaacgagggggcgttgctgtcccctcaacaattccagcaacagtccgactgggaaacttttcgcagcacaggcgttgcggcacttgcctcgccgtttgcatggggcgttgagcgagttgaaattgatgaaagactgctggaaacaggtctgatacagatttcacagctgcggctctggctgcccgatggcacgctggtggatacggtagtcagcgacctgccgccggaaccgcgtgaactggatttatcacctcattcagacgcggttacggtggtgattgccctgccgttgatgcagtccgggttaaataacgtgctccaggaagcggcagtggctgatcggccgctccgctatcgtgaggagtgggtcaatgttcaggatgcgtttggcagcgaagaggagtccgtcgctgttgcccgctttaatctggcgatccgttttgagcatgaggataacgcgtcgtggcagtgctgtccggttgcacggctgatccgggacggacaggggagctggcgtcatgatccggcattcattccgcctatggccctgttttctgccagcccggcgatgcgggaaaggctggtgttactgaaccgccagcttcgctcccgccgccaacggttgatggctatgcgtcgggaaagtaatgagcgactggcggattttgctgtggcggatgtttctcttttttggcttctcaatgcgcttaactctcatgccagggtactggtcgagtttgaacgttttccggctcgccatccggaacaggtgtgggcagagcttgcgcggcttgcgggcagtatgctgacgttttctctggacagcgatctggacgcaatccctggctatgaccacgcccggcctgaaatgacgtttccaccgctgtttgaactgatcgccggtttactggaagccagcctgccgtcccgtgtgatagcgctggagatgtcccgacctgacgcccagacctggaaagcctcgctgcacgacattcggctgcgtgaagaagccgatctctggctctctgtccggtctgacgttccggcctggcaagtggcggagaaattcccggcattatgcaaggcgggttccccggatgatgtgaatgcgatttccaccgttgcgctgcaggggatcccactcattgccgtgaatcgcgtgcctgctgcgttaccggtgcgaatggagaaccagtacttcgcgctggacatggaaagtgctgcggcacgggacatgctggagcaggggatctgtatgttctatgtgcctgctttgctgggacagcttgaacttgaactgtttgcggtactgcgatcatga

SEQ ID NO: 120602 - DNA, 297 bp, Enterobacter cloacae
atgagaaaagaaaccgatatcgatgctctgatggcggagacctggctcaccgtcaccctgcttaagcagggggcaacaacgcctgacgggaatgtgctgtacgacacctgctgcaaacatgtggaaagcgtgcgcgaggcgctggatcgagcaggatatgatgaagccagtgtcgatcatatctcttatgcgcaatgtgcgctgcttgacgaagtggtcatgagcagaaaactgcctgacggggcagatgctgatgcgggccaggtagcctggcgaaaagcgccgctaacggagtga

SEQ ID NO: 120603 - DNA, 2442 bp, Enterobacter cloacae
atggctaaggtaaaagtcaaaacgctcattggcgcaacggctggagttctgttttttttgacagcgaccgtcgcatttctgttttatgcgttcccgcaatggctggcatctgccaccgggctgggaccgtatgatggacagcgcatcctgacattttgcgcattgttgaatgcagccatattcctgttgggatggatgacagaaaaagcgttcagctatgcggggaaagcgggtctttatcttcactggggaaatagccaacggcaggccatggcgcattcagcagagatcccgtctgctgatggtgatgggcaggtagccacttacagtgatgaacagatgtcagaacatctggagatgcgctatggacgtcgctggcggtctaaggtccggatcctgcttgtgcagggtaatactgacgagacggaaaaagctgcgcccggactttgtcacgacctctggcaggaaggtgacggtaatgttctggtatatggcggcgatgcgcagtctcttcccgacgagcacttcctgtcccggttaaaacgcctgcgtcctggcaaacctgtggatggcatcatccacgtaatggataccgcagcgttgccaaccgatacagagcgcgatgcgtttttacggtgccgccagaaagccgattatcttctgggctggcaggctccggtctggctatggctgatcgacaggacagctacttccggcgatcaggctgaccctgtagcgaccggcgcgttatttggccctggcgtgacctcgcaggatgcgctcagcacgctggatacgctggttccgcatttacgccaggtcgggatgtcagaggtgctgaacaacccgcatcataactggctgctgcaactctcgtcccgcctgcagggggacctgaaggtaggcctgcacgccctgtttgacgggttgatgcagggctctgctgcttatcggctccggggagcgatgttcagccctgaactggccgttgccggttcagtacccaatacccggcttgatacgcccggctggaaagccgttattgatgactgctctaccatccgcgccagaaaattaaccttcgactggcttaaagggctgtgtttacttgtgcttgccctgattgtcctctggggagccggtacactgctgtcgcttgccgtcaaccgggcgcagatataccaggctcagagtaccgcccgtcttgccgcggatactgaaagcccgctgacagagcgtctgcgtaaccagcttgtgctccagcaggcgattgcccgactgcagaaccgggaagcaaccggtgcgccctggtacacctgctttggactcaatcaggaccacgacacgctcgtggccctgtggccgctgtatgcccgtaataatgcgctgttggtacgggatgccacagctgcgcacctgaaacagcagcttcaggcttttgttaatctccctccggccagtgatgcccgtacgcagggaacacaacgggcttacgatgtgctgaaaagttatctgatgctggcccgaccggacaaagccgaagcaggatggctggcgaagaatatgctgaaggcctggccgaaacggcagggtatgtcagatggcgcctggcaggaaatggcacccaaactgctgggcttttacgctcagaatcttccttcacatccggaatggaaaattaagcctgatgccggacttgtcacgaccgtgcgccagatcctccttaaacagattggccagcgtaatgctgaatccgggctgtaccaggacatgctgaagcgcgttgccagcaactggcctgatttaacgcttgccgatatgaccggcgacacggatgcctccaccgtcttcagtacagaagaagtggtgccgggcatgtttacccgccaggcctgggaagaacaggtgcaggatgcaattgatgaggtggttaaaacccgccgcgatgaaatcgactgggtgctgacggataaaactcaccagcccggaagcgatatttcgccggaagcgctgaagtccagactgaccgaacgttactttaccgatttcggcaatgcctggctgaatatggtcaacagcatccagtggcacgaagcggcctcgctctctgacgcgatcgcccagctcaatctgatcggtgacgtgcgccagtcaccactggtggcgctgatgaataccctggcatggcagggaaaaaccggcgagaagggggaagcgctggcggattcgatagtggattcggcgaaaaagctggttggccggaaaaagaacgtgaagcagtttatcgaacaggcgcagggaccgcgcggtccgctggacgatgtgtttggtccgctgacgggattcatggagggaaaagagggaaccggacgtaacggtaacctgagtttcccgtttcctggccttgctgggtaccatgcgattgcccacccgcaatgctga

SEQ ID NO: 120604 - DNA, 921 bp, Enterobacter cloacae
atggcactggaaaagggtattgaacggctggttcaaggatttatcgctgcaggtcgcccctcatcgcgtcgccagacaattgaggtacgacgagcaggctatattgccagcacggagcttgccgggaagaccgaaacgcgcgttcagctggagacgcttgttcttgagggtcttaccattcgggtattttcacctctcaatgcgcctgaaatattgcctgctgccatctactaccacggcggatgttttatcagcggcggctttgatacccatgacaaccagctccgtcagttagcctactacggcaattgccgggtgattgcgattcagtacagactggcgccggagcataccttccccgccgcacatgacgatgctgaaagaggtgcgaatctggtctggcagtatgcagacgaattaggcgtggataagaaccgactcaccctctgtggagacagcgcaggagggcatttggcgctggtaacggcgctgcggcttaaggttaaagggctgtggcaacctgcgcagcttattcttatctatcccatgctcgacgccacggccagttttgaaagctataccctcaacggcatggattacgtgattactcgcgatacccttttgagcggctatgaaatgtatctggctggagccgaccgtcagcatcctgaagtcagtccactgtggcgcaacgactttagcggtctgccgaaggtccatattgttaccgctgagtatgatccgttacgtgacgaaggcgaggcgctttatcagcgcctcacggagcaaggcgtgaagtgtaccgctcaacaatggcggggtgtaattcacggcttcttccagttgggtggaattagccagtcagcgcgagacattatgcgagatattgcctggcgcattaaccatgccgggcgagagtga

SEQ ID NO: 120605 - DNA, 1266 bp, Enterobacter cloacae
atgaacacaacaacctgtacccacaaagacaaccctaacttctggatcttcgggctgttcttctttctctacttcttcatcatggccacctgttttccgttcctgccgatctggctgtcggacatcatcggcctgaacaaaacccatacggggattgttttctcctgcatctcgctgtcggccattgccttccagccggtgctgggggtcatttcggacaagctggggctgaaaaaacatttgctttggatcatttcggtgctgctgttcctgttcgcgccgttcttcctgtacgtcttcgccccgctgctgaaaaccaatatctggctgggggcgctgagcggtgggttgtatatcggctttgtcttctcagcgggttcgggggcgattgaggcctacattgaacgcgtgagccgcaacagcttttttgagtacggcaaggcgcgcatgttcggctgtctcggctgggggctgtgcgcctcaacgggcggcatcctgttcggcatcgatccgtcgtatgttttctggatgggatcggcggcggcgctgttgctgatgctgctgctggtggtcgcgaaaccgaagcccaaccagacggcgcaggtcatgaacgccctgggcgcgaaccagcggcagatcactgctaaaaccgtgttcaacctgttccgccagcgcagaatgtggatgttcatcctgtacgtgattggcgtggcctgcgtatatgacgtcttcgaccagcagtttgctaccttcttcaaaaccttcttcgccacgccgcaggaggggacccgcgcctttggtttcgccaccacagcgggggaaatctgtaacgcgatcatcatgttctgctcgccgtggatcattaaccgcatcggtgcgaaaaacacgctgctgattgccggggtgatcatggcgacgcgcattatcggatcgtcgtttgccaccaccgccgtggaggtgattgccctgaagatgctgcacgcgctggaagtcccgttcctgctggtgggggcattcaagtacatcaccggggtgtttgatacgcgcctgtcggccaccatctacctgattggcttccagtttgccaaacagtcggcggcgatcttcctctccgcctttgccggaaatatgtatgaccgggtcggcttccaggagacgtatctgatactgggctgtttcgtgctggcgatcacggtggtgtcggcgtttacgctgagtggcaggcgggagattgctgctagcaggggcgcggtggaggtgaattag

SEQ ID NO: 120606 - DNA, 1785 bp, Enterobacter cloacae
atggatattgaaagccttatcgccgcggcaaatcgggcccagcaggcagaagatgctggtttagggaactgttcgcggatatggcatgttggcttcttctttgacggtattcacaggaatatagaacaggacgcagcagaacgtcgacttagcaatattgctcgtttgtttcgtgcatttcctgatgatgcgcaaaaaacaagtaaagagtactactcaaagttttacatttctggcctgggtacccctttccatgaaaccattgctgaaaagcttcacaccatcatggatggcggcctggacagcataacggataatttaaaagatcagcccggtgaaatggccaaagaatcgggtgtggattttttaaaaggcaacagctggtacgagattttaaaacatcagggtaagaaactccttaaccctgtggaatggaaatatctggccttcgacactgcaaaaaatgcggccaaaaaagtcagtatcgaagccaccccctggctgcgcgataaccccacaatagcggatatgctggtgactggcgccgatacccgtattgtatcgaccaaaataacgtttgaagagggatacaaagaagccgttaaaaaaagcccggtccccgttaaactcatttctgtctcccttttcggttttgacctcggcgctaccctggcacgtaaattcctggacagtctgctgaaagatatctgtaagaaagagggggataaatacacctaccagggcatacccgtcgatatcgtctttaccggcctgtttgactgctcgcgacgcacgtcggccagcaacaacaacggcgtggattactttatctctgcgtttggcgggccgataaaagggattagcgtgttgctgggagacaagtccatcgaccaggatacccccttgcctgagtcggtaaagaaaagcctgcatctggttgccgcccatgaaacccgcgtctggcgctgcctgtaccgcaccggcaataacccggcgcacaaggaagaactctatcccggatgcgcggaggatatcggcgggggcctgaaacctgacgaacagaagcccagtgcggagctttgtcgcgtggcgctccacaggatgtaccgtgaggcggccatggcgggcgtgcctttccctgattttcagtcgttaaatgaaagcaaccctgttgttgccgagtatttcatcgtccaggacaacgtcaaaaaccagtccgtcctgcagtgggcagaggcgtaccagagcgcactaccctttacttcattaagcaccgcatgccagaaccgtcatctggacagctatatcgactggctgggccgtcagtactatcagtaccgcacggaatgcatgaaatatgaaaaacatcgcggtgatacgctggccgcagctggcgcatcggcagggtttgctggcatcacgcaggaggcgaaagagaccgccgagcagtacgccagtgaactggccgtattgcagcaaaactggggctggcttgatgacgtgaaggatgccgccataagaatgcgaaacagtatggaacaggaccccagggacaaacgcagggatatcgttccaaacgtatatggacccgcgctgtggcgtgcgaagcggtttctggaatacttccacgcggcaaatctcggtaagccccggccattacccctggataccgcaccgccagaaatatacgcatggttcgttcacgatctgcagacggtcgacaaaggggcgggtatttcgcaggacttttttgcgatccgctcaatggagatgcctgaagcctaa

SEQ ID NO: 120607 - DNA, 519 bp, Enterobacter cloacae
atgggatggttcggtaaatatcaaaatatagacagcgccgtgaatcgcggttatgcccgctggggaaaatggctctggggagcactgatactgccggtggtgatttatcttggctggtcggtatgggctgcggtctggggaccaccgtcagggccggtaacgctgattattcacagtgaaattgacaggccaataagagagtttagcgtaaacggcgtggcgggggcaaatgcatttgcttatggtggcggtggagcaacctgctgcggcagcataagcggggataaggcagaaattatctggactgtagattacacacttgcgcaatacaaggcgggggtgcgatcagaagtccacaaaaaaatattgcccatgccgcaacgtcagtggggagaaaattaccttcatacctatttcctgcctgaagaaaacgtccggttatggtggagtaccggttttaatcatcctgattctcgcgatattaaagaccaaacctcagaattaaaaaaggataaataa

SEQ ID NO: 120608 - DNA, 513 bp, Enterobacter cloacae
atgggatttttcagtgtgtataaaaaaatagacggcgcggttaaccggggttatgcccgctggggaaaatggctctggggaacacttatactgccggtggtggtttatcttggctggtcggtgtgggctgcggtctggggaccaccgtcagggccggtaacgctgattattcacagtgaaattgacagacctatcctggggtttagcgtaaatggcgtggcgggggcgaatgcctttgcgcaaggggggggaggggcaacctgctgtgggaatattagcggggataaggctgaaataatctggacgctggatattactcatgaacaatatcttaaaggtatgcgtctcgaaactcgtcgcacagaaatgcctatgccagtacggaagcagggcgaaaatgatttacacgttcatttcctcccgggcgataaagtcctgttgggatggagtgataacgcatggtcgccttatgaaacgcatcaggagaatgctaataacagggaaacagaataa

SEQ ID NO: 120609 - DNA, 1503 bp, Enterobacter cloacae
atgaccccattgctacagctttctggcatcaccaaggtgttccccggcgtacgtgctcttgagaacgtgcagcttgcgctgtggcccggcaaagtgacggcgcttatcggcgaaaacggcgcgggcaagtcgacgctggtcaaagtgatgaccggcatataccagcccgacgagggcgaaattctctacaaggcgatccccgttcaccttccaacgccggagtcggcgcataaaatgggtatcaccgccatacaccaggaaaccgtcctgtttgatgaactctcggtcaccgaaaatatctttgttggtcagtaccttcacaaaggcttcctgaaaaagctcgactggccggaaatgcaccgccgggcgcaggctattctcgctcgccttgaggtgcaaatcgacccgcgcgcaacgctgaaaaccctaagcatcgcccagcgtcacatggtggcgattgcccgcgcgctgtcgtttgaggcgcaggtggtgatcctcgacgaacccacggcggcgttgtcgcagcatgaaatcctcgagttttaccagattgtggagcgcttaaagcaggagggaaaagccatcctgtttatctcccacaagttcgacgagatttttgagctggccgatcactacaccattttgcgcgacggcgtgttcgtcggtgcaggggcaataaatgagatcaccgaggagcggatggtgtcgatgatggtcgggcgcgccattacccaaaccttcccgaaaatcgactgcgaaaaaggcgagacggtgctggaggtgaaaaacctctgccatccgaccgagtttgcgcatatctcgttctccctgcgtaaaggggaaatcctcggcttttacgggctggtgggtgccgggcgtaccgaattgatgcaggcgctttccggcgtcacgcggccatcgtccggggaaattatcctcaacggacagccccggcgcttccgccagcctgcggatgcgatcaaagccggtattgtctgcgtgccggaagaaaggcagaaacagggggcgattatcgccctgccgattgcccagaacatcagcctgcctcagcttagcacgctcaatccgaacggcgtgctgcatgacgaccgtgaatggaaactggcgaacgagtacgccaaacgcctgcaagtgaaagccttcagctggaagcaggcggtggagaccctctctggcggcaaccagcaaaaggtggtgatcggcaaatggctggcgacgcaccctgacgtgatcatcctcgatgagccaacaaaaggcatcgatatcggctcaaaggcagccgttcatcagtttatgtccgagctggtcagtcaggggctggcggtgattatggtctcgtccgaactaccggaagtgatgggcatggcggatcgcattatcgtcatgcacgaggggctgatggtggccgaataccaggcgggagacgcgacggcggaaaccatcgtcagcgccgccagcggtgcaaaacaggaggcggcataa

SEQ ID NO: 120610 - DNA, 1026 bp, Enterobacter cloacae
ttgaagtccaggaaagaggttgcctcggcgaccatgaaagacgttgccgagaaagcacaagtctcaacagcaaccgtgtcccgcgcattgatgaaccctgacaaagtctcccaggcgacccgaaaccgggttgaaaaggcagcgcttgaggtcggttattttccgcaagccatggggcgtaacgtaaaacgcaacgaatcccgcaccatcctggtgatcgtgccggacatctgcgatcccttcttcagcgaaatcatccgcggcattgaagtcacggccgccgcccagggctatctggtgctgattggcgattgtgcccaccagaaccagcaggaaaaaacgttcatcgacctgatcatcaccaagcagattgatggcatgctgctgcttggctcacgcctgccgtttgatgccagcattgaagaacagcgcaatttaccgccgatggtcatggcgaacgaattcgcgccggagctggagctgccaaccgttcatatcgataacctcaccgccgcgttcaacgccgtgaactatcttcaggaactggggcataagcgcatcggttgtatcgccggaccagaagagatgccgctgtgtcattaccgcttgcagggctacgttcaggcgctgcgccgtaccggggctatcgtcgatccgcactacattgcgcgcggtgatttcacctttgaagcgggcgggcaggcgctggaaaaattgctggccttgccagaaccgcctaccgcggtcttctgccacagcgacgtgatggcgctaggggcgttatcctacgccaaacgtcacggcctgcgtgtgccgcaggacctgtcgataatcggttttgataatatttcgctttcggagttttgcgatccgccgctttcgaccgttgcacagccgcggtatgacattggccgggaagcgatgctgcttttgctggatcagctgcacggacaaacagttagcagtgggtcacggctactggattgtgagctaattgtgcgcggctctacccaggcattaacttaa

SEQ ID NO: 120611 - DNA, 681 bp, Enterobacter cloacae
atgaaactgaagcaacttttattcgtgcttccattactatcgtgcgcggcgcaggcgggatatgttgattaccgacacgagtattacgacgatggacgtaactatgaccgtgtgtacatgtcacaccgtttcgggacgggctttggtgtggccgtagaggccgtctcacgctcagacgaaaagcaatctaatgatgcgctcaataatatggagagtaacagcaacgaatatactgccagctaccagtttacctggcagggatttatctggcagccgggtgtcgcggttgaaatgggtgacgacatggctatttataaaccctatttacgcgtacagtataatattaatgaaagctggtggacggcgttccgttatcgtaccgaatatacccgccgtaatgcagacggtaaagatgacagactggtatatcgcccggaaatgtggctgggatataatattgataactggatgtttgagctgaacggaatttataaattcgccgacaacgaagatctgtataacaacaaaaaagaggattacgaatataacttccgcgtggcgtataacatcgattcgtgggtgccattcgtggaggtgggtaatgtctcttccggctataacactgctaccactgacgaccgacaaacgcgtctgcgtgtcggcttaggttacaacttctga

SEQ ID NO: 120612 - DNA, 2502 bp, Enterobacter cloacae
atggctctcgtagtggaatttacctgtgaattacccaacggtgttcacgcgcgtccggcaagtcatgtggaaacgctgtgcaatacgtttatctcgcaaatcgaatggcacaacctgcgcacagaccgtaaagggaatgccaagagcgcactggcagtcattggcaccgatacgctggcaggcgatgcctgtcgtctggtgatccaaggtgaagatgagcagaacgcctatcagcaactggaacaatggctccgggaagagttcccacactgtgatgcgccgctcgcagaagccattaataatgagcgcgatccgctgccagaatccctcgcgcgccttaacccaacacttttccgcgccctgcccgtttgcagcggtagcgcccagggcgtgttgaccttgctggcctcgctggatctcaacgcactgtcagatttacccgaagcgaaagacgaaggagatgagcagttagcactggataatggtctcaccctgctggtgaaaaacattgagctgcgcgcgctggacagcgacagcaccgccagcgccattcttgaagcccatcgttcgctggctacggatacctcgctgcgccagcacctcctgtcaggggtcaaccggggcttaagctgcgcccaggccatcatcgccacggcgaaccatttctgcgaaacgttctctcgttccagcagcacgtatttgcaggagcgtgtgctggacgttcgcgacgtctgctatcagcttttacagcatatctacggtgaagcgcgtttcccgtctccggggcaactgacgcagccgagcgtctgccttgctgacgacctcacgcccggccagttcctggaactggataaaactctgctcaaagggctgctgttaaaaagcggtggaacaacctcgcacacggttattcttgcacgttcctttaatattccgacgctggtgggcgtcgacggtgaaagcctgttgcagtggcgcaatcaatccgtatttatcgatggcaatgctggtgccgtcgtggtcgatgcaagcgatgcggtggcgcgctactaccgacaggaagcacgggtacaacaggcactacgcgagcagcagggcatctggctggaccgggaagccaaaaccgccgacggcctgcgggttgagattgccgcgaacatcgcccatgcggtggaagcgcaggcagcctttgagaacggcgccgagtgcgttggcctgtttcgcaccgaaatgctttatatggaccgcagcagcgcgcccggtgaaaacgagctctacaacattttctgtcaggcactggaaagtgcaaacgggcgcagcatcatcgtgcggaccatggatatcggcggcgataagccggtagagtacctgaagatcccggccgaaaataacccgttcctcggttaccgcgccgtacgtatttacgaagagtatgcagtgcttttcaccacccagcttcgggcgatcctgcgcgcctctgctcacggcagcctgaagatcatgatcccgatgatctcttccatggaagagatcctgtgggtgaaagagaaacttgccgaagcgaaacaacagctccgcgctgagcatattccgtttgatgagaaaatcccgcttggcatcatgctggaagtcccttcggtgatgtttatcatcgaccagtgttgcgaagagattgatttctttagcatcggtagcaatgacctgacgcagtatctgctggctgttgatcgcgataacgccaaagtcacacgccattacaacagcctgaacccggccttcctgagggcgctggattacgcggtacaagccgtccatcgccaggggaaatggattggcctgtgcggcgaactgggtgcaaaaggctcggtgttgccattgctggtgggtctgggtttggacgagctgagcatggggtcgcccgctatcccggcaaccaaagcgcgtctggcgcagcttgatagccgcgcctgccgccagttgctgaatcaggccatggcgtgtcgcacttcgcttgaagtggagcacctgctggcgcagttccgcatgaatcagcaggacacacctctggttacacctcgctgcatttcactggacaatgactggaacagcaaagaagaggtcatgaaaggaatgaccgataacctgctgctcgcaggacgttgccgctatccacgcaagctggaggccgatctgtgggcacgcgaagcggtcttctccaccgggctcggctttagctttgctatcccgcacagcaaatcggagcacattgagcaatccaccatcagcgttgcacgcctgaaagcccccgtcatgtggggagatgaagaagcacaattcatcatcatgctaacgctgaataaacacgccgcgggcgatcagcatatgcgtattttctcccgactggcacgccgcatcatgcatgaggatttccgcaatgcgctggttaacgccagctcaggggaggcgattgcttccctgctacaacacgaattagaactgtaa

SEQ ID NO: 120613 - DNA, 1080 bp, Enterobacter cloacae
atgaaagagttggtgcatattctcaagaacacgcggcagcatctgatgaccggggtgtcgcacatgatcccgtttgtggtctcgggcggcattctgctggcggtttcggtcatgttgtatggcaaaggcgcggtgcccgatgccgcaaccgatcccaacctgaaaaaactctttgatatcggcgtggcggggttaacgctgatggtgccattcctcgccgcctatatcggctattccattgcagaacgcgccgcgctggctccctgtgcaattgccgcctgggtgggcaacagcttcggtgccgggttctttggcgcgattatcgccgggattttcggtgggattgtcgtttggtacctgaaaaaactgccggtcccgaaagtgctgcgctccgttatgccaattttcatcatcccgattatcggcacgtttatcacagcaggcatcatgatgtgggggctgggcgagcctgtaggcgcactgaccaccggccttacccagtggctgcaaggaatgcagcagggcagcattgtggtactcgccattattatcggtctcatgctggcgttcgatatgggcggcccggtcaacaaagtggcgtatgccttcatgctgatttgcgttgcgcagggcgtctataccgtcgttgcaattgccgccgtggctatttgcataccaccgctaggattaggcctggcgacgctgattaatcgcaagaattttaccggtgaagagcgtgaagcgggtaaggctgcattagtgatgggctgcgtgggggtcaccgaaggggccattccgttcgctgctgctgatcctctgcgcgttattccctccatcatgctgggatccgcatgtggcgcagtgacggccgccgtgatgggcgcacaatgctatgccggttggggcgggctcatcgttctccctgtggtggagggcaagctgggctacatcgtggcggttgccgtgggggctgtggtgacggccattagcgttaacgtgctgaagagttttgcccgcaagaatgcaaaacaggtcgaggaaaaagaggacgacctggatctggatttcgaaattaactga

SEQ ID NO: 120614 - DNA, 321 bp, Enterobacter cloacae
atggcccgaattatcgcagtaacagcatgtccgtcaggcgttgcccatacctacatggcggccgaagcgctggaaagtgccgccaaagctaaaggttgggaagtgaaggttgaaacgcaagggtcgattggcctggagaacgaactgacggcagaagacgttgccgccgcagatatggtgatcctgaccaaagatatcggcattaaattcgaagagcgctttgccgggaaaaccattgtacgcgtcaatatcagcgacgcggtaaaacgcgccgacgccatcatgaacaaaattgatgcccacctggcgcaaaccgcctga

SEQ ID NO: 120615 - DNA, 2298 bp, Enterobacter cloacae
atgacaaatcgtacccagcgtttgaaagacgcactttttgccagtccacgtgaaatctcgcttgagcgtgctttgctctataccgccagccatcagcagacggagggcgagccggttatcctcaggcgagcaaaagccacggcgtacattcttgaccatgtgaacatcgcgattcgtgatgaggaactgattgccggaaaccggaccgttaaaccgcgcgcgggcattatgtcccctgagatggatccgtactggctgcttaaggagctggaccagttttccacacgtccgcaggaccgcttcgagatcggcgaagcggataagcagatctaccgcgacgtgctgtatccctactgggaaaaacggtcgatgaaagatttcatcaacagccagatgacggatgaggtgaaagccgctgtagggacgcaaattttcagcgtcaaccagacggacaaagggcaggggcatatcattattgattatccgcgcctgctgaataacgggctgggtgcgctggtggcgcaaatgcgagaatattgtgcccgcgatgcgcagaacacgttctatgccgccgcgctgattctgcttgaagcctcccagcgtcatattctgcgctatgctgcgctggctgaaacgcttgcaaccgtctgtgatgacgcttcacggcgtgaagagctacgaaagattgccgaaatctcgcgtcacaacgcgcagcataagccgcaaacgttctggcaggcgtgtcagctgttctggtatatgaacgtcattttgcaatacgaatctaacgccagctcgctttctattgggcgcttcgaccagtatatgctgccgttttatcaggcctcgttcacgcagggagacgacccggcatttctgaaagagctgctggaatcgctgtgggtgaagtgtaacgacgtggtgctcttgcgctcgaccagcagcgcccgttattttgccggcttcccgaccgggtataccgcgttattgggcggactgacggaaagcgggcgtaacgcggtgaatgtgctttccttcctgtgcctggatgcttaccaaagcgttcagcttcctcaaccgaaccttggcgtacgggttaatgaacttatcgaccgacctttcctgcttaaaacggcagagacgatccgcctgggcactggtattccgcagattttcaatgatgaagtggtggtacccgctttcctgaatcggggtgtgtcgctggaggatgcgcgcgactacgcggtggtaggctgtgtagaactgtcaattccgggtaaaacctacggtctgcacgatatcgcgatgtttaacctgctgaaagtaatggaaatcgcgatgcaggagaacgaaggtaatgctgcgctgagttatgaaggcttgctggaccatattcgcgccaaaattaatcactacattgcgctgatggttgaggggagcaacatctgcgatatcggccatcgagactgggcaccggtgccgttgctctcttcatttatcagcgattgtcttgaatcagggaaagatattaccgacggcggggcgcggtataacttttctggcgttcaggggatcgggatagccaatctgagtgattcactgcacgccctgaaagggctggtctttgaacagcagcgcttaagttttgatgagctcttagccgtgttaaaagcgaactttgccacccccgagggagaaaaggtgcgtgcaaggttgatcaatcgcttcgaaaaatacggcaatgatatcgatgatgtcgacaatatcagcgctgaactgttgcgccattactgtaaagaggtcgaaaaataccggaacccgcgcggcggacagttcacgccaggctcttataccgtatcggcacacgtgccgctgggggcagtggtgggagctacaccggatggccgctttgccggagagcaactggctgacggtgggctctcgccgatgcttgggcaagatatgcagggcccaacggcggtacttaaatcggtaagcaagctggataactatctgttatctaacggtacgctgttaaacgttaaatttacccctgcgacgctggaaggcgatgccgggctgcaaaagctggcggatttccttcgtgctttcacccagcttaagttgcagcatatccagttcaacgtggtgaacgcggaaacattgcgtgaagcgcaacagcgtccacaggattttgccgggctggtggtgcgtgttgctggctacagcgccttctttgttgagttatcgaaggagatccaggatgacattatccgccgcacagcgcatcagctgtga

SEQ ID NO: 120616 - DNA, 876 bp, Enterobacter cloacae
atgacattatccgccgcacagcgcatcagctgtgacgtggttgaaacgcacgccgaggtggcgcgtattttcaatatccagcgctactcattgaatgacggtcgcggcatccgtacggtggtcttttttaaaggttgtcctcaccgttgtccgtggtgtgcgaatccggagtcgatttcaccgaaaatcgagacggtacgtagagaaagtaaatgtcttcactgcgccccctgtttgcgggacgtcgatgagtgcccctccggcgcatttgagcctatcgggcgggatgttacgctggaggagctgataaacgaggtcatgaaagacgatgtcttctttcgttcctcgggaggcggggtgacgctctcgggtggcgaagtgttgctgcaggcgcctttcgcgacacaatttctacagcgattacgccgtttcggcgtgcatacggccattgaaacggcaggcgatgcccctttgtcccgactcatgccgctggctcgccagtgtgatgaagtgttgtttgatttgaagatcatggacgcggatctggcccaatcgattgtggcaatgaatcttcccagagtgctggataatttccgccagctggtggctaacgggataaacgtgattcctcgtgtgccgcttattcctggctatacgcttaacgaaacgaacatggcacgcgtgctggctttcctgctaccttcaggaatacggcaactgcatttattgcccttccatcagtatggggagccaaaataccgtctgctgggacaggagtgggggatgcggcaagcgatccctccgacagaagatgaggtgtcagcgatgcgtcaactggcagagcgcgaaggtttcaatgttaccgtgggaggctga

SEQ ID NO: 120617 - DNA, 357 bp, Enterobacter cloacae
atgacagtgataacgggacgtcatctggtggcggtgaccgcgtgtgtcagtggcgtcgcacatacctatatggctgccgaacgtctggaaaagctctgccagcaggagaagtggagcgttaacattgagacgcagggagcgctgggcgttgagagcgagcttacggaagacgacatacggcgagccgatgtcgtattgctcattaccgatatcgaactggcgggcagcgaacgtttcgagcatgcgcgctacgtgaagtgcggtattagcgcctttttacgcgacccacaaaaggtgatgggggcggtgcgtaaaatgttagccgctccgcagcatactcaggtcattctggactaa

SEQ ID NO: 120618 - DNA, 849 bp, Enterobacter cloacae
atgcaccacgacattacccagatcctgactaacctgatcaacggcacaacgccgctgcgtcaggtgcattttgcaaactccgctacctccgcccccgaacttgccttgcaggtcgattttccacgtctggagatcgcgatcgaaggttcgatgaaagaccaggctggctgcgttttacagcagggtgatgttttatacgtcccggctggcggctggaataatccacaatggcaagcacccgcaacaacgctgagcatcctgtttggcaaacagcagcttgggtttagccttttgcactggaatggtatagacgttcgaaacctgacaaagcagcacgttgcccgccgcggtccccgtattggatcgctactcttacagacgcttcatgaaatgcagatgcaaccgcatgagcaacaaaccgcgcggctgattattgccagcctgcttagccactgcgtcgacctgctgggtagtcagatccaaaccgcctcccgcagccaggctttgtttgaagcaattcgggtctatattgacgaacactacgccactccccttacccgggaatccgtcgcgcaggcgttttatatctccccaaactacctgtcgcatctgttccagaaaacgggcgcagtgggtttcaatgagtacctgacgcacacccgactggaacacgcgcgccagttactgaaaggatatgatttgaaagtgaaagaggtggcgcatgcctgcggatttgtcgacagcaactatttctgccggttgtttcgtaaaaacaccgagcgttcgccgtcagaataccgtcgccagtatcacagccagctcaccgggaaggtcattagtccagaatga

SEQ ID NO: 120619 - DNA, 408 bp, Enterobacter cloacae
atgcatcgagatctggtttttaaaaataagaatatatttgtgttatttatgttagctaccataggatatgggatttggcgcatgcttggtgactttttttaccttgaacagactatagtttatcggcatgccgtagctgataagtctatgttgtatatcacggaaagcagcgcgggtgcgacgacttctttcgtatataaatattatctttacacggcacaaaagaccgatgaagtttttttagaagacattaaaaatggttatgaacctttccttgtcaccaccgatcctggcgtgaaagttagcattgaagacagaacgatttttcttaaagtaagcggggatatttttaaatttaataatatcgtaggctctgcctttatttatctcaattcgtcccccttctaa

SEQ ID NO: 120620 - DNA, 453 bp, Enterobacter cloacae
atgaaaagcaccttacttctttgctgcctgttttctttctctgctatggccggccattctgacccgattgagcgtgctgtaaaatttaacagctggtacgtaaatcaaatcaacaaagacgtatttcccattactgatggaaacgaaatagataaatatgtcacagcatcaacaatgaaaaaactccgtcacgcgcaggatcctcactatgcagacgaagagttttacgaggccgatatatttttaaaagcgcaatacatcggcgatgactggccgcagaatgtaacagccatagccggggataccgatccagtctgtgtcaacgtatacattgcattcggtaaaaagcaggaccacatagtcatagactgcatggttaaagaagacaacttatggaaggtacagtcagtttctgctgttgaattttcaagaaacctgactataccgaactga

SEQ ID NO: 120621 - DNA, 363 bp, Enterobacter cloacae
atgtcatggaataagcacgaggctgtgtcttatgctcgcagccacgcgcaccattacagcacgggttactgcgctcgcgccgtagccgcggctatccgcgccggaggattagaaattaatggcgctgatgcaaaaaacttctggcgctctcttgagaaagcaggattcagcaaggtgtacggcaccctcattgagggtgatgttgcagtcattgacgcattgcctggtgcgcatcagaacgggcatgcatgcatctatgacggttcgggtacctggtattcagattttaaacagaatagtctttatcccggccagagatatcggaagatacagccaaaaatcaccttttacaggcactactaa

SEQ ID NO: 120622 - DNA, 1662 bp, Enterobacter cloacae
atgatctcgctttctaactttgctcagtcaatcgagctgcccgttactcagttaattcaggcggtgatgaaccgcaatctgcctatgttttggctagcgacggggcaggctggcttttatgttgagactttatctgaggtcgagttagaccctctcgatggcagctacgtgcttaactatgtcgaagcgcagggtatggaaggggttgttaaaggttatctgcaactcattgctcccttggcgcatttacgtaacatcatcagcgacgggcattcagaagcctcggtgtttaaaactgctggaagcgaagctaaaggcggttggtttttcacctccaattgcccggtaataaaacccgatacgctgttgatcaataaagtccatgcagaaagtctccggcttgattggctggctaagactacaccaccagctgttagcgttcatcccgctgcgcctcttgctaccccatcccccgttatcgttaacgagtatgttcatcgaaagtattacactaagagcctgtcatggttatgttcagagtatgtaaagcatcggcgcaagggtaaagtctcggagtcggcaattaacgatatccgtaactacttcacctttatgattgaagcgatgggcgacattcagttggaagactttgatcgcgatttcctccgagcttatgagagcaaactacgcacgatccccgcaaaccggaatctagcgaaagctaaatatggggtgaaaacactggatgagttaatcgctaaggcggcggaatgcggcgataagttgatgactgaggaatccgtcaggaagtatatcaacggcctttatggtgcaatgaagtgggctgttgctgatggcaagctactgaaatcgccatgcgaaaactttttcccgcgcgatgataaagacgagcgagaccaggaccacactgacgtgtttgaacctaatgaagttaaggcgattttttcgctaccgtggtttctggctggaacaggagaacgtaacgcgcaagggcgattccatcaatattgcccgtttcactattgggcacctttgctggggctactgacgggggcgcgagttaatgagatcgcgcagttacttctagatgacatactagcggaagatgacgtttattacctgaaccttgaaagcgatagcgaaagtggaaagaaactaaaaaatgccaatgctcgccgcaagattccgattcactccacgctgatagctctcggtttcatcgactacgttaaagccttaaaaaatgccgggtatgcccgcctgttccccgagcttaagccgcataaaactaaaggctatggcaggccagtttccgcatggttcaatgaatcgctactggcgcgtagattgaatgtagagaggaacagaaccaaatctttccattctttccgccactctgtttcgactttactaaaggagaagggcgttagcccggaattacgtgcgcaattagttggacatgtgcgcggcgaaacggaaactgaagtgcgatatagcaaagacctcaaaccgattcatatgattcaaactgtggaaaaaattgatttttcgttgcctgagatagcgaaatttaacattcctgatgggttagatgctgtcagagatgcactgcgaagaaagcgaggcaaacaaatagagtag

SEQ ID NO: 120623 - DNA, 927 bp, Enterobacter cloacae
gtgactaacgactatcaaaccgcggattctgccctgaaggaatttagggcaaccgctgtaattgactggctcgacgtgcagatcagcacagagcgccggacgcagcatcagtatgttcgcaaagcattatcagcgataaccggcatagaccactggtgggctgaagcaatcaatattcagcctggcgatgttactgacacattccgcattcgtttcgatgatgaactggcgaacaactatcatcatctgtgtgctgtattcaatgcgttagcaaagcgcatccccttagcagccgagccaataattgccggaatagaaatcagctgcgacttctggcacaagcagcagtcagttgaagcaacacgcgcccttacataccgcctgcaaacaagcttgtttgctcccggcactaatcaccgtcaatacaacagtgacagcaacagcaaccagtttcttgataagcccggccatcgcataaacccggcgtataacctgcgtataggcaacgagctggatgccatttcgtggcagagctatcacaagcgcacagacagaaagcaaccgctgccacttcgtcagcaacgcgcccgtgtggaggtaacattgcggggtgatgcgctgcaacaatacggtttcggccttctctccgggcttcaacatttcccgtttgaaacgctcgccagcttgttcacgttccgctgtccgatagccgctgcaaagatgtcaaagggagatctgttccggcttgtcgcaatcaactggattcgcttgcacaaagacgcagtaacggagcgcggcattcattcgttcagcactgtagggcagcgtgacaaaaaaggcagaacgcgggctgagagcagccacctgatcgcagataaagagctgagtaaccgggttagagcggcgctacgcaacctgcgtctctaa

SEQ ID NO: 120624 - DNA, 333 bp, Enterobacter cloacae
atgacaaaaggtttggttatcaccactagcgatgctgcatatatgattcatgatgccatcgggccgctgcgtaactggcatacgattttagatgacatgcggcttaatcgtggcgactactgcgaattggttcttacaccgatcggcattgcaaagcatgagaagtctaaacgccccgtttacctcttatcagatgtgcaaaaatttattgatgaagcgcgtgtgcgttcaggttcaaaagtatctccacgatctattaatccgtttcccgttgaatacgacccatcagataaacggaaatggaacgagcgcaaactccagttgttctcgtag

SEQ ID NO: 120625 - DNA, 483 bp, Enterobacter cloacae
atgaagaagacgtttaaaactcgtaatgcagagttaactggcaatggccgttcgtcgtttcgttttgagactaccacttgggatgcaatagacagaatggcagcaaagcgaggcatcaggtggcaggattgggcgcgcgacgtgctagcggcacaaccggaggccccgaataaagcagctctgctgcgggttgcactggcagacgaattgatggccgagcaactcatagtgctgggcgacgctggcccggttgagactaacatcaaccatgagattatcggcaacggctactggcgtctaaacgatgaggagcttgaaagcgaactggatggcgcggtaattaccataagagataactcttttaccgcgttcactttcatcacgggctatcgccgaaaggatctaggaggtgcaccgttcgtcattatgcagaacgcacttcgtgacggtctgcatttaatgatcgcgccaaccttagactaa

SEQ ID NO: 120626 - DNA, 669 bp, Enterobacter cloacae
atggcaaacggcaagttcatcgcttactaccgtgtttcaacagccaagcagggaaagagtgggttgggattggaagcacagcgggaagccgttgccgcttacatcaaaagcactgcgggagaagttattgcagagtttgaagaaatcgaaaccggtaagggatcaaacgctcttgaaagacgtccgcaactacggggagcgctggcagcatgtaagaagcaaggtgctacgctgctaatcgccaaactcgaccgcctagcccgtaatgtgcatttcgttgccgggctaatcgaaactggtattaatttcgtggccgccgatatgccacaggctgacaaagtaatgatccagatgcatgcggttatgtctgagcatgagcgcgaccaaattagtgctcggacgaaagcagccctcgcagcggctaaagcacgtggcaagtctctgggcgtggcgggcagcggtaacctcaaaagcaatattgaagcccgtcaacaagcagcagagcgctttgcagagaatatgcgtccgcttatcgaaagtatgaggggacgtgggctatcgcagcgcaagatggttgaaactctgaatgcttcacgaactccggcaccgaaaggtggcgaatgggtattgtcgcaacttcagcgcgtcataactcggttaggtttgtag

SEQ ID NO: 120627 - DNA, 150 bp, Enterobacter cloacae
atgtgcggcgggtgcttaagactttctgtcttgagcattgttgagggacagaaagtagaaagccccgggaaattttcatttacccgaggctactccctcaactccaacaagttgagagtagcctcttattctttttttgacaaggagtaa

SEQ ID NO: 120628 - DNA, 1248 bp, Enterobacter cloacae
gtgaaaaaacattttaaattttcgatggttagcatcgctgtctccttttttatggcaaatcaggcgggagcagccaatacctggacggaagcgcgtagcgacgcaatgggcggaacgggtgtcgcggcagggagctatggcagcggggcgttaatcaaccccgcgttgctggcaaaatctaaaccggacgatagtgtcactgtgatcctgccgtccattggtgcgcagatttcagataaagacaatcttcgggataagattgatgacatcagtgatgatgtgaataactatcgcagcacactgaataatattaatcctgtcgatctttttaacccttcaagccctgcctctttgcaggtctcttcggcggcaggcgatcttgccgatcaattggattcattgaaagggaaaaccgccagcggtaaagcaggaggggggatcgccgtaagcattcctaatgatgtactttcagtcgcttttgtagcgaaagccaatgcgcgtgcacgcgtgagctcttatatcgatcagggcgatatcgataagctacgtttagtagaggctacgcccgttgccgtatttggcgttaacccgaatgatctcaaatcaaaagggtatggccgtgcagcaatcgtttcggattatggtgttgcaatcgcacgtcagtttgatcttagcggtgtgccggtttccgtcggcatcaccccgaagctacaaaaaacatggctttataactacaccgtttctatctacaactttgacagtgatgatataaacagtagccgttaccgcaatgatgacaccgggtttaacgttgatgctggccttgcggcagactttggggaaaactggacggtcggcctgaccggtcagaatctcttctctcgcgatatcgacaccaaagaagtggatggggtacgcgatacctatcaaattagtcctgtcgtcactgccggggccgcctggcataacgatctggtcacgcttaccgcagacggcgatctgaccgaaaccaagggctttaaaagcgaagacacctcccagtacgttggcgtcggtgccgaagtcacgccgctgagctggctggcagtacgcgccggttatcgtgcggatatgaaagggaacgacagcaacgtctttaccggcggtgtcggtttcgcgccgttcaaccccgtccacgttgacctgatggggctttatggcgaagacgagacctggggcgcaggggcacagttgagcatgacgttctaa

SEQ ID NO: 120629 - DNA, 408 bp, Enterobacter cloacae
atgggattgtctaatacagtacagaaaatcgttatatcaaccattgcgttcagcctggtcgcgggatgtgcgccgttgcatccttctgactgccataagaccacagctacgggtaattgcagttcaggacgctgggatgatcaggatgaatggggtaagcaagctcgggcaatcagggcggcaataaatgacaaacttgatgagcctcagaaatggaagggaaaaaaatgcaggttgcatattgaatttgctcaggatggcacggctttaaaaatatcaaccagcaatggtaataaagcctattgcgaagcgattgaatcagcagcccataaagctaaattcccggccttcaacaatccggaagtctacagagattttcaaaaatccggctttaatatgggcggatag

SEQ ID NO: 120630 - DNA, 672 bp, Enterobacter cloacae
atgtgtggacgttttgcacaagcacaaacccgtgaagaatatctggcctaccttgccgatgaaggcgatcgcgacattgcatatgacccggaacctattagccggtacaacgtggcgcccggcaccaaagtgctgctgctgagcgaacgcgatgagcagttacatctcgatccggtgttctggggctacgcgcccgggtggtgggataaagcacccctgataaacgcgcgcgtcgaaaccgcggccaccagcagaatgtttaaacctctgtggcagcatggccgggcgatctgttttgcggatggatggttcgaatggaagaaggaaggcgacaagaaacaaccctacttcattcaccgggccgacgggcatccaatattcatggcggcgatcggcagcacgccttttgaacgcggcgatgaagctgagggctttctgatcgtgacatctgctgctgacaaaggtctggtcgacattcacgaccgcagtcctcttgttttgtcaccagaagccgcccgggagtggatgcatcaggatgttggcgggaaggaagccgaggagataattgccgacggaacagttcccgccgacaagtttatctggcacgccgttacgcgtgccgtggggaatgttaagaaccaggggcaggaactaatcgaggcagcacaataa

SEQ ID NO: 120631 - DNA, 732 bp, Enterobacter cloacae
gtgagtagctacagtgagcagttcctgaaacaaaatccgctggctgtattaggggtgttacgcgacctgaaaaaaggcgaggtgccgctgcgcatcaactggtcaaccagccagtttatcagcaagatcctggacgtgacggcagagcacctgatcgtcgatctgggtagccagagcgatgaaaaccgtgccgcgctacaggcagagaatctctcggtgatggccgaaacgcagggggcgaaagtcgagtttgtgctgcctcgtctgaccacgatcgcgtaccagggtttgcctgcgtttatcgctcccctgcccgctaacctctggttcgtgcaacgccgggagttttttcgcatcagcgctccgcttcacccggcctatttctgtaaggcaaaaatgccggacaaaaaagagatccgctttcgtctcttcgacctgtcgctgggcggcatgggcgcgttaatggatacgccgaagccggaagggctggtggaaggtatgcgttttagtcagatcgagctggatatgggcggatggggacgcttctggtttgacgcccaactgattgccatcagcgagcgcaaggtggtggacggcaaaaacgaaaccattaccacgccgcgactgagctttcgctttctgaatgtcgggccaggcgccgagcgcgaactacagcgcatcattttttcactggagcgtgaagcgcgggaacgcgcgaataaagtgcgctga

SEQ ID NO: 120632 - DNA, 579 bp, Enterobacter cloacae
atgaaattaaacgttatagccacttcactggttttatcttccgtcctgttttcaggtgcgacattagcggctgacggtactgttcatttccgtggcgaggtgattgattctacttgtacagtcacgactgataccagtaatcagactgttaatattggtcgtgtatcggtaaaaaccttcgcgggtattgattccaccgcgtctgttaaagatttccacatccgtctggaaggctgcccggcaacctatactcaggcggcggtacgctttgacgggacggaagataaagataccatcggtaaaggttatctttcaatcggtacgccggtgaacgaagacggtacggacggtgagttcactggcagcggcgacgccattgcggcgacgggcgtggcgataaaactgttcaacctgagcgatgataccgcgatccctttgtataacaattctaaatacgttgccattgcagatggtaaagcggatatgggattcaaggcgaaattcgtccagactctggcaacagtgacgccgggtactgcgaatgctgactctcagtttactattgaatacctgaaataa

SEQ ID NO: 120633 - DNA, 684 bp, Enterobacter cloacae
atgccagggcgtatagtgaatgtattattagcgtgttgtcttacgggtatttctacaatggcatcggcaggtgtggttatcggtggcacacgagtggtttattcgagtgataaatccgacgcaaccattactgtcaaaaataacgaagcggctatcccttatcttattcaaacatgggttgaccccttcagtaatacaggaaccgcgaaaaaaccaccgtttaccgtcattccaccggtatctcgtctggaggctgggcaggaaaaaattctgcgcattatgaaaaccgagggcaatttaccgcaggatcgggagtcggtgttctggctgaacatcaaaaatattcccccggcgagcaataagccgaacgcgatggaaatcgccattaagacacgtatcaagctgatctggcgtccggcctcgttgaacattaccccggagcgcgccgccacgcaggtgaagtggcacagagaaaatcggcagctggtagttgaaaatcccacgccgctaaatatcaacgttatgaatgtgacagtggacggcaaagatgtgccgctcaatatcgtccatccctttgaaaccctgcgtttacccttaccggaaggcgtgaatggccatgcgctggtttggcggtatgtgaatgatttcggtgcgattagtcaggatttaaaagcagcgctttaa

SEQ ID NO: 120634 - DNA, 2520 bp, Enterobacter cloacae
atggagtgttaccgtattttcatcgcgcttgcttccgggatggtgcttggtttatccggcgaggtggccgcgagggatatgtttaaccctgcgctgcttgaaatcgatcatccggtggacgtggatatccaccagtttaatcgcgcgaacagtctgcctgccgggaactataaggtaagcatctatgtaaacggcgaatatgttgaccgccgggaggtgacctttgtcgaagatactgccaccagcaacctgcatccttgcttctcagacatcaaaaccgtgctcgctgagcttggggtcaaagtggcggctatcaaggcccttaacgacatagatgacaaagcctgtctggaccccgcgccgctcgttcctggctcaacctggacgtttgatacggataaactccagcttaacgtcacgttgccgcaaatctatattgatgtatcggcgcgcggctatatcaatccctcacgctgggatgagggcatcaatgcgctgatggtgaactacgatttttccggctccagcacggtgcattcgaacgaggatgataacaacgatttttattatctgaacctgcgcaacggtgccaacctgggggcatggcgtttacgtaactacagtacgctaaacgtgaccgatggcgagtcttcgtatcattcgatcaatacctatttacagcgcgatatcgccgcgttacgcagccaaattatgctgggggatacatggaccgcaagcgacgtgtttgacagcacgcaactgcgagggatgcgtctctacacggatgatgacatgctgccttcgagcctgacggggtttgcgccagtggttcgcggcgtggcgaaaagcaatgcgaccgtgattgtgcggcaaaatggttacatcatttaccagtctgccgtaccgcagggagcgtttgctctcaaggatttaaacaccaccaattcgggtggcgatctggatgttaccatcaaagaagaggatggcagcgagcaacattttacccagccttacgcctcactggcgatcctgaagcgtgaagaccaaaccgatgtcgatatcagcgcgggtgaactgcgcgatcaaaacgattttcagccgaccgtttttcaggcgcaggtgttacacggttttcctgcgggtattaccctctacgggggcgtgcagggaaccagcgattacacctccgccgcgcttggcgtggggaaagatatgggttcgctgggcgccctttcgctggacgtaacgcatgcccgctcgcggtttgaggacgatgacgaaagcgggcaatcttaccgttttctctattccaaacgttttgatgaaacgaacacaacgtttcggctggtgggctaccgctactccacagagggctactacaccctgaacgaatgggcgtcccggcagaataacgagagcgacttctggacgacaggtaaccgccgtagccgtctggagggaacatggacgcagacctttggcgacgggatgggaaatatttatcttacccttagccgccagcagtactggaagacggatgaagtcgagcggctggtgcagctgggctacagcaatagctggcgcgctatttcctggaacgtctcctggaactacaccgattcactcacctcggcccaaaatagcaccgacactgacgtcagcgacagtcagggcagcgaacagatttttatgctctccctctccataccgttgtcaggctggctgcatgacagctacgtcaactatgggtacacccaaaacaaccacggaaaagggatgcaccaggtggggctgagcggtaacgcgctggatgcgcacaacctctcctggaacgttcagcagtcttacgatgcggataacgaagattacaacaacagcgcaggggtgggctatgacggcacctatggttcggtaaacgccagttacgactatacccaggacaaccagcgcctcaactatggaatgaagggcgggattctggcccacagcgatggcataactttctctcaggaactgggggaaaccgtcgcgctggttaaagccccgggagcttccggcctggcgctggagaatggtacgggtaaggcgacggactggcgcggctatacggtacagacgcagctcaacgcctacgatgaaaacagagtggagatcgacagcgattactttgcgaaggccaacgtcgaaatcgacaacagtatcctcagcgttatcccgacgcgcggcgcggtggtacgggcggagtttgtcactcacgtgggctatcgcgtcctgttcaatgtgcggcagaagagtggcaaaccggtgccgtttggcgccatggcctcggctgatttaccccacggcagcgtaaccggcattgtgggcgaaaatggcgagctttatctgtccggcatgccggaagagggggcgtttgtcctgaagtggggcgcagataacacgatgacctgcccggttaactaccactttaccccgccagaaggcgtcgaactgatacaaatatcggcagtatgccaatag

SEQ ID NO: 120635 - DNA, 1077 bp, Enterobacter cloacae
atgaaattcaggacacctctgtttttaagcgcgttgataatatttatgacgccagtatgcaaagcgtacaccacgggcgacgggatttgtcactccgaaggtggcgcttatatctataaccttaatctgaacgggcagtcgatcccggcggataaaaataaagcaggtacagagatcagggatctggaaacgctcagttcatctgcgagttacaaagcgcaatgcaactgtcttacgcattactctacgggctttcgccaaatctactacaccgcacgatcgtcgttaagtgaagatgtggtaaagaacgggtatacctattttacccttaataacaacctcagcatcgccacgtcgatacttgtgctcggcagagattatataccggtacctttcagcgcagaaccaaacgtaatgtctcatagctcctattgttatgcgcctggtgaggaagggagcgaaccaacactcaataccggttcaaaaataaaaatatcattcttaattaacaagccgtttattggccgggtgagtgtgccaggtacgatagtcgccgatctttatggcgggctggatgcggcctcctcgacctccagcaccgaaaaaatggcagagatcaaaatcgctggcgatatcgtcgtgccgcaaaactgcgagatagcgcccgggcagacgcttgagatagattttggcaaaatcccggccccggaattttccgctaccaaaggcaccgccgtgacgagtcacaaggtaaaaaagacgattcaggtacagtgcacaggcatgctggatgagaatattgtctactccactttccatggagaccctgtcgacgccgatgccacgatgatgaaagtcaacggcaatgatgatgtaggcattgtggtatacgacaagtgggatcgtcaggtcagcgtcaacggcggcaggatggacatggataggggagaaaacaataacggcgccgaaaacaattcgcttaccttttccgctgcgcctgcaagcgcaacgggggcgcagccaaaacctggaacgtttgaagcgtacgcaacggtcacgctggaaattgaacattaa

SEQ ID NO: 120636 - DNA, 1041 bp, Enterobacter cloacae
atgaaagttatgcgtaccactgtcgcaactgttgtcgccgcgaccttatcgatgagcgctttctctgccttcgcagcagcaagcctgactggcgctggtgcaaccttccctgcgccggtgtatgccaaatgggcggatacctaccagaaagagaccggtaacaaggtcaactatcagggtatcggctcctccggtggcgtaaaacaaattaccgcgaataccgttgatttcggcgcatccgacgctccgctgtctgatgagaaactgaatcaggaaggcctgttccagttcccgaccgtgatcggcggcgttgtgctggctgttaacatccctggcctgaaatcaggcgagctggtgctggacggcaaaaccctgggtgacatctacctgggcaaaatcaaaaaatgggatgacgaagccatcactaagctgaacccgggcgttaagctgccttcgcagaatatcgcggtggttcgtcgtgctgacggctctggcacctctttcgtgttcaccagctacctggcgaaagtgaacgaagagtggaaatctaaagtcggttccggctctaccgttaactggccaaccggtctgggcggtaaaggcaacgacggtatcgcagccttcgtacagcgtctgcctggctctatcggctacgtagagtacgcctacgctaagcagaacaatctggcctacaccaaactggtttctgccgacggcaaaccggttagcccgaccgaagagaacttcgccaacgccgccaaaggcgctgactggagcaaatccttcgctcaggacctgactaaccagaaaggtgaagacgcgtggccaatcacctctaccaccttcattctggttcacaaagagcagaagaaaccagagcagggcgcagaagtgctgaagttcttcgactgggcatacaaaaacggcggcaaacaggctaatgacctggattacgccagcctgccagacagcgtggttgagcagattcgtgctgcatggaaaaccaacgtgaaagacagcagcggtaaagcgctgtactaa

SEQ ID NO: 120637 - DNA, 2250 bp, Enterobacter cloacae
atggcgctttccaatactgctcagccaattaacacgtcgctgcgtaaaatcgcagccgtcgtagccacagcggttgccggcatgtctgcttacgcacaggccgctgaaacccccaagaaagaagaaaccatcaccgtgactgccgcaccggctgcacaggaaagtgcctggggtcctgctgcgactatcgccgcgcgtcaatccgcgaccggaaccaaaacagacaccccaattcaaaaggttccacagtctatttctgtggttactgccgaagagatggcactgcatcagccacgttccgttaaagaagcgttgagctataccccgggcgttgcggtaggcacccgtggtgcttcaaatacctatgactacctggttattcgcggtttcgcggccgatggccagagccagaacaactacctcgacggtatgaagatgcagggcaacttctataacgacgcggtgattgacccttatatgctggagcgtgctgaaatcatgcgcggcccggtttcagttctgtacggaaaaagcagccctggtggcctgctgaacatggtaagtaagcgtccaacaaccgagccgctaaaagagatccagttcaaagctggcaccgacagtctgttccagaccggctttgacttcagcgatgccatcgacgatgacggcgattactcttaccgactgacgggcgttgcgcgttcaaataatgcgcagcagcaagataaaggcgagcagcgttatgccatcgcgccatcattctcctggcgtccggatgataaaacgactttcaccttcctctcctacttccagaacgagcctgaaacaggttattacggctggctgccaaaagagggaacggttgatccgctgccaaacggcgaccgactgtcgacggacttcaacgaaggtgcgaggaacaatacctattcccgtaaccagaaaatggtggggtatagcttcgaccacgaatttaacgacacctttaccgtgcggcaaaacctgcgttttgccgagaacaaaacctcgcaaaacagcgtttacggctacggcgtatgtaccgatccggcaaacagcggcagcaaacagtgtgctgcgttagctcctgccgataaaggtcattatctggcccgtaagtacgttgtcgataatgaaaaactgcagaacttcaccgtggatacccagctgcagagcaaatttgcgaccggccaggttgaccacaccctgctgaccggcgttgactttatgcgtatgcgcaacgatatcaactcctggtttggctatgacgactctgtaccactgctggatctctacaatccggtaaacagcgattttgattttggctcaaaagatccggcaaactccggcgcgtatcaaatcctcaaccgccagaaacagaccggtttgtatgttcaggatcaggcgcagtgggataaagtgctggtgacgctgggcggccgttacgactgggccgatcaggagtcatacaaccgtgtattgaatactacctccaaacgtgatgatactcagtttacctggcgtggcggcgttaactatctgttcgataacggcgtaaccccttacttcagctacagcgaatcctttgaaccgtcttcacagaccgatgctcagggtaaactgttctctccgtctaaaggcaagcagtacgaagcgggcgtaaaatacgtgccgaacgatcgtccgatcgtgatcaccggtgcagtgtatcagttgaccaaaaccaacaacctgatggccgatcctgcgggctcattcttctccgttgaaggcggtgagatccgtgcccgtggtgtagagctggaagcgaaagcggcgctttctgcaagcgttaacgttgtgggttcttatacctataccgatgcggaatacaccaccgacaccaactacaaaggcaacacgccagcccaggtaccaaagcacatggcctctgtctggggtgactacacgatgtttgatggcccgctgtctggcctgacgttgggaaccggcgttcgttatacgggttccagcaagggcgatccggcgaactcgtttactgtgggcagctataccctggttgatgcgttagtccgatatgacctggcgcgcgtgggcatggcgggttcaaacgtcgcgcttcacgtgaacaacctgttcgatcgtgagtacgttgccagctgcttcaacacctatggttgcttctggggcgctgaacgccaggttgtcgccacggcgaccttccgcttctaa

SEQ ID NO: 120638 - DNA, 420 bp, Enterobacter cloacae
atgaaaaaaaatctttatagcctgtcagccgttgccatgacgatgctggcgttatcaggtgcagcgctcgccgagggcacgaatctcgatgttaacttcacggctaatatccgtgaaaccacttgtgatatgaaactggttggtggtgagggttccgatactcagcaaacgctgaaaatcggtggcggtcaggtgcgccttgacgatgtcaaagctggcaccgcaaatgccaatttcaaaatcgtgatcgttgagtgcccggcatctctgacctcattgaaaaccacagtatcgggaacacgctctggttatttattctccggccttgttaactcaatattaaaaaccgccggaggcgcagactactctgctgttgaaattgccagagccagcacaccggtgacctgcccccacgattag

SEQ ID NO: 120639 - DNA, 1839 bp, Enterobacter cloacae
atgattattgccaccgccggtcacgttgaccacggcaaaaccacgttattgcaggccattacgggcgtgaatgccgatcgcctgccggaagagaaaaagcgcggcatgaccattgacctgggttacgcctactggccgcagcccgacggtcgcgtgctgggctttatcgacgtgcccggccacgagaagtttctttccaatatgctcgcgggcgtgggcgggatcgatcacgctctgctggtggtcgcgtgcgatgacggggtgatggcgcaaacgcgcgagcatctggcgatcctccagctgacgggaaacccgcagttgaccgtcgccctcaccaaagcggaccgtgtggatgaggcgcgtatcgacgaggtgcgtcaagaggtgctggcggcgctgagtgaatacggttttaaggatgtcgcactgtttgtcaccgtagcgacagaaggccgcggtatcgatgctcttcgcaaccatttgcagcagatcccgtctcgtgaacaggccagccatcaccgcttccgtctggcgatcgacagggcgtttaccgtgaaaggggctgggctggtggtgaccggtaccgcgctgagcggggaagtgaacgtgggcgataccctgtggctcacgggcgtgaacaaaccgatgcgcgtgcgcgggcttcatgcgcaaaaccagccggtggaacaggcccacgccgggcagcgtatcgcgctgaatattgccggtgatgccgaaaaagaccagcttaaccgcggcgactggctgctggccgacgcgccgccggagccctctgaacggattatcgtttctctccagacccatacgccgctgacccagtggcagccgctgcatatccaccacgcggccagccacatcaccggacgcgtgtcgctgctggaaaacgatctcgccgaactagtgttcgactccccgctctggctggcggataacgaccgcctggttctgcgcgatatttcggcgcgggaaacgctggcgggcgcgcgcgtggtcatgctggatccgccccgtcgcggcaaacgtaagcccgagtatttacagtggctggccgcgctggcccagacccgcgatgataagtctgcgttagatatccaccttgagcgtggcgcggtggatctggcggcgttcgcctgggcgcgccagctcagcggcgaaggattgcgtcttctgacgcaggagccaggttttattcaggccgggaacagcctgctgaacgcgccggtggcggcgcgctggcagcgcaaagtgctgagcacgctggcgacctaccatgaacagcatcaggatgagcccggcccgggccgtgaacgtctgcggcgcatggcgttgcccatggaagacgacgcgctggtgctgttgctgattgaaaacatgcgtgaaagcggcgttattgcaagtcatcacggctggctacacctgccggaacacaaggccggttttaccgctgagcaggacgcggtctggcaaaaagtggcggcgctgtttggcgatgaaccgtggtgggtgcgcgatctggcgcgtgaaaccaataccgatgagcagctgatgcgtcaggtactgcgccatgcggcacagcaggggatgattgtggcgatcgtgaaagatcgttattaccgcaacgatcggatcgtagcgtttgcgaacctgatccgggagctggatcaggcgcgcggatcaacctgcgccgcagacttccgcgatcggctgaatgtgggacgcaaactggcgattcagatcctggagtatttcaaccgcatcgggtttacgcgtcgtcgtggcaatgaccatgtgctacgcgacgcgcagttatttccgtaa

SEQ ID NO: 120640 - DNA, 408 bp, Enterobacter cloacae
atgttttatccggcttacattcattctgattccgacggtagcgccagtggtttctttcctgacgttccggggtgtttttttgcgggggattcactggatgatgcttttcaggatgcacgtgatgcattaactgcccattttgaagcgttgtttgaaatggatgaaatgttgccacttccgggtatggttgaagcgcatctggcaagtcatccggaggatttcattggcggacaatggttgctggtggatatcaatatgaaacagtttgaaggcagagtagagcgcatcaatattacgatacctcgccgtttgctggtgaagattgattcctttgtcagcgagcatccacaatttactaaccgaagtgcttttcttgcagaggcagcacggcgtgtactgccccggtga

SEQ ID NO: 120641 - DNA, 981 bp, Enterobacter cloacae
atgccttttattcataatgtcttagggtacgatgtgtttgacccgtcagaggttacacctgaatttgtatgtgatattggcacaaaaaaaggtgaaaaaattgactatgcgataatgaaaaacaatgacgtgcaaattctcatcgaatgtaaaaaaattggtgagcctttaaatataaatcatgcatcacaactttttagatactttcatgttacaaacgcaaggatatcaatcttaacgaacggacaaatatacagattttataccgatctcgacgcacctaataaaatggatgaaaaaccttttttagaggtcgacctgcttgatattgatgaaaacgttatacctgaattaaaaaaactcaccaaatcttcttttgatcttgaatccatcataaacgctgctggagagttaaagtacgttagccaaatcaagagaatattgcatacacaacttaacaatccagaagacgatttcgttaagttttttgcttcgcgagtttatgacggtatgctgacccaaaaagtcagagagtcttttcaaaatctcaccagaaaggcagcaagccagtacataaacgatcaagttaatgagaggcttaagtctgccatcacaggtatcactccggctactgtcgaaactcaaacagaaacacagcaaagtgaggatgatgaacaaaaggatgaaagtgaaatcataacgactctggaagaattggaaggttttcacattgttaaagcaatcacccgagccgttcttgaggcgcctcgcattacccatagagacacaaagagctattgcggcattcttgtagacgacaataaccgcaagcctctttgccgactgcattttaatcgaacacaaaaatacatcgggctttttgatctggaaaaaaacgaaacacggcacccaattgctacagttgatgatatttattcctttgctgatatcctgaaagcaactgctgctctttacaactaa

SEQ ID NO: 120642 - DNA, 225 bp, Enterobacter cloacae
gtgatcttcaaaacccgtgcggcgacgctgctggcgaccactgttgtggtgctggtcgtcgcgttcgccaacatttttaccgtcattcagcccgttgttgaggcaaatgactggaacagcacgctgtggatggttggcggaccgatcttcttctcgctgctggcaatggggatttatgagcattaccgtcgtcgctcgacggcctgtgtagcagaagtggcataa

SEQ ID NO: 120643 - DNA, 1770 bp, Enterobacter cloacae
atgaccatttcaactgaactttcactactcaatgaccctcgacgacaggcgcggctgttgtactggcaggggttcgccgtgccgcaaatctgcgacatgctgcaactcaagcgccccacggtgcagagctggaaacagcgtgatggatgggaggaaaccgcgccgattaaccgcgttgagtcgacgttagaggcgcgtctcatccagctttacgccaagcccgatctgacgccgcacgactttaaggtcgctgattttctgtcgcgacagatggagcgcctcgcgcgcgtgaaccgctacggccagaccggaaacgaggtggatttaaaccccaacattgcaagccgcaacaaaggggatcgcaaaaagccgaaacgtaattatttcagcgacgaggctatcgggaagctggaagagattttctttgaccagtcctttgagtatcagctcaggtggcataaagccgggttagagcaccgcatccgccacatcctgaaatcgcgccagattggcgcaacgttctactttgcgcgtgaggcgctcctgcgcgcccttaagaccgggcaaaaccagatatttttatcagccagtaaaacgcaggcttacgttttccgtaagtacatcatcgcctttgcgcgtctggtcgacgtcgacctgtcaggcgacccgattgtcatcggcaacaacggcgcagagctgatattcctcgggaccaactccaataccgcgcagagtcacaacggcgacctgtacgtcgatgagattttctggatccccaatttccagaagctgcgaaaagtcgcctccggtatggcctcacagtcgcaccttcgcaccacctatttttcgacgccgtcgacgctggcgcacggcgcttatccattctggtcaggggagctgtttaaccgtggccgcagtaaccgcgacgaacgtgtcgacatcgatatcagtcatcaggcgcttgccgggggcatgttatgcggggacggccagtggcggcagattgtcaccattgaggacgcgctcgccgggggctgtaccctgtttaacctcgaccagctcagacaggaaaacaacgccgatgacttccgtaacctgtttatgtgcgagttcgttgacgataaggcgtcggtattcccgttcgaggagctccagcgttgcatggtcgatgcgatggaagaatgggaggacttcgaaccgtttgccgaccgtccgtttaactggcgtccggtctggattggctacgacccgtcacatactggcgatagcgcaggctgtgcggtgctggctccgccactggttgccggtggcaagttccgcatccttgagcgtcaccagtggaaaggcatggactttgccgcgcaggccgaggccatccgggcgctgaccgagaaatacaccgtcgactacatcggcattgatgcgaccggcattggccagggggtttaccagctcgtgcgctcattcttccctgcggcgcgcgccatccgctacacgccggaaatgaaaaccgcaatggtgctgaaagcgaaagacaccatccgacgcgggtgtctggagtatgacgccggtgcgaccgacatcacgcagtcattcatggctatccgcaaaaccatgaccagcagtggccgcagtgccacctatgaagccagccgcagtgaggaagccagccacgcggatatcgcatgggcgaccatgcacgccctgttaaacgagccactttccgccggtagcggtatgcattcaacctcgattctggatatcaactaa

SEQ ID NO: 120644 - DNA, 192 bp, Enterobacter cloacae
atggcaaagaaagtttctaaatggtttcgcatcggcgtcgagggtgacacctgcgatggccgcgtcatcagcgctgatgacattcaggaaatggccgacacgttcgacccgcgcgtctacggttccgcattaacctcgaacatatcaaaagcctcatccctgacagcccctttaagcgctatggcgatgtga

SEQ ID NO: 120645 - DNA, 666 bp, Enterobacter cloacae
gtgaccgcgcttaaagcggagattatcagcgatgactctgcgctcaatggcaaaaaggcgctgtttgccaaaattgccccgctcgatgagctggtcagcatggtacgtgccgggcagaaggtttacacctcaatggagatccgcccgaatttctctaacagcggcaaatgctatctcatcgggctggccgtcactgatgacccggcaagcctcggcaccgaataccttgaattctgtagccgcgccacgcagaacccgctcgccggtaaaaaagaccagccgggcgatctcttctctgtggcctcactggctgagctggaatttgaagacgttcccgacaccatgctcaacagcctgaccgacaaggtaaaagccattttcagccgtaaacaggccagcgacgacgctcgtcttgcagatgtgcatgaggctgtgacgaccgttaccgagctggtgcaaaccaacctcaccgccaccgaccagcgcgtcaccgagcttgagaccgaactggcgcagctcaagcaggatgtgaccagcaaggccgaagaaagcgcgcaggcgtttaacgacctgaaaaactccctcgataacaccgaaagccagcgccagccacgccgcgagctttcaaaaggtggtacgggcgacgagctgctgaccaactgctga

SEQ ID NO: 120646 - DNA, 1068 bp, Enterobacter cloacae
atgcgtaaacaaacccgctttaaattcaatgcctacctgacccgcgtcgcggagctgaacgacatttccaccgatgacgtggcgaagaaattcaccgtcgagccgtcggtcacgcaaaccatgatggacaccgtgcaggaatcgtcctcattcctgacgaaaatcaacatcgtgccggtcgacgagctgaaaggcgagaaggtcggtgtgggtgttaacggcacaatcgcgagcaccgccgatactgacggcgatggcgagcgtgaaaccgctgattttactgcgctggagtccaacaaatacgagtgcgcgcagattaactttgacttccatatccgctataagcagctcgacctgtgggcgcgattccaggacttccagacccgtatccgtaacgccattatcaagcgtcaggcgctcgatttcatcatggccggtttcaacggcattgagcgtgccgccaaatctgaccgcaaaaaaaatccgatgcttcaggatgtggccgtgggctggttgcagaagtatcgcaatgaagcgccagcgcgtgtgatgtcaaaaatcaccgacgaggacggcgcggtcatttccgatgtgatccgtgtgggtaaaaacggcgactatgcgaacctcgacgcgctggtcatggatgccaccggcaacctgattgatgagatttatcaggatgacccggagctggttgtcatcacaggtcgcaagctgatggcggataaatacttccctatcgtcaataaagaccaggaaaacagcgagtcgctggccgctgacatcatcatcagccagaagcgaatcggcaacctgcctgccgtgcgcgtgccttacttcccggcgaatgccctgatggtgacgcgtctcgataacctgtcaatctacttcatggatgacgcgcatcgccgcagcatcatcgaaaacccgaagaaagaccgcatcgagaactacgagtcaatgaataccgactacgtggtcgaggcatacgctgccggttgcctgattgaaaatatcaagctcggtgacttcaccgcacctgctgcaccggaaagcggagagtaa

SEQ ID NO: 120647 - DNA, 756 bp, Enterobacter cloacae
atgacgagtcccgcagcgcgtcacatgatgcgggtctcggcctatgaaacagcgcggcgggctgctgtcccgctgcgcaatgcaactgcctgtgagcagatgctcgttaagctggccgcagacaaccgcacgctaaaacaaatccgatccaatgagcgcaaggcagataaaaagcgtgagctgctgccgttctatctgccatgggtggctggcgtcctcgcaaacggcaagggcgcgcaggatgacatcgtcatgacggtcatgctatggcgtctcgatgctgacgatatcgccggggcgctggaaattgcccgttacgccatgacctatggcctgatcatgccgaccggtcgacgtccgacgccttacctgctggccgaagaggtggcactggccgcgcagcgcctgctcgctgcaaaacagccggtcgaactggcgaacctgctcgacaccattgcgctgactgaacgcgctgacatgcccgatatcgtgcgcgcgaagctgcacaaaatcaccggctatgtcctgcgtgatgcgaatcaactgcccgaggcgctggcgcacctgcaacgtgcgatccagttagaacgcacaatcggtgtgaaaaaggatatcgagcagttagagcgccagctcaggccaaaacccgaaccggcaccgaaaaccaaaacgactaaaccgcgcacgcgcaaacctgccgccaaaccggcggcacgtcgcgggcgtccaccaaaggcggcaaaagccgcaggttaa

SEQ ID NO: 120648 - DNA, 507 bp, Enterobacter cloacae
atgacgacgctgattattgagcaaaacaaagagccgcaggatgtgccgggcgtggtgataccgccgccgggcgtgagcgagccggtaatcaaaaacaccccgttttttcctgatgttgacccgaagcgcgtgcgtgaggaaatgcgtttagagcagaccgtttcccctgtgcgcctgcgccgggcaattaagaccgccatcgcagagacgaacgccgagctgggcgaatggcgcgagcgtcagctcgatgccggttacgccacgctggcggatgtcccgaccgacaggctcgacggcgaaagtgtgcgcgtattccattacttcaacgccgtgtgtgccatgacgaccgccacgctttacgagcgttttcgcggcgtggatgcgaccgccaaaggcgacaaaaaggccgacagcatcgacagcactatcgatgaaatgtggcgcgatatgcgctggtctgtggcgcgcatccaggacaaagcgcgctgcattgtggggcaaatctga

SEQ ID NO: 120649 - DNA, 204 bp, Enterobacter cloacae
atgaaagcgtatgcgctacagggcgacaccctcgacgcgatttgtgtgcggtactacgggcgcaccgggggcgtggtcgaaaccgtcttagaagcgaatcccggcctgtctgagctcggcgtcatcctgccgcacggcacggcaattgaactgcccgagaccgacagcgcggccagaaccgaaacggtgaatctatgggactga

SEQ ID NO: 120650 - DNA, 210 bp, Enterobacter cloacae
atggagaaaatcaccacgtttatcgcctactggctggccgtcgcgctggcgtacctcggcgcaatatcgcccgaaaagatggcgctttacgtgggcggcggatgcgccatttttaccgcacttacgaattactggtttaagcgcaaaacgtacctctatctgacgtcactcggactcgacaagggggctattcgtgaaatcaatcgttaa

SEQ ID NO: 120651 - DNA, 510 bp, Enterobacter cloacae
gtgaaatcaatcgttaaacgttgcagtgtggccgcagtgctggcgctggcggcgctgatgcctgactttcgtctgcttaacacctcgcccgaggggctggcgctgattgccgatctcgaaggttgtcgcctgatgccttaccagtgcagcgcgggagtgtggacgtcaggcatcggccacactgccggtgtcgtcccgaaaggggaaatcacagaacgtcaggcggcggcgaacctcgtcgcggatgtgatgaacgtcgagaggcgtctcgcagtctgcgtgccggtagaaatgccgcagcacatttacgacgcactggtgagcttctcattcaatgtgggaaccggcgcggcctgccggtcgacgctggtctcatacctcaagcgccaccaatggtggcaggcgtgcgaccagcttacccgctgggtttatgtgaatggctcaatcaataaagggctggaaaatcgccgcgcgcgtgagcgtgcctactgcctcagagggataccatga

SEQ ID NO: 120652 - DNA, 426 bp, Enterobacter cloacae
atgaaaatgatgttgtttttactggccgcactgattgcagttgtgctctggcagcgccatgaaaatggcaacctgacgcgctcctttgaccgggcgaataagatcgcgaccgaacagaaaaacgtgatcggaatgctgaaaaatcagctttccgtttcgcagggaattgccaggcgaaatgaaaccgcgcaggtcagcttacgtggtgagctgattgctgccggtgcgatggccgtgcgccgggaagaaaccattacgagactaatgaatgaaaatgaaacgttacgccgctggtacagcgctgagctgcctgatgttgtgcgcaggatgcacacccgcgccggttgtgcttccgccggtcattgtttacagcgcctgcccgaaagtgagctattgcccgatgccgggaagcgacccggccactaa

SEQ ID NO: 120653 - DNA, 138 bp, Enterobacter cloacae
atgccgggaagcgacccggccactaatggcgacctgagtgcagatatccgcaggcttgagtacgcgctcgccgcctgcgcgttacagattgaaaccgtcaaagcctgtcaggataaactcgatgaagaaagcaattag

SEQ ID NO: 120654 - DNA, 453 bp, Enterobacter cloacae
atgagtgaatttaagccctttgataaccagctcgccgggctgcttgctgccctgtcacccgcagggcgtcggaaacttgccggtgagattgcgaagcaactcagaacggcgcaacagcaacgtattaaacagcaaaaagccccggatggctcaccgtatcaggcgcgaaagcgccagccactgagagccaaaaaaggtcgaattaaacgggcgatgtttcaaaaactgcgcactaaccggtacatgaaagccagtggccgtgaaaacggtgctgtggtggaatttaccggaaaagtgcagcgtatcgcgcgcgtccatcagtacggcctcaaagacaggccaaaccctaatgctaaggttatgcagtacccggaacgacagctattaggattttgtaaggaagatttatgtgctattgagaatttcatttttaaaaaaatagatggggtttaa

SEQ ID NO: 120655 - DNA, 558 bp, Enterobacter cloacae
atgttagataaagtatggtttacttataaggcaagaatacaagcctaccatcgcttggaatggatggattctcattcacaatttattctagtttggtatgcagtgctaggtgcagccctgtcggttattgttatacgattccctacgttgctaggaagtgatacagatatttttagcgctattttatccattgctttgcttggtgtgtcattatctgttgcaaacagaaactttcgcggtcgcgcaattaacatgcgcggtaattatttggcattacaaaacctttataatgtaatctctgccagagggcagacagcaagcgaagatatagttaaatataatgagttgcttaatgaggtagataatcatagcgatatggatgataaggtttttcgagtgaaaaactttagagctttaactactcgcaagcctgactggaaagagtttgcacatgtatatattacttgcgtaatcaaatatatcatattattcttggtatatcttgcccctctaataattggatggtgtctttatgagcaatgcggcgcgggtatttaa

SEQ ID NO: 120656 - DNA, 1374 bp, Enterobacter cloacae
atgagcaatgcggcgcgggtatttaaaaagtgttttagtgaaaaatacctaagatccttatattttgataaaattaaagaaactggtgctatcggtattgatagggttaggcctgcttcgtttgaaaaggaatgtgctaaagaagtctctctaatatcaaaaaaagtttttaatggtaattacaaatttactgcctataaggaaaagttaatctctaaaggagctcatgcatttcctaggcaaatatcaattcctacagtacgagatcgtataacattacgagctctatgcgatgctttagttaaagtatatcctgatgcgaaactatcactacctcaggtagtaattgaatcacttgataatgctgttaaatctggtaattattatgaatttgctaagattgatcttaaaaatttctacccttccataccacatgaattaataacggcgtcaattaagcaaaaaattagaaagcctgaatttcgcctgctaattaataaggctatttccactccaacagttaatgagtcaaaaggaagtaaaggaagcgccgcaagtttgagaggggttcctcaaggtttatcgatctcaaatattttagcagaaatcgcacttcaaaatattgatgctgaaatcgaaggtatcaaagatatttggtataaacgatacgttgatgatattttagtgcttactccaatcggtcgagcatctgatttagccaatttaattatcgataaattgaaaaatattggtctctcacctcatccactcgaagaagagggatctaaatctgtagtaggtatactaagtgttcctttcaattttttgggttacgaaattagcgataagggtataagtattaaaaaggacagcatattaagatttgagtcatctctggcaaagatatttactgcctatagacacgctctcgttagggctaaaagcaagaaagaaaaagaaaaggcattagcatattgccagtggaagcttaatctacgcattactggatgtatttttaacggtaagagaatgggatgggttgcttacttctctcagatttctactacaactcagcttaggtgtgtcaatcatactattgataacctagtgaaacgctttggattaaagtcagacattaaaccaaagtcattaattaaaacatattatgaatggcggcgaggagaaaaaaactcacataaatatatcccgaattttgatgacttagcaatcgaacagcaaagagaaattattgcattatggataggtaaggaaaaggcaaatagtttgagtgcagcgtcagtagtcagaacgtttaagtataaaataaactcatctgttaaagagcttgaacaagatatttctggtttttcatga

SEQ ID NO: 120657 - DNA, 513 bp, Enterobacter cloacae
atgaataaatcagaacattgtaaagaagtatacgcttattttggactggccatgttccgcgcacaatgcgtggagcaatcaataattcaattgcttatctttttagtattttttaaagaaaacgctacgaaaatttcgtcaatagaaaaatgggagctggattttgataattttgataaaaccatatcaaagaaaaccatggggcatcttttaggtgcgctaagggatttaggggttctaaatgaaataattgaaagcacactatcaaaagccttgattaaaagaaattggctagcgcatggttatttcgcagatcgcgccattgagtttttaaatgaaagaggtagaaatcaaatgatagatgagcttgagggtatcatagagttgtttaacttagctgaggaccttcttcagccgatttcgaataaacttgcattgcagtatggtttaactaacgaaaagctggaagaaataaaaaatgaaatttacccctctgaagttgatgatatataa

SEQ ID NO: 120658 - DNA, 3153 bp, Enterobacter cloacae
atggcaacgggcgaccgctccagggttgctctattggagcgaggtgttccatggggaccaaatgcccgcagcaagcccagttataagctttatttcgaggtcgtcctcggctccatcgctctcgacaaggcgacggacgagctggtcaaggtttttggcgaggatgaggagagttcacgcccggacggtaagaaagcagccatcggctcgatcctgatcgacaaggaaggttatgtgcttgagggcaaaggcgtcgccgtttccagttttgcctgggcactcaaaccggctctcgatctgaagcttgggagcttagggaattggccgaatgttgagccgcgcattatcgagcatctggatcgcatggttcgccgccacaacgaggatggagaacccataccgatcgatttggatgtcgttcttaacacttataaatggcttgtgtctcagttcgatgtacccgagcatttggttgagccacccacattcgcgattaaggtgtttcagcatttcaaggccaaggcgccgcctgaaccttcgttactgaattccttctatcttgaagatctcggtgaagcaacaaaattgctcgagacgggcaaagccggaaccggtttgcgccgctacatgggaattggcaggcctgaaaggaaaatcgacgtgctatcgcccatttccgcagttgagccattcgtcgcaccgtcgctcatgccgcaggctcgttggccttcgaaaggcggccatccattggtactgcttcaacaggctgccgtgaatgcggcgcgtgctgagctgaatgatgcaccaggtatcatcggcgtcaatgggcctcctggaaccggaaagaccactcttctccgggatatcgtcgttgggtgcattctcgatcgggccacggcgatgtccggcttcaacaaaccgcaggatgccttttccaccacaggcgagaagctggcattcggctccaatgccttcctacacttctacaagttacatgcatccttaaagggccatgagatcgtcgtagcttcctccaataacaaagcggtcgagaacgtcagtaaagaacttcctctcaaggaagccaatggtcgccatgaacagatcgcctattttcggtccatcagcgacctgatagcgaaccccaaacgcgccggctatttcgaagccgaagccgaggccgacatcccctccgaccctgtcgaaacctggggattgatcgccgcggctctcggcaaaagcagcaaccgaggcgcgttccagcaaggtttctggtggaatgaagacggtggtttccttacctacctgaaagcagctcgcggcttaaacgtcttgcgtgagatcaaagatgaacaaactggcgaaatcatcgatcgcgtgatgcccagcgtggtcgtcaatgagcggcccagcaccaacgaagcggacgctttagcggcctggcggaaagcacgaaccgttttccttaaactcaaggagacggtagacgccgaaatcgccagcatcgaagagatgcgacgggatatccaggcactcaagggagcgactactgaactacaaagggtggaacagcgtcgtccgagtctgattgaagctgtcgaagaggcacatcagactgctgaatcctaccaatgggagcatgagaaggcaaaatcgcagatcgagcaggacaagatcatgctcaacagccatcttgcttgccgtccaggtttcttctcccgtttgttcgcaactgcggcctggaagtcgtggagatcgacactgcagaagctctcggcgaccttgcagcaatcagtcttacgggcgcaggagacagacggtgccctggagcttgcaaggactaagtggagcaatattaagtcccagttacagcaactcgaccaggaaatttccagcaaatgtcaggctgtctcgaaattgaaggcaaccgaggcagaggcacgcaaccgcatgggagacagggtcgttgatgagagattcttcgagcgcgagcacgaggctatccacctgactgcgccatggcttcccgatgaggttcatcacctgcgagaggatcttttcgccgctgccctgactgtgcataaaacgttcattgatgcttcggccagccgcttgcaacacaatcttgggctattgatgtcaggcatggtggctggtgccttccagtcttccgctcaccgtgaacttctccccgacctttggtcgagccttttcatggttgtgcctaccgtgtccacgacattcgcctctgttcggacgatgttcggggatctgccaccagagagcattggctggcttcttgtagatgaagcgggccaggccgttcctcagggagcagttggagctatcatgcgggcaaagcgctccatcgtggtaggtgacccgttgcaaatcccacctgtagtttcacttcctgaaaagctgaacgccgaaatctgcaagttctttgacattgaccaagtcgaatggtctgcccccgcagcatctacgcagacccttgctgatcaggcatcacgcttcaaatccaccttcgtcatggacgtaggtgatcgagaagtcgggctgccactcctcgttcacaggcgttgtcagaacccaatgttcgatgtttctaactccatcgcctatgccgggcagatggtccatgctgtcgggcctaaaagacctggatctatcggctcggcattggggatatctcgctgggtggatatcaatggcgatgctgagacgaagtggtgtcccgatgagggcgaagcggttgtacgaatgctaaaagagctggcagcatcaggcattacaaatccagacgtatttatcattacaccattcaaaatcgtagagcagaacatgcgtcggcgtctcgacagagaaaccgacctgctgcgaacgttcggcgtaaagttggatgagtggtgccgtgatcgtgtaggcacgatccacacgttccagggccgagaggcggacacggtcatcctgttgctgggtgcgccaaaagcgagtcagcaaagggcgcgtcagtgggcggcaagcccgccaaacataatcaatgtagccgtctcacgcgccaagcaaaacctgtatgtggtcggctcggttgctgcatgggcaggggcgggaactagtctgcaggtcctacatcggcaattggcgtaa

SEQ ID NO: 120659 - DNA, 555 bp, Enterobacter cloacae
atgctcttcggttgcagttgctctttcgctacaggcgaattgtggggcacaactcgtgaagattgtatggacaccgaatcgggatggcgtattgatgtgctggaagccgagatggcgactacactgtggccgctaagtgccaatagcgattgctcgattttagccgtcagcgtccgcgccctggcagtgttgcgaaaggtcagctcgctcaacaacacttcaagttcactaacattgttgctggactgctcgaagattgcttccagatcgaagattgatttttgcgcatactgccgtgtgttcatttatttctgcagttccatatcccttcaattaagagatattatgctaattagcttgatttctaaaactattaacttccgcttgaaatataaagtcttattcggcccactactaaagtgggaaccgtcattaattatccgttaccccgctaaacgcattcctctcatacctccctcaatcatacttccgcgatcagcagccataacaaaatcagcccaccattgcatcatcggtcgccgttgctcaaggtaa

SEQ ID NO: 120660 - DNA, 1242 bp, Enterobacter cloacae
atggcaagaaaaaccaaaccgttaaccgatacggaaatcaaagccgccaaacctaaagatgccgattaccagctgtatgatggtgacgggcttactctattaatcaagtccagtggtagtaagctctggcagttccgttactatcgaccgctgacaaaacagcgaaccaaacagagcttcggtgcctaccctgctatatccctttctgatgcgcgtaaactcagagctgaatctcgagttttgttggcgaaagacattgatcctcaggaacatcagaaagaacaggtaagaaattctcaagaggctaaaaccaacactttcttgctagttgcccagcgttggtggaatgtgaagaaagccagcgtaacagaagactatgccgacgatatctggcgctcacttgagagagatatttttccagcaatcggtgatatcagtgtcactgagattaaggctcatactctggttaaagcagtgcagccggttcaggccagaggtgcattagagacagtccgacgcctttgtcagcgtattaacgaagtcatgatttatgcgcagaacacaggcctgattgatgcagttcccagtgtaaatatcggaaaagcgttcgagaaaccgcaaaagaaaaacatgctgagtatccgtccggatcagcttccacagttaatgcaaacaatgcgtacagcaagtatcagtgtgtcaacgcggtgcttgttcatgtggcagcttctcaccataacccgccctgccgaagctgctgaggctcgatgggatgagatcgatttcaatgctagcgaatggaaaattcctgcagctcgaatgaagatgaaccgggaccatacagttccactatccgaggaggctctctctattctggaaatgatgaagtcactcagtggtggccgagaatttatttttcccagtcgcattaagcctacccagccgatgaacagccagacagtgaatgcagcccttaagcgtgctggcttaggaggcgttctggtatcacacggtttacgttctatcgctagtacggcactcaatgaggaaggatttccttctgatgtcattgaagcagcactggctcatgtagacaaaaatgaggtccgtcgcgcttataaccgcagtgattaccttgagcaacggcgaccgatgatgcaatggtgggctgattttgttatggctgctgatcgcggaagtatgattgagggaggtatgagaggaatgcgtttagcggggtaa

SEQ ID NO: 120661 - DNA, 294 bp, Enterobacter cloacae
atgaatcttgcagagaaactacgtgcgatacggaaagctgagggactaacacaaatgaaattcagcgaaattagcggcatagcgcaaggaacaatcaagaactatgaaagcggtcaaagtgatcccggcttacagatcgtcttaaggattacgaactctcctcgttttgagaaatatgctctttggcttatgacagataaaaccgcgccgcaagctggtcagatcgcaccggctttcgcgcacaatgggcaagatgcaacaaaatcagaccactccgagaagaagattggttaa

SEQ ID NO: 120662 - DNA, 780 bp, Enterobacter cloacae
atggatgtcatcaagtcgcttaaaaaatttgaagaaaaaagaactccggatgatggaaggattagcttaaattatgagaatgcaatacattatgacatgtattctgtttatattgttgataatgcaggagagcaatatctttttgaccggtatatcgaaggtcaagtgcatgcaaggaaatgggacagtaatgagaatgtatttagtataaaatcgatactcagccctgaagatcttacattggattctttttcagggatttattattatcacgctcatgaattgatttttaattccctatcggatctgaattggtattcagaatggaagtttagaattaaatctgattttgagaacaaacagtttagtagagagaaatatctctatagacagcgtaagcaagacattacagatgtaatgaatgttttgagtgtagtagtaaggatctatagagagcagcaaggcgagaaccattttagtgagtgggtaataatgaacgatgttgctgggaaattatggatttatcatgatgataaaacaagaatgcaaaaagatcttcgactgtgtctggattctcttgttcaaagtgggaacttaattaaatttgagaatgcatataagccaactggtaaagccctcacaacactgtcagagattaatagggatgaactgcgctacaaagctaatgcggccagtcaaaaaagaatgctctatgctacggtgctttctgccttagctgcggctggaagtgcttatgccgcgtttaagggcatgaaatga

SEQ ID NO: 120663 - DNA, 126 bp, Enterobacter cloacae
atgaaaactctacttggaataatcctgagggggctcctaggtaataagaaactggaaagtaagcttcaatatcttggcattgaagtcaatggttcgttagagatccctgagttgattgaaatctaa

SEQ ID NO: 120664 - DNA, 366 bp, Enterobacter cloacae
atgaaatctactgattcagagaacgattcatttctccagtgggggctgaatcgtaatgtgacgccttgctttggcgctcgtctggtacaggagggaaaccggctgcactatctggttgaccgggccagcattaccggtgaattcagtaacgcagaatctttgaagttggatgaagtattcccacactttatcagccaaatggagtcgatgttgactacttgtgaaataaattctcgccaggcccactgcctcaccctgtaccacaacggtttcacctgcgaagccgatatacttggttcacacggttacgtctatatcgccatttatcctgcacaacgttcactaactccacaagagcaaatatga

SEQ ID NO: 120665 - DNA, 306 bp, Enterobacter cloacae
atgtttatggtgctctatctcgataaccagcaccgtttactggagagtgaaatgctatttgccggttcgattaaccatgtccaggtccatcctcgagagatagtgaagtcagcgcttcgcttcaatgctgcagctgtcgtgctagcgcataaccatccgtccggcaatccggagcccagccaatacgatcgcaacattacgggcaggcttaaagaagcgttagcactggttgatgtgaaaacactcgatcatctggttatcggctcagatggcattgtgtcgttcgcagagcgtggctggatatga

SEQ ID NO: 120666 - DNA, 600 bp, Enterobacter cloacae
atgaccgccaaagaatatctgggtgacatcattggtggcagcctgatgttgcgtgagagcagagtcatcgcggagctgctgatatcctcaccaaatgatgatcaatggcataatgctattgtaaatgacaatgtgctgcagaagacctcagtgcacagtgttaaacgcatggcttcaaccctgcgtaaaagaattcaaccgatgggtgaggcattctggactgagctactaaaggcccctgatgatgcagccagacaaatgttgctaatggcgacaatgtgccaatccccagtgctgaccgatttcatggcaacgacactgtctgatgcccgacagatgtttcgtgaatcattgcgcagcgaagactggcaggaatttattctatcccgccagcgtgccattgtcggcttggatcaatattccgaaagctcaatccagaaaatgggcaacaatgtatttaaaatcctcgcagatagcgggtatctggaatcaggccgcagtaaaaagctgaaaaatttcttcctactaccccagataagagagtgggcaaacagtctcgactgccaaaaagtctacgatgtgatggagtcagtcagatga

SEQ ID NO: 120667 - DNA, 615 bp, Enterobacter cloacae
atgagagcgaaactggacagtaagccgcaattgtcagctcgtctggaacaaatcgaagaccggcttaaaagtgaaggcttcctgaagaaccaagagctcggtggtgagatcggtttttatatctttgattacccacctcaatttgaacttacggtacgggaatatctgagattgactctgcctcgcctagctcggcaggggctgaatttcgctcatctcaatctgttcgaagaggtactggcaattttgcaagagcgtaaattgttagataaagcttttgatctggaacgcaaaaaaggtaccgatgagctagccaaagcacttaaaggacctcttgaacaaggtcgaattgctaagcatctgatagataaagtgcttccggcctcgcctcaatttgtattgttatcaggtcttggccaatgctggccattgctacgtggtcatagtttgcttaatgcattacatgcccatatgggggcaataccattggtattgttttatccgggcagttacaacggcctcgaactttatccttttgatctggacagcgcagaagtggcaacagccaactactaccgagctttccaactggtgcctcacgcatctaagtactga

SEQ ID NO: 120668 - DNA, 3723 bp, Enterobacter cloacae
atgatagagacggaatttttaatgcagataagagagctgtttaccaaacaactggatcgcccaatcaatggtgtggtgaaagccgagcagctggatgagcaaatcatctggactgagcttgacgagtatgtggtgacccgtgaacttgaccgccaccttcgtcacttttttgagacctacctgcctggtgtcagccatccagatgatcctagtgtggcgggtaaaattgggatttgggtatcgggttatttcggttccggtaaatctcactttataaagatcctctcttacctgctcggtaacaagaaagctgttaacaatggccaaacaaaagctgccatcgagtttttcaaagagaaaatcagcgatccccttctttacggtgatatccacgctgcagttaaccgcaatactgaagtaattctctttaatatcgacagccgcgcagatactgaagacaaagaagatgccattctcaaagttttcttgcgcgtcttcaatgagcgcctgggatattgcgctgaccatcctcatatcgcacacctggaacgtgagttagattcccgtggccaatacgagccatttaaagcaaaatttgctgaactcacgggctcaagctgggaagaacagcgtgatgcctatggtttctgtcgtgatgaaatggcaaaagcctgggcctatgctaccggccagtcagatgcctcatcggtgcagagtatggaaaatctcgaatccatgtttactctcgacattgccaacttctgtaaatgggtgcgggagtatctcgatcgtagcgatccatctggcgacagtaaacgcatggtctttctggtagatgaggtcggacagtttatcggcaacagcacccagatgatgctcaaactgcagacgataacagaaaatatcggtaccgcttgtggaggcagagcctgggtaatcgtcacttcacaagaagatatcgatgccgtactaggagatcttagcgctaaaaaaggccaagacttctccaagatccaagggcgttttcacacaaggatttccctctcctcgtccaataccaatgaggtaatacagaaacgtctgctcgaaaaaagtgaagacgctaaaaactgcctggcagaattgttcagtcaaaaaggcgacattcttcgcaaccagttgacctttgataccagcactacagctgagcttgctaactacagtgataatgttgagtttgttgatcactacccttttattccctatcagtatctgctggtacaaaaggtcttcgaagcaatccgcaaagtgggggctaccggtaaacatctctcccgtggtgaacgttctctgctggatgcattccagaatgccgcacgccagcagatgaacaaagatatcggtgtattggtgcctttccatgccttttatccggcaatcgaatctttcctcgataccaacgttaaacgcatcttcgaacaagcggctgagaaagcaagcctcgatccttacgacattaatattcttaaatcgctgtttttgatccgctatgtcgatctggtcaaatccaccattgataatctggtcacactctctattgaagaaatagataccgataaagtggcactgaaaagccgaatcgaagccagtctacagcgtcttgaaaaccagctattgattgtcagaaatggcgatgaatacgtattcctgactaacgaagaaaaagaagtcgagcaggagatcaaacacactcaggttgaagcaactgaagagaaccggcaactggcccggttggtgtttgaagaggtaatgggcaatcgccgtcagtatcgctatccggtaaacaagcaggattaccctctgactcgcttttgtaacggccactctatagacggcagccaacaaacagatctggtgctcaaagtcatttccccactggatgccaattttgacagttataacgaacaatcctacaaggcactgagccaagaagggaatggttgtattctggtacgcctgtcgagtgagaagcggatctgggctgaatttgatacgtggttgaaaaccgagaaattcctagcagggatacgaggtaaacgacctgagcaagagaaattgctggcagaaaaagcactcgaaaacaccgagcgtcgcagccgtctgaaattactattcgatgatctggtgaaacaagcacagatattcgcactcggtaatgagctgcaaagtaaatcggctagtgtcagcaatatgcttgatgaagcttgtgcctacgtaatcgaaaactcattccaaaagctctctttactacaaagctgtggtaacaacccggtgcaagagctgaagtcggtgatcatggccgatgacatggcacagctaaatgtaaatctcggtgaacaagaccccaatgctgctgcaaaaaaggagattgaactctttttaaatgtcgcagatgaaaaaaatcagccggtctaccttaaagaattgttagagcgattcagtgctcgtcccttcggctggaaccgtgacgaagtaatgctacaggtgactcatctggtcttgcttggtaaggctgcgctatctacaccgaatggtgatttgcccctcaaacgcagctacgaacattttacctcggtacgtagccacagcacactgcgtattcgtcgagtacgtcagcatacagaacagcaagtagctaaagcggctaaactggcgaaagatatttttaataaacccttcgaaagcagcgaaaaagagctggcgaataagcttcttgacgtactaggcgagtggcagcggttaattaaagaatttgattttaaagctaaagatgggaattgccctggcaaaagcaccctgcttaccggcagtcgattgatcgccagcctgcttgagctgggcaacaacagttatgccctaattgatggactctgccagcagagcaacgaatggcaggattttgccgaagattttgaagaagtcgaggagtttttcactcgtcagtttgatatctggcaacagttgcgtcgagccctcaacgatcaattcaaatccaatcgccatgcactggagcaaaacccagaagcggctaaagcattatctgcactgcaggctatctacgatgataaatccccgtatagcaaactgcgccaggtgggatcgttaattgatcaactcatcgccattaacctgcaactggtagaacagaaacgtgccgcggctttggaagcgatcaatgcaacccagcaaggtgttgcaccgctggttactgacttaccagctgagttacaaaaccaggcaatgcgtccctttaatctgttaaaagaacgggtcagtaacagcttatccttacatgagattgttagcctgcaacaagaggctgatgatgaagaagataaggtcttagaactgatcaaccgctacagcgccgaacttcaagctcgtctggaagcggagcaagccgcagcacggaaaaaagcggctgaaccgcctaatagcgatgcgggtactttgcgagaaccggatccatcaggctcgccaactactattgcgaataactctgctgcgacagtggttagccacaaaccaatacctaaacctatcgaactggtttcacccgcagaattactcggtgccagccatatctttatagaaacggagcaggatatcgacacctatctcgcgacgcttcgcagccgtttacaacaggcaataggtcagggtaaacgagtgcggatcaaatag

SEQ ID NO: 120669 - DNA, 1755 bp, Enterobacter cloacae
atgtaccaaaccggtggcaccatcgaaacgctgctgaacaaagttgaacagcatgaatatattttgcctgcaatccagagagaatttgtctggcggccagatcaaatctgccagctgtttgactctctactacaaggctacccgtttggtaccttcctgttttggaaaattaaaactgagaatctgcgtcagtatcaattttatgattttatgcgtgactaccaccagcgtgatcaagtccactgtaaaaaactagatatcatcggtgaaaatgatcgcatcgcggttctagatggccagcagcgaatgacggcactaaacatcgggttacgcggttcctatagttggaaaactcagggtaaatggtggtccagtgcagacgcctttatcgaacgtcgcctctatctcaatctttttgaatgcacagaccctgacagcggaactcgttatgagttcgagttcttgagtgaggatgaggcaagccacaacgatgaacaacaccattggtttttagtctcccgtattctcggtatgaatgcctatgacgtaatgatgtcagtcatggaaatgaaaatgccagatgaacgcaaaccagcagcaggtaaagtgatttcccgttttcatgacatcattcacaataaacctttgatcagttactacctggaagaaggtcaggagctatccaaggttctcaatatctttatccgtatgaatagtggcggaacaacactctcctattcagatctactgctctccatcgccgtaacgcaatggagcacgctggatgcgcgtgatgagattcacaagctagtagatgaaatgaaccaaataggtaatggtttttcctttagcaaggacctggtgctcaaagcaggtctgatgctgagtgatatcggcagcgttgggtttaaagtcgagaactttagcaaagagaacatgcgcaagctggaagataattgggaatgcatccggaaagctttacttcttgcagtcaatctaatcagcagtttcggcttcaacagttacaacctgggagcagacagttccctacttcccatagcctattacctctaccatcgagatctggataacagctacctatcccgtagcgagtatgctgctgataggcaggggctcagagattggctcattcgctctatcctaaaacaatccggtatttggggaagtggtcttgatacgcttctgactagcttgcgaagcaagatcaaggaacatggtcagcaagagtttcctctgatagaaatgtctattgcgatgacagaacgcggcaagagcttacgctttgaagaagaagaactacagtctttggttgaactcgactatggcaaccgccgaacctttgccttgttatctcagctctttccgggacatgacttctcccaccacttccatgttgatcacatattccctagagcccgctttaccaaaagccaactgaaaaagataggcatgaccgatgaaacacagattgaagagtggattatcatggctaaccggctacctaacctacagttgttagaagggggccagaacaatgaaaaacgtgagaagttaccgcatgaatggtacgaagtgatgtggccggagccagctgcccgtgccaatcatcttcacttacaggcaatcgactcacttccagagactttggctggatttgaggcgttctatcataagcgtcgtgaaatattattggcgcgtttacgtcacattcttagtgaacctcttacggcataa

SEQ ID NO: 120670 - DNA, 3678 bp, Enterobacter cloacae
atgaacactgccaatttaaaaaaaatagcccctcgggctcgtacagcatttatcacagcgatcaaagcacgcgctgctgaatttggaatcactgccaagggccatattgagccggtaattagcggtgaagttttgcaagttgctggatttacccatccagccagttgtgcctctgcccttaagcgcctgcaacaacggcttgcaaacgatagttatgagactttaatagagcatgtcgcatacacttggtttaaccgcttctgtgccatccgctttatggagctgaaaagcgaagagggatatttagaacacggtgtgcgtctgctatcacacccgtcccagccactgggttttgaggtgttggatcgtgcacctgaggtgatcgataacctgataacagaaggtgtggctttggataagtccgctctgttggacttgttactggcaggtaatgagcaggaggctctcttccgtgagctacttctaggtcaatgtcaccgactgcatcaagcaatgccatttttgtttgaagccattgatgatgaaacggagctcctgttacctgcaggccttactcgcaccgatgccttttggcgtgaactggtagataagatcccagaagctgactggcagcaagtagaggttatcggttggctttaccaattttacattcttgatgaaaaagagagggtggataaaaaagtaaaagccgggaaagtagttaaccctactgaaattccagctaaaactcagctttttaccccaaactggatcgtacagtatttagtgcaaaactcaattgggcgctactggctgcaaacctacccaaattctagcttgcaacaaagcatgcactactatgtagtacatggaaatcaatccacagaattaaaggataaattatcttattttgctcctgatagtatcgatccggagtcaatcaaggtactagatccagcttgtggctctggtcatatcttggtggaatcttataacctcctttatcgcatctatgaggagcgcggctatcgtagtcgcgagattcccgagctaattctcaaacacaacttgtttggcctcgatatagatgaacgcgcagcacaacttgcaggttttgctctgttaatgcgtgctcgtcaggatgatcgtcgcctgtttactcgcggaattagaccgcacatacacgctctgcaggaaagtcgccacttgaatatatccaatctatggcagatgctgaaccttaatactgactggactgccggccaagtgcaagatatgtttaccgtgctcccccaatccctcgtagccagcaatccacactttagcctgctgaatgatttgtacctgcgtttccttgatgctaaaaccctaggctctctaatcgagttaccaactgagcaaaagcagatcatccacgagttctatgccatcttgcaagatttaagtatcagtggtgatgcaatgcaaaaaactgcagccaaagcactactacccttgctggcacaagctgatgtgctatgccgacattacgatgcagtaattgctaacccaccctacatgggaggcaatagtatgaattatggtttgaaaaaatttgccgaagaaaactttccggatagcaaactggacatgtttacaatgtttattgagcgggggtttaaattagtaggcgaaggtggttttaacgctatggtaacgatggaaacatggatgttcttatcgtcatataaaaaattcagattaaatatcttatcatgttcgtctatagttacattaactcatcttgaaaaaatgctgatgggtattgcttttaggactgttgctacagtatggaagaatataaaaggcgataaaactcctggtatattttcttttgtaggcaaagatgacgttaataaaaatggcattccatttttatttccgcctaagaataagcgattatcatatatttccagttatagttttgaaaatatccctggagcaccaatagcctattggttgcctgtcgatttgcagaagtcatttaaagaaagagctttaaatatagaatgcaaaccgagaataggaatgcaaagtggggataatgaaaaattctatagactttggcatgaagttaataactcagaaatagtaagaaatatttctgcgcttaccaatacaaagggtaagaaggcatgggttccacttcaacgaggaggagatgcaaggaaatggtatggaaacaacctatacatagtaaatttaagcgatgaaggagctgatattaagaggacaaaaaatgcatcattgagaaatgccgatcactattttaacacttctgcaacctggaatagattaagccaaactcgcttctatgttaggcatgttgaacaaggttatgcttttgatgatttaagtccatttgcaaactcatatttagctgaaaaacattatgagcatctgggtttattggcatctagcgcggctagatatttaatatcatttatatctacaggtcgcaaaactgaagtgggacatgtatctcaaattcctttaccaactacctttaatagcggtgaagcagtatcaactatttgcaaaaaattaattgagttatcaaaaaatgactggaattcctatgaagaatcagcaggcttcataaagccatccctattggataacgtagacaaaattaactcattatgcaacttgtataaaaaacaatgtgcttcttggcagcgtagtatctttgaaatgcaacgtcttgaagaagaaaataatcgcctattcatagaagcgtatagtctgcagactgaactaacaccagaagtatcgatcaacgagattaccctgtcatgcaatccgtattatcgttacggtggaaatagaaccgatgaagagctcaaagccatgttacaaagcgatactgtcgctgagcttatttcttacacaatcggctgcattatggggcgttattcattagatcgcgaaggattagtttatgctcatgccggtaacgaagactttaaagcgctagtagaagaaggtgcttatgcccgttttcctgcagacagtgacggtattctgccgctaactgtcgaagcttggtttgaagatgatattgctgctcgggttgtagaatttatccgcacagtctggggagttgagcatctggaagaaaatctgcaatttattgccgatagcctgtgcttatctgcgatcaagccagtgaaaaaaggaggagaaacctcccgcgaatctattcgccgctatctttctactcagttctttaaagatcacctaaagacctataaaaaacgcccaatttactggctattcagttcaggtaaagagaaggcattcgaatgtctggtctacttgcatcgctataatgaaaccaccctcccgcgcatgcgtaccgagtatgtcacgcctctgctcggccaaatggacagccgtattgagcgcctgcgcctgcagcagaatgaagcagaaacagccgaagccaaacgcatcggtaaaaagatcgatagcctgaccaaacagcttaccgagctgcgttcttttgacgaccagctcaaacactatgctgatatgaagatccagctcgatctcgacgatggtgttaaggtcaactacggcaagttcggtactttattagctgaagtgaaagctatcactggcgataaagccgagtaa

SEQ ID NO: 120671 - DNA, 2604 bp, Enterobacter cloacae
atggatatcactcagcttcaaaccgggctaaacaacaaattcaccgcagatcggattgttttctggcacgacccagaacagagctttactgcacagcttacagagctcgccatactgtggaacgggttcccagtaacagtgctcaatatggcagagcagtcacagcttcaaactcgcaaacgcattgaaatcgatgaacccatgcagggattccttctctactggcccagttcagaaccatcaccagctaaagactggttgctcgatatacgtcgttatagcaccactttttatgctgatgcagcctcaattctgcttaatgacctcggtctcgccaatatggcgctccgcgaccacatcgcgtcacgtaaaagctttttcgccaacaaagagcgtactgcagcctttaaacgtcgcctggacggccgtggcggtatagaagatccgctatcacttgatatgaagatgataagtgtcgtgctggcctgtcatgctcagattgccgaaataatgaaaagcattggcgatcgattacttgagaatgctgaaaccgctcttgttccgctagaacagcatggattactgcctgcattttggcatttaatgaaccgtgaatatggataccatatagctgaagggacagaaccgtcactacgcgaactgattcgtaagttactagtgagtgaatgctacgaacagcttgataccaaagagcgccctgtctggctacagtcacaactattagccacgcctaccggacgtgcgaatgctatggctctgctatctggttggcgtgattctaaccagtacagcagcaattttgccgacatatctgcacaggtagcggatcagctcgaacttgcttcacgcctgacagcgcaagatatctggctctggggagaagtcgaaggctttgaagcggtcgaacaaggtttgatccgtgagctgatttctggattaaacaacggtgacttgaaactgaatcgagtagagtttgcccaactaatctctcgtcgtcgacatggattctgggccagaactgtacctaaatatgcatatatttaccaggcgctgcaacaagctgaattgttgctagaactacgccgttcgaaaccggatggttttcattacacttcagcgcaagaaatgtatcttgcctatgaagctgaattgttccagtttgatgcagcctatcgcctgtttaatgaagcgctattacatctgcaaggacagtcggtagaagtgctggcagtactggccagtaaaatcgaagatttgtatgtgaactggtatctgtaccaactgggactgacatgggatggcttgctagttaaagagcagttgcttgataactggcaacttggcctcccttctcagcatcgcttctatgatacagtcataaaacaacgctttgcccaaagcggcgtcaagcgccagtttgttattatcagtgatgccttgcgctatgaagttgctcatgagctccagggacagataaatgaagccaagcgcttcactgcgcagctcaagagccagctcggggtactacctacctacacgcaacttggcatggccgccttactcccacatcagcaactagactatgccgctaccaacccaacagtattagtagatgggcagagcagcgcgggtttagaaaatcgcagcactattttaagtaaggtaggtggtatagcgatttcggccaaaagtctgctgagctggacccgggcagaagctaacgaggcggttggtgacgcaaaggtaatctacgtctatcacgatgtgatcgatgctcagagtgaatctcagaaaagtgagctcaagacattcattcatgcccgccaggctatagacgaactgaatggactcatcaacaaaattatcaatgggtttggcgttactcgcgtagtgatcacagccgatcatggattcttattccaacaggcctcagttgaaaacggggtaaaatcgcctctgaaacacgaaccatctggaactctggaagcttcaaaacgctatctccttggtcgcaatttaccaacaaacgaagatgtctggcatgggcaattgcgtaatgttgttggtggtaactctgatgtggaattctggcttccgaaaggagtgagtcgtttccattttgttggtggagcccgcttcgtccatggtggtgcaatgttgcaagaggtctgtgttccaatacttgaagtacaagagctgcgtggcaagaaacaaactctgcatgaaaaaaccaaagtcgacatagttccggcataccaacccattaagctggtaaatgtgatcgataaaatccgcttcctgcagaccgatgccgtcgatgaacgtcataaatcaagaatggttcgtttctcggtggtagatagttcagaacagaccgtgtcagctattgagaagctactctttgaagcgacctcaagtaatctggatcagcgccagcaagacgtgcgtttaaaactgatcggtgctcaatttgaccgcaaggcgcagtaccaattgctgctcgttgatgttgaggatggtattgaaatggcacgctatccagtcactattgatttggcaatccaggatgaattcggtttttaa

SEQ ID NO: 120672 - DNA, 2232 bp, Enterobacter cloacae
atgccacatgatgagataaatcctactgaaggtgagtttgtaggaaaggaaaccgcgcaagagccagcggtgaatgtcacacatatcacgaacaatgtagtcatccagcagatggacgtttacacggagaagcttgcccagccgagcggaactactgttgatgaggcttctatgctcagcattgacgatgagttatctcagcatgccagcatgggtcttgatgcccgtctgaatcgttactttaagggtaaagttgtccgtaaggatttgaccaaacagctaaaagaaggggctaatgtccctgtctatgtactggaatatctgctcggtatgtactgtgcttcagacgatgatgaagtggtacgcgaaggtctggaaaacgtcaaaaaaatcctcgctgagaactatgttcgcccggatgaggctgagaaagtaaaatctctgattcgtgagcgtggtagctttaaagtgatcgataagatcggagtaaaactcaaccagaagaaagatgtctacgaggctcagctttcgaacctcggtatcaaagatgccgtgatccccgccaacattgttaaagctaacgagaagctgctcaccggggggatctggtgtatcgttactcttaactatttttatgaagaagggcaaagaatttcgcccttctcaattttcaaccttaagccaatccagatgccctctatggatatggaagagctttttgccgcccgggctaatttctcaacagagcaatggctggataccctgatccgctctatcggcatggagccaaccaatctgaagcaacgggtgaaatggcacctgttgacgcggatgatcccctttgttgagaacaactataacgtctgcgaactcggcccacgtggtaccggtaaaagccacgtctataaagagtgctcgcctaattcattactagtctcaggtggccagacgacagtcgccaatctgttttacaacatgagttcccggcaggttgggctggtaggcatgtgggatgtggtagcttttgacgaagtggctggtattaccttcaaggataaagatggtgtccagatcatgaaggattacatggcatcgggctctttttcccgtggccgtgattctatcgaagccaaagcatccatggtatttgtcggcaacataaaccaaagcgtagaaacgttagtcaaaaccagtcacctgctggcacctttcccggaagcgatgatcgatacagccttctttgaccgtttccatgcctatatcccaggctgggatatccctaagatgcggcctgaattttttaccaataactacggtctgatcaccgactatctggccgaatatatgcgagaaatgcgcaagcgtagcttctctgatgctatcgaccgcttctttaaactcgggaacaacctcaaccaacgtgatgtaatcgcagtacgccgcacagtctcaggtttgctcaaattattgtatcctcatggtgtgtttggtaaagaggaggtacgtccttgtctcacctacgcattagagttacgtcgtagaatcaaagagcagttgaaaaaactaggcggcatggagtttttcgatgtgcatttcagctatctcgacaacgaaactcttgaagagtttttcgtcaatgtacctgagcaaggcgggagccagttgatccccgaaggtctgagtaaaccgggagttgtgcacatggttaccaagggtgtcacaggccaactgggcctgtatcgcttcgagactcagatgactcctggtaatggtaaacacacgacatctggcctaggctccaatacaccagcaaaagaagcaatccgtataggttttgattatttcaaaggcaacctaaatcgcatcagtgctaccgccaaattttccgagcatgaataccatctacatgccgttgagttacataactcaggccctagtaccaaaaccagccttgccgccttggtagccttctgttccattttgatgggcaagccagtgcaagaacagatggtcgtgctcggagatatgacacttggtggtgtggtgaatccggtcgaagatctggctggtagtttgcaactggcaatggatagtgggggcaaacgtgtgctgctgccgatggcatcagcttctgatatcccaactgtgcctgctgagattttctccaaattccaaatcagtttctatgcagatccggtggatgctgtgtataaagcattaggtgttcaataa

SEQ ID NO: 120673 - DNA, 1251 bp, Enterobacter cloacae
atggcactgagtgatgtaaaggttcgttcggcaaagcctgaagcaaaagcctataaacttactgatggtgaaggcatggttttgctggttcaccctaacggttctaaatactggcgacttcgttatcgcttcggcggcaaagagaagatgctggcgctggggaaataccccgaagtctcgctggcggatgcacgggctcgcagggatgaggcccgtaagctattagcgaatggcgtcgatcctagtgagaacaagaaagtcgttaaggtagagcaggagcaagaggcgataacatttgaagtggttgccagaaactggcacgccagcaatcagaagtggtctgcatcacatagcgctcgtgtgttgaaaagcctggaagataatctctttgatgctatcggaaagcggaacattgcggaactgaagactcgggatcttcttgtacccatcaaagctgtggaatcatccggacgactcgaagtcgccgcccgtttacagcaacgtactactgccattatgcggtttgctgtgcagagtggtttaatcggctacaaccctgcacaagaaattgccggtgcagttgctacggcgaaaagacagcatcgcgctgcacttgagcttaatcgcattcctgaactacttaatcgcattgatcactactctggcagaccgttaacccgacttgctgtcgaacttaccttgttagtctttatccgctcgagcgagctgcgatttgcccgttggtcagaagtggattttgaaacggctatgtggacgataccaggagagcgtgagcttctggaaggagtcaagcattctcagcgtggttcgaagatgcgaactccccatcttgtacccttatcacggcaggccttagctattttggaaaagatcaaaagcatgaatgggaaccgagagctgatcttcgttggcgatcacgatccgcgtaagccgatgagtgagaacacggtaaacaaggcactgagagtgatgggctataacacgaaaacggaagtttgtgggcatggttttagaacgatggcctgtagttctctgattgagtcaggattgtggtcgagggatgcggtggagcggcagatgagtcatcaggagcgtagctctgttcgggcggcttatatccataaggcggagcatctgggagagaggagactgatgttgcagtggtgggcggattatctggatgctaatcgggagaaggtggttagtccgtttgattttgcgaaaaaataa

SEQ ID NO: 120674 - DNA, 1770 bp, Enterobacter cloacae
atgaataaggaatggtttgaattaaaagatgcaagacgaaaagattggaacaagtcggtctggataacccttcgtgctataaatacaatttgcgaaaaaggaaaaattgggcatttaggttatgaatcagagtttttcggtttaggatctgcggcttttccgcttgagcaaatagataaagttaaaaaactaggctggtctgacataggtatttctcacgagcatgctggttatgttgacggagatgattacataccatgtgatgttttttgtagttcatttagggaagttgaaggactcaacctagttattgagcaaaaaggcgaaggggatttcaaacgcgtctggtatctacatcctgatttgataactactctagggttatatagagaaggtgatgtatgggtatgcccgagagaggggtatgaagaagttgttcgatttttattttgtgaggaaaagcctgtctcagttgagataaaaagtaaatatctgaaagattatttatgtgctcgtggcctttttttatatttaacagctttttattctcgtgaaagcataactgaagatgatgttacttccttatggaatgatgaagaaaataatattaatgatgaagattttcgttgggaaggtcgtgttattcctattcatgaaggtgggcatccttttggcagtaaaatgtccgtttttcatgtttttagaacagatgttgaagaagacgatgaacttccagatttatcggctattccaagtgataataatactcatagcgagcaatgggaaaaaagctttgaaggtcgaaagttataccggatattaggcgagttatggaaagattcgattgtaaatccatctcaacagagtcgcatgatcaggggcgataaaataccgtcgagtatttatttcgttattgatcttgaaggaactcgcttgtgtggagatgagcttattgagtcaggtaaatggctttggttcaaacctgatgtaatgagcgtgctaagtaagaggagaggaggggagctcaatttttatagccgatatacaggtggtgtggcttgctatgatggttataaaactcattttggtgtgaatgaacttggtttaatcaatgtctacgcaaaagacataggcttattgccagagtggcagcaacaaatttgggctggttataattgctctcctgaaggaggtatatccaaagagttatatatgtcccaagttcgtgccgaaccagctgaaagccaatctccagaacaatactttcccgtggtcttaaatgaattaaataaaaaaacacaagatctgtttgggtttaatttgttcagagatcatgagtcaatacccgaaattataaaaagcattcatagattcaggtccttagatgaagcttctttctacgatcttgccaaggatcttgcaagagttattgctgataacattgacgcctcagcaatacagaaagttattgctccgccaaaaggagaaaaatgggggtctttgaaatctcttgaaaaattattgacctcaaaatttgataattcggtagtgcgaaaagttacagccccgttagttggcatctatgagcttaggcatgccgacgcacacttaccaagttctaaaattgaagaggcattcaaacttattgaaattgatagaagtttaccctttgttgttcaaggggaacaaatgctacacattgtagtgtcttcactatacatggttctcgaaggctttaagcaatggcatgggcatgatgcacgtagttag

SEQ ID NO: 120675 - DNA, 495 bp, Enterobacter cloacae
atgcagattcaaggcatgaaaaagaccttgagattacaatttggcaagcgagttaaagagctacgtgtagccaccggaatgagccaagaagcctttgctgatcgctgtggttttgcgcgtagctatatgagccgcatcgagcgtggcggctctaacgcgtctttagatgcaattgaggtgctggctcgggcgttaggggttgagccgtggcaattattagcgtccgaatcatctcatgatgacgatccggagctagtggttccttatgcggctgatggttcatgttttcatcccggtcttgcaagcacgcgcgatggttcattcggggtaggtgataaagcctctcagaagcgttttgacacgttttccgaagctcttgagtatttgcgtagtatggaaacggcaaaatggcgtaggcccaaccagagcggaaattggggcatcgtttctgccgttaaatgggataagctaaaaaagaaggtggcagatgaataa

SEQ ID NO: 120676 - DNA, 498 bp, Enterobacter cloacae
atgacgagatcggtttttttttcgccaaaaataaccaaagttgtgctgagatgtgttggttacaacttaatgcctaatgtcatttttgttaataagaacaataatataatgaaaaattcaatgagaattttggaggctctctcatttgcgctgggaatgtgggctttttccgctgttagtgcagaacactcgattggaaagcgaagcgctgtatgcatagatgacactccagaatgttatgcaaaaacgcatcacaatccaattagagaatgcatacaagtcatcgatattaaagcaagttttcgccatgtgtggcatgcagataaagggaaaccgattttcagcaactacctttggcacgacaaagataaacgcactattcaaatgtttggacaacaagctaaagcgataaatagcttcgggatgccaataccgcttcaatatttttgtgtttttaatgccaatactggagctgtcattgcagcttcgtttgagtaa

SEQ ID NO: 120677 - DNA, 1533 bp, Enterobacter cloacae
atgaaactgcttcaaagtgctgtgccagccatcgaagccaatccggggttttgggagagtgcaaaacaaacggtgtcttcgggggtcaaggtattggaagggttccataagggctttggggctttaaacgacctcggactagtttttgctcctgctatacttcggcaaaaattaattgttctggatgatattgaacgtaagcatgaaaagcttaacatagacgagctattagggtttatcgacgagttcacacaacaacatcattgccgtttcatgcttattctcaatagcgaccaattagcacggcgtgatatatgggatattctccgtgaaaaggttattgatcaagagcttaaacttacaacctctgcatctgaggcttttgaagttgccgtatcactaactccatcaatttatgccgcacaaatccgaacagctgttataacttgcggactgacaaatatacgtattattaggaaaatcataaaagtcgttaatcgtattctagaaaaccgtaaggatctaacggaatcagttctttggcgtgtaattccttcaacagtcttattatcttcaatacactataagggcctcgaagatggcccagattttgactttgtgctcactcataattcaataggtaattgggatgttttgagtgataaaaagaaagaagttacggaggaaagtaagcaacagtcaaaatggaagctacttatcagccaattaagaatttcacagtgtgacgattttgaacttctggtggtcgaatttttacaatctggtttattcgatgtttcggagttatcgaaaataattagtcgttatatcaaagaagcagacgaatcaaatgcgcgcttcgctgtgcataaatttatggaacgatcattttgggatcatactttgaaagaagaggaacttatagctgaagctatcgcattatcagataaaacgcatttattagatgcacaaacagttagctcactttgtgaagttctttcggaattacccaacggggaggtggttatcgatgatattctctctcaatggatttcctttttccaaactagaaatttaggagataccgaatactcatatttcttccgttataagcttcatcctaaaattttagctgagttcgaaaatgctaaggaaaaaattcaacaaaaaacaacagtttatgaagcttgccgtagtatcgccgagcataatggatggggttctcgtcaagagattgcatttaagtcatccacagttaaggatatggaagatataattagaaaaagcgaaatctctgaattgcgattctttatgtccaaaatgatagatctatgtatcaataaagaaatgtatgaacaatattttggtagtgctatggacaactttatacaggcttgtaggaatattattgaggatcctcaagccgttagacttggcaagcttatcaaaaaactgtttgccaatacggaattgaaaaacttatttgagggcgatcaaaatgcagaagatgttattccaagtagtatagattaa

SEQ ID NO: 120678 - DNA, 561 bp, Enterobacter cloacae
atgacgatcgaacgcggcgacggcgaccgtcatcagtttgcgattgctgaccgtgaagcctacaccggcgtaacggctaaatggctgcacacaaaagacccgaagccgcaaaagcaaaaggtgaagctcaagcgcaagccgaaggagcagcacctgcgcgcgctgcaacatccaaaagcgacaaaaaccacgtcaaaggccggagccaaaaaagagcaggaggcgcgcgagggcgaatatatggtcggtgagtctgagaatgtgctggagctgacgaccttctacgcgacaaaagcgcaggccatgcgcgccgctcaggctaagtgggacaagttacagcgcggagtggcggagttttcaatctcgctggctattggtcgtgctgatttatttcctgagacaccgatagcggtcaaaggctttaagcgtgttatagacgagcaggcttggataatcagccgggtggtgcataaccttaacgggagcggttacacgacgggcttagagctcgaggttaaagtatcggatgtggagtatgttacagaagagatgaataaataa

SEQ ID NO: 120679 - DNA, 399 bp, Enterobacter cloacae
atggttgataaagttaccgaagctgccgttgtgggtggcgtggatacacataaagatttgcacgttgccgctgtcgtagatcagaacaataaagtccttgggactcagtatttctccacaacacgacaaggttaccggcagatgctggcatggatgacctcgtttgggacattaaagcgaattggtgttgagtgcacaggtacctatggttccggtttgcttcgttattttcagaacgccgggttagaagttcttgaggtgactgctccagaccggatggagcgacgcaaacggggtaaaagtgacacaattgatgctgaatgtgccgctcatgcagcattctcaggggcactgttgcaaatagtcggtggtgataaacttatcatccccttttgctga

SEQ ID NO: 120680 - DNA, 588 bp, Enterobacter cloacae; identical to SEQ ID NO: 15280

SEQ ID NO: 120681 - DNA, 285 bp, Enterobacter cloacae; identical to SEQ ID NO: 15281

SEQ ID NO: 120682 - DNA, 417 bp, Enterobacter cloacae
atgaagaaaacctggatgctcgacactaacatctgctcgttcatcatgcgcgagcagccggcagcggtgctgaagcgcctggagcaggtggtgctgcgcggtgatcgcatcgtggtctcggccgtgacgtatgccgagatgcgcttcggcgccaccggcccgaaggcctcgccgcgccatattcagctggtcgacgcgttctgcgcgcgcctcgatgccatcctgccgtgggaccgggctgcggtggacgccacgacggacatccgggtggcgctgcgcctcgccgggacgccgatcggcccgaacgacacggccattgccgggcacgccatcgcggcgggcgccatcctggtgacgaacaatgtgagagagtttgcgcgggtcccgggcctggtgctggaagactgggtgaaataa

SEQ ID NO: 120683 - DNA, 231 bp, Enterobacter cloacae
atgcgcacagtttcgatatttaaaaacggcaataaccgcgccatccgtctgccccgtgacctggattttgacggcgtcagcgagctggagatcgtccgggaaggggacagcatcattctgcgtcccgtccggccgacctggggctcgttcgcgcagctggacagggccgatccggactttatggcggaacgcgaggatgtggtcagcgacgaaggacgctttgagccatga

SEQ ID NO: 120684 - DNA, 351 bp, Enterobacter cloacae; identical to SEQ ID NO: 15282

SEQ ID NO: 120685 - DNA, 744 bp, Enterobacter cloacae; identical to SEQ ID NO: 15283

SEQ ID NO: 120686 - DNA, 777 bp, Enterobacter cloacae
atgagcggcctcttatcatattctcacccgcagcagccggcgcaaatgccggtggccattgactatcccgccgcgctggccctgcgccagatggcgctcgttcaagatgaactaccgaaatacctgctggcaccggaagtcagcgccctgctccattatgtgcccgatttgcaccgcaagatgctgctggcaaccctctggaacaccggcgcacgtatcaacgaggcgctggcgctgacccggggggatttttcgctggtgccaccgtatccgttcgtgcagctggccacgcttaagcagcgcaccgaaaaagcggccaggacagccggccgagctcccgccggtagccaggctcatcgtctggttccgctttccgatcaccactacgtcagccagctgcagatgatggtggccaccctgaaaattccgctggaaagacgcaacaagcgtaccggcagaacagagaaagcccgcatctgggacatcaccgaccggacagtacggacctggattggcgaagcggttgaagcggccgccgtcgacggggtgacattctcggtgccggtcaccccgcatacgttccgccactcctacgcgatgcatatgctgtatgccggcataccactgaaggttttgcagagcctgatgggccacaaatcgattagctcgacggaagtctatacgaaggtgttcgcacttgatgttgctgcgcggcatcgagttcagtttcagatgcccgaagcggatgcggtagccatgctgaaagggaatatttaa

SEQ ID NO: 120687 - DNA, 258 bp, Enterobacter cloacae; identical to SEQ ID NO: 15284

SEQ ID NO: 120688 - DNA, 867 bp, Enterobacter cloacae; identical to SEQ ID NO: 15285

SEQ ID NO: 120689 - DNA, 270 bp, Enterobacter cloacae; identical to SEQ ID NO: 15286

SEQ ID NO: 120690 - DNA, 1206 bp, Enterobacter cloacae
atggacaatattgagcagttacggaaagtcgctacacgtgcaggtaagcttctgacatctttgagcgaaagtatccgacagcaaaaagaggaattgaagcttaccgagttctatcaggaatacagcaaagccgctctgtataagctgcctaagctcagtaaaggcagtgttgagtatgctgtgtccgaaatggaagccggtggctacatttttaaaaagaaaccttctggtaatacgatgaaatacgcgatgacgattcagaatgtcatcgatctgtataaccatcgtaaagtaccgaagtacagggatcgcttcgataaagcctttacgatttttgtatgtaatcttaaaggtggtggttccaagacagtttctaccgcttcattatcacatgcttttcgagctcatcctcagcttctgttcgaagacctgcgtattctggccatcgatttcgatccgcaggcatctctgacaatgttcctgagccatgagaattcagtgggcttggttgaaaatacggctgctcaggccatgctccagaacgtgtctcgtgaagaattactttccgattttatagtaccgtctattatccctggtgttgatgtaatccccgcttccattgacgatgcattccttgctgaaggctggaagggattgtgtgaagaacatctgccagggaaaaatattcatgcggtgcttaaagagaacattatcgacaagctccagcatgactacgactttattttccttgatagtggtcctcaccttgatgcgttcctgaaaaactgcattggggcggcagacctgatgttgacccctcttccaccggcgacggttgattttcattcttccctgaagtttgtggccagcctccctgccctcatagattccatcgaaatggatgggcacacctgcaatctcatcggtaatgtcggcttcatgtccaagatcctgaacaagtctgatcacaaaatttgccatagtcaggccaaagaggttttcggtgccgatatgctagacatggttctgccaagactggatggtttcgaacgttgtggggagacttttgacacagttatttcagcaaatccagcaacctatgatggaagtacagaggcactaaaaagcgcaaaatcagcagcggaagactttgcgaaggcagtctttgatcgcatcgagttcattcgtactaacggaggtatgtga

SEQ ID NO: 120691 - DNA, 975 bp, Enterobacter cloacae; identical to SEQ ID NO: 15288

SEQ ID NO: 120692 - DNA, 1272 bp, Enterobacter cloacae; identical to SEQ ID NO: 15289

SEQ ID NO: 120693 - DNA, 432 bp, Enterobacter cloacae; identical to SEQ ID NO: 15290

SEQ ID NO: 120694 - DNA, 417 bp, Enterobacter cloacae; identical to SEQ ID NO: 15292

SEQ ID NO: 120695 - DNA, 276 bp, Enterobacter cloacae
gtggcttccatctccatcagttgtccctcctgctcagctactgaaggcgtggtgcgtaacggtaaaagtactgccggacatcagcgctatctctgctctcactgccgtaaaacatggcagctacagttcacttacaccgcctctcagcccggtacgcaccagaaaatcattgatatggccatgaatggcgttggatgccgggcaaccgcccgcattatgggcgttggcctcaacacgattttacgtcacttaaaaaactcagaccgcagtcggtaa

SEQ ID NO: 120696 - DNA, 378 bp, Enterobacter cloacae
atggacgaacagtggggctacgtcggggctaaatcacgtcagcgctggttattttacgcctatggcaggatgtgcaggacggtggtggcacgcgtctttggtgagcgtactctggccacgctggagcgtcttccgggcctgctgtcggcctttgaggtcgtggtatggatgacggatggctggccgctttatgaatcccgcctgaagggagaactgcacgttatcagcaagcgatatacgcagcgaattgagcggcataaccagaatctgaggcagcatctggcaaggctgggcaggaagtcactgtcgttctcaaaatcggtggcgctgcatgacaaagtcatcgggcattatctgaacataaaacactatcagtaa

SEQ ID NO: 120697 - DNA, 387 bp, Enterobacter cloacae; identical to SEQ ID NO: 15296

SEQ ID NO: 120698 - DNA, 1797 bp, Enterobacter cloacae
atgttcatactcttcgccgagcgaaaagttggggaacagcacgggccggccgcgcaaggcgtgctggcagccgtgcagaccctgcgtgagatgaacgccgacaacctgcgcaaggtgccggccgatgcacccacggccttcatcaagccgcgctggaagccgctggtgatcaccccggaaggcctcgaccggaaattctacgaaatctgcgccctgtccgagctgaagaacgccctgcgctccggcgacatctgggtcaagggctcgcggcagttccgcgacttcgacgactacctgctgccggccgagaagttcgccgcactcaagcgcgagcaggccctgcccctggcgatcaacccgaacagcgaccagtacctggaagagcgtttgcagctgctggacgagcagttggccaccgtcacccgcctggccaaggacaacgagctgcccgatgccatcctcaccgagtcagggctgaaaatcaccccgctggatgcggcggtgccggatcgggcgcaggcgctgatcgaccaaaccagccagttactgccgcgcatcaagatcaccgaactgctgatggacgtggacgactggacgggcttcagccgccacttcacccacttgaaggacggggccgaggccaaagacaggacgttgctgctgtccgcaatcctcggtgatgcgatcaacctcgggctgaccaagatggccgagtcgagccccggcctgacctacgccaagctgtcctggctgcaagcctggcacatccgcgacgaaacctattcggcggccttggccgagctggtcaaccaccagtatcgccacgcctttgccgcccactggggcgacggcacgacctcatcctccgatggccagcgcttccgcgcgggtggccggggcgagagcaccgggcacgtcaacccgaagtacggtagcgagccgggacggctgttctatacccatatctccgaccagtacgcgccgttcagcacccgcgtggtgaatgtcggcgtccgcgattccacctatgtgctcgacggcctgctgtaccacgagtccgacctgcggatcgaggagcactacaccgacacggccggcttcaccgatcacgtctttgccctgatgcacctgctaggcttccgcttcgcgccgcgcatccgcgacctcggcgaaaccaagctgtacgtgccgcagggcgtgcaagcctacccgacgttgcgcccgctgatcggcggcaccctgaacatcaagcacgtgcgtgcccactgggacgacatcctgcgcctggccagctcgatcaagcagggcaccgtcaccgcctcgctgatgctgcgcaagctcggcagctacccgcgccagaacggactggccgtggccctgcgcgagctgggccggatcgagcgcacgctgttcatcctggactggctgcaaagtgttgaactgcgccgccgcgtgcatgccggcctgaacaaaggtgaggcgcgcaactcgctggccagggcggtgttcttcaaccgccttggggaaatcagggatcggagcttcgagcagcagcgctaccgggccagcggcctcaacctggtgacggcggctatcgtgctgtggaacacggtgtacctggaacgcgccacccaggggttggtcgaggccggcaagccggtggacggcgagctgctgcaattcctgtcgccgctgggctgggagcacatcaacctaaccggcgattacgtctggcggcagagccgcagactggaagacgggaagtttcggcccttacggatgcccggaaaaccttag

SEQ ID NO: 120699 - DNA, 885 bp, Enterobacter cloacae; identical to SEQ ID NO: 54013

SEQ ID NO: 120700 - DNA, 1200 bp, Enterobacter cloacae
gtgaaacccaacagacccctgatcgtaattctgagcactgtcgcgctcgacgctgtcggcatcggcctgattatgccggtgctgccgggcctcctgcgcgatctggttcactcgaacgacgtcaccgcccactatggcattctgctggcgctgtatgcgttgatgcaatttgcctgcgcacctgtgctgggcgcgctgtcggatcgtttcgggcggcggccggtcttgctcgtctcgctggccggcgctgctgtcgactacgccatcatggcgacgacgcctttcctttgggttctctatatcgggcggatcgtggccggcatcaccggggcgactggggcggtagccggcgcttatattgccgatatcactgatggcgatgagcgcgcgcggcacttcggcttcatgagcgcctgtttcgggttcgggatggtcgcgggacctgtgctcggtgggctgatgggcggtttctccccccacgctccgttcttcgccgcggcagccttgaacggcctcaatttcctgacgggctgtttccttttgccggagtcgcacaaaggcgaacgccggccgttacgccgggaggctctcaacccgctcgcttcgttccggtgggcccggggcatgaccgtcgtcgccgccctgatggcggtcttcttcatcatgcaacttgtcggacaggtgccggccgcgctttgggtcattttcggcgaggatcgctttcactgggacgcgaccacgatcggcatttcgcttgccgcatttggcattctgcattcactcgcccaggcaatgatcaccggccctgtagccgcccggctcggcgaaaggcgggcactcatgctcggaatgattgccgacggcacaggctacatcctgcttgccttcgcgacacggggatggatggcgttcccgatcatggtcctgcttgcttcgggtggcatcggaatgccggcgctgcaagcaatgttgtccaggcaggtggatgaggaacgtcaggggcagctgcaaggctcactggcggcgctcaccagcctgacctcgatcgtcggacccctcctcttcacggcgatctatgcggcttctataacaacgtggaacgggtgggcatggattgcaggcgctgccctctacttgctctgcctgccggcgctgcgtcgcgggctttggagcggcgcagggcaacgagccgatcgctga

SEQ ID NO: 120701 - DNA, 678 bp, Enterobacter cloacae
atgtttatcagtgataaagtgtcaagcatgacaaagttgcagccgaatacagtgatccgtgccgccctggacctgttgaacgaggtcggcgtagacggtctgacgacacgcaaactggcggaacggttgggggttcagcagccggcgctttactggcacttcaggaacaagcgggcgctgctcgacgcactggccgaagccatgctggcggagaatcatacgcattcggtgccgagagccgacgacgactggcgctcatttctgatcgggaatgcccgcagcttcaggcaggcgctgctcgcctaccgcgatggcgcgcgcatccatgccggcacgcgaccgggcgcaccgcagatggaaacggccgacgcgcagcttcgcttcctctgcgaggcgggtttttcggccggggacgccgtcaatgcgctgatgacaatcagctacttcactgttggggccgtgcttgaggagcaggccggcgacagcgatgccggcgagcgcggcggcaccgttgaacaggctccgctctcgccgctgttgcgggccgcgatagacgccttcgacgaagccgatccggacgcagcgttcgagcagggactcgcggtgattgtcgatggattggcgaaaaggaggctcgttgtcaggaacgttgaaggaccgagaaagggtgacgattga

SEQ ID NO: 120702 - DNA, 276 bp, Enterobacter cloacae
atgctctcctatctcatctgcgcaaggcagaacgtgaagacggccgccctggacctcgcccgcgagcgccaggcgcacgaggccggcgcgcggacccgcgccacggcccacgagcggacgccgcagcaggagcgccagaaggccgccagagaggccgagcgcggccgtgaggcttggacgctagggcagggcatgaaaaagcccgtagcgggctgctacgggcgtctgacgcggtggaaagggggaggggatgttgtctacatggctctgctgtag

SEQ ID NO: 120703 - DNA, 546 bp, Enterobacter cloacae; identical to SEQ ID NO: 109948

SEQ ID NO: 120704 - DNA, 573 bp, Enterobacter cloacae; identical to SEQ ID NO: 21679

SEQ ID NO: 120705 - DNA, 1392 bp, Enterobacter cloacae; identical to SEQ ID NO: 21680

SEQ ID NO: 120706 - DNA, 657 bp, Enterobacter cloacae; identical to SEQ ID NO: 21682

SEQ ID NO: 120707 - DNA, 192 bp, Enterobacter cloacae; identical to SEQ ID NO: 21683

SEQ ID NO: 120708 - DNA, 168 bp, Enterobacter cloacae; identical to SEQ ID NO: 110172

SEQ ID NO: 120709 - DNA, 504 bp, Enterobacter cloacae
atggataacgaactcaaaaatttccggctgaatatcacgcagctggcagccattaccgatctgcaccgccagacggtcgcgagcaagcttgcaaatgttcaaccggcaccgggcagcaatccaaaacttaagctttatgccatcaccgatatcctcagggagttgctgacgagtaccacaccgtcggagctggtggacgtcgacaaaatgcttccccccgatcgtaaagcctggtttcagtcggagcgtgaaaggctcaagtttcagcaggaaacaggggagctgatcccggcatcagaagtcaccagagaattttcctccatggcaaaagcaatggttcaggtgctggagacgttacccgacatccttgaacgagactgcgccatgaccccttccgcagttgtcagggtgcagcaggttattgacgatctgcgcgaccagatagccctcaaagttgagcaggccgactcaccagaacaggaggaaatgccagaagaggagtaa

SEQ ID NO: 120710 - DNA, 2121 bp, Enterobacter cloacae
atgcgacaggccacggcagcggaagtcaggcgtaacgcttccgccattctcaaagccccgcgccgtatgcctgtggctgaggcggttcaaaaatttatgcgcgtacctatgggggccggtaactcggtaccgtgggatcctgctgtcgctccctatgtgatagagccgatgaactgcctcgcgatgcgtgaatacgatgcagtggtgtttgttggaccggcacgaacggggaaaacgatcggcctggtggatggctgggttgtatacaacattgtctgtgacccgtccgatatgctcgtcgttcagatgaccgaagagaaagcgcgtgagcactctaaaaaacgtctggcgagaacgtttcgtgtcagtccagaagtggcgaaacgcctgagcccgttgcgaaacgacaacaacgtgcatgatcgtacttttctggcgggcaactatctcaagattggctggccttccatcaacatcatgtcctcgtcagatttcaaatgtgtagcgctcaccgattatgaccgcttccctgaggacatcgatggcgagggtgacggttttaccctggcttccaagcgtaccaccacctttatgtccgccgggatgactctggtggagtgttcgccaggccgggacattcgcgacagcaaatggcgccgaaaatctccccatgaagcaccaccaacgacaggcgcgctttcgctgtacaaccgtggagatcgccgtcgctggtactggccgtgcccgcattgtggtgaatattttcagcctgcgatggaggcgatgaccggataccgcgatgaacctgatccggtaaaagccagtgagtcggctcatctgctttgtccgcattgcagcaccattatcaccgcagataaaaagcgcgagcttaacggggtgggtgtctggttgcgtgaaggtcagagtattgaccgggacggcaagatttccggtgagccgcgacgctcgcgcatagcgtcgttctggatggaggggcccgcagccgcgtaccagacctgggcgcagctggtgtacaaactgctgacggctgagcaggagtatgaggctaccggcagcgaagaaaccctcaaggcggttatcaacaccgactgggggctgccgtacctgccgcgctcggccagcgaacagcgacgcgccgatgtgctgatgcagcgtgcggaggattacggtaaacgcctggttccgccgaaggtgcgtttcctgctggcagccgtcgacgttcagggcgggaaaaagcgccgtttcgtcgtgcagataattggttatggcgaaaacggtgaacgctggcttgtggatcgctacaacatccgccagtccctgcgctgcaatgaacatggcgaggcggagccagtccaccccggcgcgtatccggaggactggcagctgcttgtatccgatgtgctggaaaaaacttacgcacttcagtctgacccgacgcggcgtatgccggtgctggccatggccgtcgacagcggcggtgaggaaggggtgacagataatgcctataaattctggcgccagtgtcgccgggatggtctgggtaagcgtgtctatctgatcaagggcgacagcacaaaacgtcagaaaattattaccaaaactcacccgaataataccgaacgcagtgaccgtcgcgctgatgcgcgtggcgaggtgccggtgtatctgctgcaaaccgacctgctcaaggatcagctcagcaataaccttgatcgtgagactcccggagcaggctatatccattttcccgactggctgggggagtggttctacgaggaactcacctacgaagagcgcggcgtggatggcaaatggcgtaagccaggcaagggcgccaacgaagcctttgacctgttctgctatgcccatgccgtcgcggttctgcgcggctacgaaaaaattcgcgactgggaaaaacctcctgcatgggctgagccgcaggatctcaacccaaatattcatgaaggggaacgccccagggagataaccgtgaaaaaaaacaaaaccgttcagccacaagtcagggctgagcctgagaaagaaaacacgctttccggcagctggctgggatcttccggtaggggaggaggctggctgtga

SEQ ID NO: 120711 - DNA, 216 bp, Enterobacter cloacae
gtgaagaaagacgacatctggagaacgctgatgatggtgcgccaggcctaccaggactcgctggacggcaagagtatctctttcaccggcgtaaacggtcgcgccattaccaaccacgatccgaaggcgctgcgcgatgagctcgaatactgggagcgtcgctggcgcgcggtcaacagccgtggtggttcgtacaaactcgctaactttctgtaa

SEQ ID NO: 120712 - DNA, 1521 bp, Enterobacter cloacae
atgggcattcttgaaagaacactgagggcaatttcccccgggtgggccgcggcacgcgagcgggatcgtctccggcttaatgcgtatgaagcggcaaatccgtcacggctgcacaaggcgaaaaagcaaagccagtcggcggacaccgctgtgtttgcagcaggtcagtccctgcgggaacaggcccggtggcttgatgaaaaccatgatctggtgatcggcctgttcgacaaaatggaagaccgggtgattggtgcccacgggatccatgttgagcctcagcccctcgatctggaggggaatcttcattccgatttcgccgggaaactttcggcgctctgggctgaatggtccgtgcgtcctgaggtgactggcatgttcacccgcccggaagccgaacgcctgctgctgcgttcagcactgcgtgacggggaagtgttcacgcaactggtcagggggaaggtgccgggtctgcaacattccacctccgtaccgttctcgctggaaatgctggaggcggattttgttccgttcaaccttaacagcaccgccggccagcaggttcgccagggcatcatcgtgaacgactgggggcgtcccgtcggctaccgcgtttacaagtaccacccggcaaatatgacgcggttcagcgctgaacttaaaaccgtctcagctgaaaacatgcttcaccttgcgcagcgcaagcgtctgcaccagctgcgcggtatcagcctgatccacggagtcattacccgtctttctgacatcaaggattatgaagagagtgaacgcgtcgccgcccgtattgccgccgcgctggggttctatatcaagcgcggtgatgcgcagtctcttggtgacgacggggagttttcacctcccggcggccagcgtcattacgatatcgccccgggcatgatttacgacgatctgcgcccgggtgaagacctgggcatggtggaatcaaatcgcccgaatgttcacctctatgaattccgaaacggacagatgcgggccgtggccgcaggcacgcgcggcagctattccagcattgcccgggactataacggcacctacagctcccagcgtcaggagctggtggagagcttcgaagggtacaacgtcctgcaacagtggtttgtcggccagcacagccggcccgtttaccgcgcatggctggcgatggcgttgcttagtggcgttgaagtgccgccggatgtggatccaaattctctctataacgcgctttatctcggcccggtgatgccgtggattgatccggggaaagaggctaatgcctggaaagccattgttcgtggcggtgctggtaccgaagcggaatgggcacgggcgcggggtaaaaacccgcaggaggttaaacgccagcgactgcgtgaaaccgaatttaaccgtcaacacgggctggtgtttgattccgacgccgccaacgacaaaggagcgatgccagatgcaacggcaaaaccaaaagacgatcggcgcgagccggacgatgatgattaa

SEQ ID NO: 120713 - DNA, 1254 bp, Enterobacter cloacae
atgcagacggcaaacgcggaacgcgtgaacacggtttccgctgtttttgaggcgttcccgtctttcgcgacgctgaaggcagaatgtctggccgacttctcctgcacggcggaaaaagcccgtgacagactcctccaggcgctggcggcagggactacgccgagtgccggccctggcgctattcatctttatgccggaaacggcaatctggtcggtgactccatccgtgctgcggtaatgagccgcgcgggctatgcgcaggctgaaaaagataacgcctacaacggttataccctgcgtgaactggcgcgagcttcccttgtggatcgcgggatcggtatttcaggtgcggggacagcacaggcgatggtcggccttgcgtttacccacagcagcagcgatttcggcaatatcctgatggatgtggcgcacaaggcggcgctgatgggctgggacgaggccacagagtcattcgaacagtggacccgtaaaggcaccctgactgatttcaaaaccgcgcaccgcgtcggtctggaatcacttgcatcgcttcgcaaggtccgcgccggggcggaatataaatatgtcaccatcaaagatcgcggcgagccgattgcgcttgcgacctacggcgaacttttcagcattgaccgccagactatcatcaatgatgacctggacatgctgacccgtatcccgcaggcaatgggccttgccgcgcgtgctaccgtgggcgatctggtgtgggcagttctgaccagcaacccaaaaatgtccgacggcaagccgctgttccacgccgatcatggcaacctggtctccgccgatctgagtatcgaaggcctcgatacggcgcgtaaggcgatgctgctgcaaaaatcaggcgaccgccgtctgaacattcgcccggcctacatgctgacgccagtggccatcgagtcccgcgctaaccagctaatcaaatctgcaagcgtaccgggcgcggacgcgaacagcggtatcgttaacccgatccagaactttgtgacggtgtcctcagaggctcgcctcgatgatagcagcccgacggattactacctgaccgctgcacagggacgcgacaccattgaggtggcatatctggacggtattgatacgccataccttgagcaacagcagggcttcaccgttgacggtgccgcgttcaaggtacgtatcgatgccggggtggcaccgcttgactggcgcggcatggttaaagtcaccaaaaaataa

SEQ ID NO: 120714 - DNA, 336 bp, Enterobacter cloacae
atggcgaaaaattttcagcaggatggcaatacccttgattttcagaataccggtgcgaccgatattcattcgggagaagccgtgctttcaggtacgctggtgggcgttgctcacgacgacattccggctgggttgtggggtgtgctgcataccacgggggtgttcgtcctgccaaaagcagcggaagcggtcactgttggccagaagctctatctggcagacggtaagctgactgtggaagcgggtgaggaggcagctccgaatcctctggcgggcacggcctgggctgaggcggcggctgatgcggattctgttccggtccggcttggttactga

SEQ ID NO: 120715 - DNA, 357 bp, Enterobacter cloacae
atgaaccgctttcggcaacgcctgttaaaagcggatgcccggatatcccgggcatttgccgaagaggtgcctgctgtcctttctgtcggcgctgagttgcgtcctgttacagtgattttcgagacgcctgatgtcccggttgacgtgcccggcggggggcaaattcaggatcgctctccggccttcagcgcgatgaccaccgatatcgtggggcttgagaagcaccacggcgtggagatcaacggcacggcttatcgtgtgacgcacattggcgctgatgaagaaggccgcacccgcgtcacgctggcgtatggcgcaccgggtaaggtgcagccggacatcaacaagtggagctga

SEQ ID NO: 120716 - DNA, 663 bp, Enterobacter cloacae
atggcgcgtgagtccagactgcggcgggatttgcccgtcgatatcgatgtggatgccatctggcggatagcggaacagatcggtgccacccataaacagtttcgggcagcgtattcccgtgcgctgaaacgtaccgccgccaccttgcgtaaaaaagcgatggctgacctgaaagacgggctggcgccgcgcagcctggatctggtgcgccggcgtctgctttcctttcgtcttgatcgcgcttctcagtcacaactggataattttcgtctctggtttggtctcaatgccatcaaggtaaaagacctgaaaggcaggattaacgggcgggtcaggcctcaccatacccggcgggataaatccaccgggcggtatataaaggcgcggcgccaggcagaaaacgcaggattcaccccaaagggcagcctgctatccccacgcacatttgaaaacggggaagtggcgcgctcccgccgtgaaaaccgccggacggtggttattcgcgatccggatacccgccgtacccgcgaagcggaagtcgatatttatgagccgatgctgaattacatcgaagataacgcctttgcggaggcgatggagatttttatgcatcactttgaaaccgatctgcgcgggcgtgtgaaagcccgtatttctgtctga

SEQ ID NO: 120717 - DNA, 555 bp, Enterobacter cloacae
atggctgagccattactgctggggcagtatcacgatgctgtcaccggcgcgctgaaaaaaattgcgtgggtgcgtgacgccgatgcctacccggaaaaaaacgtgccccgctttaccggactggccaccccggcggtctatttctccattaacggctgggagcagggcggcggcaacgagggacagcttaatgtgaatctgtcctgcgatttgttcgttgtggtggacgcggcaggcgctggcgtcagccgacccgaaattttcctgcgcacggcggcggcggatatcactcagtggattgacggccagcagttcggcctgaccattcttgagccagccgtctttatcgatgcgtcacgcgatgagtttgatccgcgcatggatgattacctggtctggcggatctccttcacacaatcagcagcctttggtgcggatccgtttgcgcagattaattctccgctgaacggcgtctggcttggtaaggctccggatatcgggcgcgcgcatgtggacgattatcagctgatttacgaggcgaaacccgatgagtga

SEQ ID NO: 120718 - DNA, 624 bp, Enterobacter cloacae
atgagtgatatcgagggcgatttacagcgtcgcctggcgaatattgtgcggcgcggggttattcattccgttaagcatgacggtataccgaagtgccgggtggatctgggcgacatcaccactacctggctgccgctttgccagggcttttccggggcaaaccgggctgactccaatccgtatgcggtcggggatgcggtcactgtgctgtcggaggcgggcgagcttaataatggccgggtgtttcccggctggaataccggcggtctgccagtaccggagggcagcgacagcgaacatatcacccgctacggtgacggtaccgagatccggtatgaccgcgccgcgcatgccctgaccatcacgctggcggagggcgggacctacaaaattatcggaaagggaacgctcgatggtccggtggaaatcaccgacaccctcacagttcagggcgttacgcaaatcaattccgacacgaatgtgaagggaaacatcggtgcaacacaggaaatttcggacggtaccgggaaaatgagcgggatccgcgaaacctacaacggccataaccataaagaaaatggtgatggcggtggaaccacgaatccccccaatcaaaaaatgtga

SEQ ID NO: 120719 - DNA, 1470 bp, Enterobacter cloacae
atggcgaatttacatggtgtggaaacgatcgaactgacatccggtacggtcgcggtcacgacgatccagacggccattatcggcctggtgggtactgcgcctgatgcctctgccggaacgccggccagtgccagcacaggaaccccgattctggataacgttgtggattttgccgcgacagttgctggcagggcaggaaacgtggtggtggttgaggcagtagccggcatcccgaatgaagaaaatcccgcagcgattgagacctctgctgcctggaatgcggaggcattaacgctgactatcacgcttggctgcgatgaaacgggcaagctgacggcaaccccttcagcagtggccgctgccgtgggcgcggtggatgatgtggaagtcaccgcaacgggaagcgggaatggcgtggtcacaccgttccggttgcagctggcaggcggcgaagatgaacctttcccgctgaatacccctgtggcgattgtcggtacctcgatgctttcccggctcggtgaaaaaggcacgctgaagcaggccctgatggaaatcaacgatcagcgaaatgccctgacggtggtggtacgcgtggccgaagttaacgatacagcgaaacagcgtgcgggggtgctgaccgggatcggcgcgctgtcatctgctcgctccgtgacaacgtaccagccccgtatcgttatcgcgccgggcttcagtgaggatgatgccgtgggtaaggctctggaaaccgttgccggcaagctgcgggcggtggcgtatgttgactgcgaatccggtgcgacactacaggaagtggtccagcgcagacagtcctatggtacccgcaccgaactgctgcgcccgcgcgtacaggtcagcaatgccgacggccagctgatctatcgtccttactctgcgtttgcggcggggttgcgtgcccgaatcgactttgaaaagggctggtggtggagtaaatccaaccaggacatcaataacattctcggggtggaacagatcgacgagttcattctcggcgatgaaaactgcgatgcaaacctgctcaacatgcagaacgtctctaccatcatccgccgggcagggtttaagcactggggcaaccgtctgtgcggtaccgatccacagtggcgcttcgaatcggttcgccgaaccgcagacgtcatcgaggacagtattcaggaaacgatgctggaatatgttgaccgtccgctggaccgggagaatgccgacgacattatcggcaccatcaacgcctatatgcgccagctggtcggcctcggagccattttcggtggtcgcgcctggctggatgaagaacttaacaccgctgagagcatggcggcgggcgtgctgtacatcaactatgactttggtccgaaatcgccgactgagcttatcagcctgcgcgtccgggtgaataacaactatgcgcttgaggagatgctggcagcatga

SEQ ID NO: 120720 - DNA, 507 bp, Enterobacter cloacae
atgagcgaaaaaaacacattacgcgtctggaccttcttccggcaggggatccgcatacagggggcgcatgaatttactccgccggcattgtccattgtcaaaacggatttgcgtaccggcgcacaggatgcgccgtcccccgttgatgacggcatggaagcactcacctgtcagctgaagttttacggtgtggacgtggatatgctgaccgctttcggttttgtcagcggcagccgtccgcgctttacggcctatcagggctatctggctaacggtaccgcgctgggtacgatcgaggagatcgaaggctttgtgcagaccgtcactcccgacgcgcgtggcaaggacagcctgtccgaaaatgccgtcacggttgaaattgccgtgagctattaccgacagactaaggacggtcgcgagctctttgagattgatactgagcgcttctcgcgccgggtgaatggcgtggatgttttgtccggtctggcggcaaaagtaaggctttaa

SEQ ID NO: 120721 - DNA, 288 bp, Enterobacter cloacae
atgtcttttcctggtgaaacacgcgttatcaaactgtattcccctgtttccgttgagaacggtggcctgctcgaacaggtgacgctgcgcgagccgctggtccgtgaccggattgccttttccaaagaccgcggcagtgaagaagaaaaagaggcgcgcatgattgcgctgctttgcaacctcagcgaacaggatatatggcaactgactgcggcagattatgcccagcttctggatgcgtttaatgtttttatgctcccgcccgagaagcgaccgaaagagggctga

SEQ ID NO: 120722 - DNA, 141 bp, Enterobacter cloacae
atgcgggcgatacgttttctgggacggcgcctgcattttcccatgacggaatatctggatatgccgttcagtgtgttttctgattttctcaccgacgaagtggaggcggtaaatcgtggccggattaagccagaaccttaa

SEQ ID NO: 120723 - DNA, 726 bp, Enterobacter cloacae
ttgctcgtccatcaggtcacggtagcttttgccggactgcttcagcagcatcagcagcttgctggcctcgccgccaaacaacgaatccagtgcaaacgacgctttcgactcgtcctgcatgctgagcgcacgctcgacgattttttcaaactgcgccatatcgctgaggcccgcaaaatcccccgccttaaatcccagcgtttcaaacgcatcctgaagggaaccctgcttgccgttctgcttgtactctcccgccttgtgaaggtactcctcgaacaggtcgccgatgttctccccgttcatgtcgtactgcttcgcgagcgtgtcccaggcatcaaacgtcgggatatcgacgccatagcttttcgccacaccagcccgtcgggccgtttcttcgttggtggccgcaggtgcaatcagggtacccagggcggaagccaccactccaccgccgccaatcgccagcccgggagcaaccatcccgcccagctgtccggccataccaagaccacggcgaaacagccctttccctgcccccttgaaggcagccagccgttgcgtcttctgcatctgctgattcagcttctgctgttcggcctccgttttgcggatttcacgggacacgtcgctgtaacgccgtttaagatcgccaaggctgtgccctgccagcttcgcacgcttaatctcagccgccagcttagcctgatctttcgtcagtttttctga

SEQ ID NO: 120724 - DNA, 1119 bp, Enterobacter cloacae
atggcagatcagattgttaaaccggaatatgctcccgctttcagcgtcagcgctgaaggaaaagatattacccgtgcgctgcaacaatgcctggcagagctgacgctgactgattacggcggcgctacggcaaaagcggatgagctgaaaatcaccctgctgtcagaaacgctctcccttccgacaaaaggcgcacggctacgtctggcgctgggctttaacgaccagctggtggataagggctggttcgtggtttccggcgtggccagcagcggcccgccacgtcgtatcgagatttatgccaccgctgcgccaatgaacgcgcaaaaacaaccgggtgatgtgatcagccagaaaacacgcagctgggataacctgcgactggcggatttggttaaaacggtagcgaaagaaaacggactggtaccaaaagtggccgcagagctggccgatatccatatcgaccacgttgaccaggtggcagaatcggacgccaatctgctgacgcggctggcccgaacatggaatgctgtcagcaaaccgtcgtgcggttactggctgtttctgcgtcagggagctacggcaaatgcttccggcgaacataccgcagctctgattatcacaccagaagaggtgtcaaactggtcttacagcgaaggagagcggggcagttcgacagggaaggccaccgccagcagtggtaagtcttcaggcaaaatcggcgtacgttattacgatgaggctgacgggaagaccaaaacctcatcagttgaacatgatggtccctcgatggcgaacccttacacccagccggtaaaggccaccgcagaccagcaggccaaagcgaaaaaaacgcaggcccgccgtaatgaacagaaaatgacagtaaccggaccctgccgaccgaaacatgtttccctcacggcagagtctggcgtatccacgtccggctttggcgaacgggaagatcgcgcctgggtggttgagtcgctggtgttttccctgacgcccgccgggttcagctacacatacaacctagtggttgatattcgcaagcctgcgaaatcctcaaaaaaatccggcagttcggataaaaccggcccgaattacttcggctaa

SEQ ID NO: 120725 - DNA, 354 bp, Enterobacter cloacae
atgaacggtgtaaacagccggaccgggaaacgcctgtccggtagcgaccatttgcgccagtccgtcagcgatattctctccacgcctgtcggcagccgcgtgctggtccgtgattatggcagcgatctgttttcgctggtggacaatccacgtgatgacctgacacggctacgcattatagcagcgactgctacagcgctcgcgcgctgggaaccccggcttaaggtcacacgagtgctcgtctccttcccggcggataaaacggggtgtgtggtggatatcgaagggatcaataaagagaacaatcttcctgtcagtaccggaggtataccgatttatggcaagcagctatga

SEQ ID NO: 120726 - DNA, 915 bp, Enterobacter cloacae
atggcaagcagctatgacgtaattaacctgtccgccctggcggtgccggatgccatcgtggtaccggataccgccgacatttttacccgctggctggcacgcctgtgtgaactcgacacggaatttgatgcgctggtggaatcggacccggcgtataagcagggggaaatcaccgcttaccagcttgctctggcgttccagcgcgttaatgacgctgtaagggctgttttccttgccagcgccagagaggccgatctcgaccagctgggcgcgggctttaatgtttcccgtctggtgattaatcccggcgatccggatgcggttccccctgtcgaccctgtttatgaagacgacgacgctttccgggaacgtatacagctttcgtgggcgcagctgaataccgctggcgcgcgtaacgcttatcgctttcatgccaaatctgcggataacgatgtgctggatgcggacgcctacgggcctgaaacccataaccggcccggcgaggtggatgtatatgtgctctcgcgaaccggcaacggtgaggccgggggtatcctgatcgaaaaagtgatgaataaactgagcgcggatgaagtcaggccgctcaccgattttgtcagtgtgaagagtgccagtatcgccagctataccgttaaggctgaacttgaaataccagacggtccggatgcacagacggtactggaaaacgcgataagtacgctgacgagctacacacagctttcccatcgcattaatgccatcgtaccgctttccgcgatttactcagcacttcagcagcccggcgtatccagagttaagttgctcagcccgacggctgatctggaagcggcagcaggacaggccccgtggtgcagcgcgataaacgtcacccgtaaaggaggagtgagtggataa

SEQ ID NO: 120727 - DNA, 552 bp, Enterobacter cloacae
gtggataaatttcgatctctgcttccaccttcagctattcacccggaacgggcgcaggaacaggcaagcactgagctgatcacggcgctggatactgacatggtacgtaaggtgaaaaatcctgatacctgtcccgcacatttgctgccatggctggcctgggaattcgcggtggattcatgggaggaggcctggaccgaggaagaaaaaaggcaggtgatcagggatgccgcttatgttcatcagcaccggggcaccgccggggcggtcaggcgttcgctgagcgccgtcagcctcccgaccaccgtgattgagtggtgggaggatacaccgcgcaaggatccctacaccttccgcgtggaggtttacagcttacaggctgttgacgaagcgctttaccagcgcatacggcgccaggtcgataaagccaaaaacctccgcagcctgttgaccactatcgatgtgatcgccgatctgggtgcgaagggaacttattatgccggcggtgctgttaccgcctggattgacgttgttattgaggccggagaataa

SEQ ID NO: 120728 - DNA, 2562 bp, Enterobacter cloacae
atggctgagaagtattacagcattctgacaaaccggggcaaggagctggagacgcaatcctctgcaaccgggaagcccgtcatcatcaaagattttgttgtgggggacgggaacgggcaggccgttaaaccgcatcctgcgcagacgaagctggtgcgtgaggtatatcgcagcgcaatttctgcattacaggtttctccggatcaggcgaaccagtttattgctcagctggtacttccggttgccgttggtggattcgtagtcagggaagttggcctgctgacagatgcaggcgaactgtattctgttgcgaactgtgctgccattgaaaagcctgaaaacggtgtcagcgtcagtttgcaattccgtcttgcagtatctgatgcggcaaacgtagagctcaaagtagcgaccggagatggtctgttcctgcgcattgataaaaacctttctgaaatagcggcgagaggggaggctgcacaaaaagggtctcgcgaagccataggcgtttatgatgcgacaacctcacgtaaaggacttgtgcagctcagtagcgaaaccgacagctcgtcagagacgctggctgcgacaccgaaagctgtcagagaagccgctaaggagatcaaggacgcgctgggaacgtccgcatctaaagacgtcgtcacttcaaaaacagatgcaactgctggccgcgtgccggttgtaggctggatgggattaggtggatatggttcggacattctgctttctgctgctgatgccaaaaaacctctgcggaatggcttctacggcgtgcagtcggagccgacatatggaaatgcttccctgattagctttggctatgactcaggctctcaggtgcatcttattgcaaaacaaggcggccaggcgccgttaatcgggctggcaggctctacgccacaaggcgtttttggtgactggggaaaaatttacacagagtttcagaagcccaccgcgactgaagtcggtgctattccatatcgagggacgcttggtacagtcgatttgaatacagtcagaggtacgcagtacgggcggtttaatcaggctttaactgccaatgctactactgcgaggaattaccccattactgaagccggcgaactggatgttcaccagaccagtgcaaatggagcggaggcctgcgtacaggaatatcgtactttcagttctcgtcgtgttttccttcgatcttataacccggcagataacatgtggacaggatggtgtgagttttatacaacagccaaaaaaccaactgcgacggaggttggagcgctgcctattactggtgggaccgtcacgggtaatgtgattgcgaatgggtacttgcgtgcaggtaatactcgcaagcttgaagtcagttcttcaaatacatccacccttgatgggataattaatctttggggtaatgctgaccgaccgacagtattagaatttaaagatgcgacgggataccacttttattcgcaacgaaatgtaaatggttccatatcatttaattttaatggtgccgcagaagtccggggggcaatttctgcccatggtgaaattgtttcaagagctgcgaatggcctgcgtatcgcctacggtaattttggcgcattctggcgaaatgatggcacaacgctttatttgatgttaacgaactctggcgattcgctgggtaattacaactcacttcgcccgctgtatgtgaatctaaccacgggcgcccttcagtcaggaacgccgctatcggtttacaacacaatcactgcaagcgaacaaattaccgcaggcaaagaaatggtggcaggttattccggcccctacgcctgggctgaacagtacaaagcaaaagcgcctttttttaacgcgtattcgacaaccggttcgagtgaatatcatcccgtaatcaaacaacaagcgacaattgcgagcaaaaactcatgggctttttcaatgggttctctggtcgcgggaactgaactttcatggcatctgcacatgaaaggcagtggcggatcagaggttaattttaaatgggacacaaatggtaacttcaacgcgccgggccaggtgaatccgggcagctatgccaattttgataaccgttattacactaaatcacaatcagatgcgggttatatgccgagaacaggtgcatacaccaaagctgagagtgacgggcgttttcagccgaaaggcagttatactcctgcggggcaggcttacacgaaggcggaaagcgatgcacggtacaacctcaaaaataccgcaaccaaatcagcgaatgccatgacgcataaagatgcttcaacaggtgttatggaagtggttatgagtaatataaatgttccaagcaaaacaaatgttaacgtgacatttcctgcggcttttccaaatgcatgtgtaggggttgtaattacatataatggggcagggcatgggtctggcgatgattcggcaatttatgtaccgtcttattcacgtactggatgcaccttatatgctcataacgccgatggcaaatttatgttaattgctaaaggatattga

SEQ ID NO: 120729 - DNA, 423 bp, Enterobacter cloacae
atgaggatttattttagccctagcgaaattggtttctatcatgaatcagataaacaagcttatttactagcaggtacgtggccgaatgacttaattgaaatttcggagaagtggttcctgtatctattggaaggtcaacagaaaggtaagataatcactgtaaatgattacgatcagcctgttcttgtagacccgccaaccgctactaaagagcagctccttgccgaggctgatgctcagaaagaagcgctcatgagcgctgccagtgccgcaattgagccattgaaagatgccgttgagttgggtatgtcaacagatgaagaggaaggtttactgttggcatggcagcaatatagggtgctgttgatgcgggttgatacatcgcatgcaccagatatcgagtggcctgtattgccagcatga

SEQ ID NO: 120730 - DNA, 567 bp, Enterobacter cloacae
atgagtaatcaactatcaaaacgccatttgcgtgagtgcttacaagctgaagtaatgaaaagcgacaagaaattctcatggatgcgcgtttttcataaagcattaaagtgccctgagagacgctttaatttttggtggcgggttgcttcttatctttacagttctgataccaaattgaaaaaacaattggccagaagaattaatagaaaacttgtccaaaagtacaacactgagatacagctgcaagctacaattgcacctggccttcatataactcacttcacatcagttgttataaacggatgtgtgataatcggacgaaatttcaaaataagacataactgtaccattggcattggtggaggggtaaagaatgaaaattctagcccaaggataacaataggtgataacgttgatcttggagttgggacctccattatcggtaacaatctcactataggcagcaatgtcacaataggcgcaatgacgtttgttaataaagacgttccagataacactgttgcctacaatgagaagaagttaatattaaaatttaagcattcctga

SEQ ID NO: 120731 - DNA, 861 bp, Enterobacter cloacae; identical to SEQ ID NO: 5314

SEQ ID NO: 120732 - DNA, 558 bp, Enterobacter cloacae; identical to SEQ ID NO: 7707

SEQ ID NO: 120733 - DNA, 204 bp, Enterobacter cloacae
gtggtagcgttttggaacgcggttgaatccgatatcgctgaaatgaacgacgccgatcgtgaagatttcatggccgagcagggtctgaaccgcgtgatccgcgcgggccatgagatgctcagcctgcaaacctacttcaccgcgggcgtaaaagaagtgcgtggaccatcctgtgggtgcgactgcgcctcaggcggccgataa

SEQ ID NO: 120734 - DNA, 204 bp, Enterobacter cloacae
gtgggtgcgactgcgcctcaggcggccgataaaatccacaccgatttcgtgaaaggctttattcgtacacagactatcgtgtttgaagactttatcacctacaagggagagcaaggcgcgaaagaaacaggcaagatgcgtgcggaaggcaaagattacatcattaaagatggcgatgtgatgaacttcttgtttaacctttga

SEQ ID NO: 120735 - DNA, 519 bp, Enterobacter cloacae
atgaatatcaataaagatgacgaactccttgtgatagttaagtatgaaggaagattttattggttcgttgcgttcaaggaaatgtgggtcttagacagagtaaaatgggtagaggattttgtgaaaagtggggtggaaataaacctacagaatacctataaggaaagatatgacataccagttgtaaatgaagaaaacgcgcagatattcattgaaggtttaattaacgatggttattcatacgataaggatgacattgctgaggagttttataaaaggctttcgcaaaaaacaatttggtgggatatatatgaacttatgccggatttatttatagactttgataataaaagattatattcggaatatgttgagagtatgcattatcaagaatatgttcctgatggttggcaaggtgaacttgttgatttttgcagtaatggatcgttacctcaagatgaaatgttctggataaaaaatgaaactgatcatagaagcgttttgatcgctaaaggataa

SEQ ID NO: 120736 - DNA, 264 bp, Enterobacter cloacae
atgtacagcgcatgttttgatcttgcggattatgctgaggaaaacaaatggggaaaaacgacattacggacacgtggatcggatatagacactgcacccttaatcgatctcggcatggtctgttatgagttaaatcaattcgaggaagcgtataaatattttaacgatgcttataactacagcaaagagcgtgcgtttcaggatagacctaaaaaatatctagagttctatctgcgcaaaagggataagttcgttactctataa

SEQ ID NO: 120737 - DNA, 753 bp, Enterobacter cloacae
gtggttgaggtgaaaaaatattataaaggaagtgttgattttattgcaggtgaagggactattctcaatgagttcataggagaagtagccacgcgacaaataaatattatagatggaaattattatgcttcttcctctttgctagataaaaaagaaaaagttggcttcctgctgtatgatggtaagaaaagcgacctgaacttaagtgacgccgaagaaatttcaaatgaggaatttgaagttttctggcaaacatcaacgggttcattgcaagaaaaaaagcgaataaaatacttgtctggagatgctgtggaacctttgaaaaaatccacagttattgctcatattgtgaataataaagggaagtggggtaaaggttttgttctgtccctttcaaataaatatcctgcggcaaaaaaaagctatcttagttgcttcaaagaaaataacttcccagaattaggggtggttgattttgttatggttgatgctcaggagaagatatttattgcgaatatgtatgcgcaggatggtataaagaaaaatatcaacgacaaaaaacaatacgtatgttatgactctctgaaagtttgtcttgaaaaattatctgactttgctttagttaatcgcctttctatacaaatgccaaggataggagctggcctcggtggtggtgattggaatgttatagagtccttaatactaaaaaatatttgctataaaatgattgattgcaatgtaataactttataa

SEQ ID NO: 120738 - DNA, 375 bp, Enterobacter cloacae
atgaacctcgttaacgaagtaatctttcccttccgtacgcatcttgcctgcttctttcgcgccttgctcacccttgcaggcgataaagtcttaaaacgcgatagtctgcgcacgaatgaagcccttctcaaagtcggtgtggatcttaccggccgcgtgaggcgcagtcgcaccgacagggatgattcacgcgttcacttctttcacgcccgcggtgaagtaggtttgcaggctgagcagctcatagcccgcgcggatcacgcggttcagcccccgctcggccatgaactctttatggtcgccgtcgatgatttcagcgatatcggattcaaccgcggcgtaaaccgctacctctacagaacctttaccgcttga

SEQ ID NO: 120739 - DNA, 552 bp, Enterobacter cloacae
atgacatccactgtcgtaagtaaaatacccagcgcccgtcgcagcgccgctgggattactactaccgcaataacttggtgcgcgaagagcgggacgataacccgctcaaatggtaccgctggcagtacgacagacagtgccgggcgtctcctggttcaggacggcacgctggccggagaggagcagggggtctgggatgcagccgctaacccgctcgaaggttctgttgagaacattacgcacaaccgcctggcgcagctgaatgatattcgctggcgttataatacccatgcttgcactgtagagaaggataacggccaaacccgaggaaccgcaaaaaaccgcagacgcaggtcagcttccgctacgatccgctcggtcgccgcatcagtaaaacgcgacgccagaagctgggcggacagccaaccggcaagccatcaccacccggtgtgtctgggaatgactgcctactgggggaagcgcacggggatgtgctgttcacctacgtcgacgaaagtggtcaggacaactacgatttgctggcgcgtgtag

SEQ ID NO: 120740 - DNA, 492 bp, Enterobacter cloacae
atgggggggtataaaatgattgattttaatgctgatattttatcaggaagagcactaggtaacgtttttttgggggataatatcagtaagtacataagcgagttatatgctggctataaggtaacttactttgattatttcttgcctgatgataagaaaaggcttgcatatattgtagatgacacaatgacaatcgctacccttgaagatggaacgatcatttctattggttgtaacgtaaactataaggggaggtataataaaatattacaaacaggccaaacgatgggggaaataatagggttgacttacaaacagcgtatatttaatggctgtattattataaatgacgactttggtttttcattcgagttgccagcgccatatgatgaaattgcagatagcattgcacatgttccactagatcttgttcttaatgaaatccgtgttgctgattactctgattggaacccacaaaaaataaaacgctga

SEQ ID NO: 120741 - DNA, 372 bp, Enterobacter cloacae; identical to SEQ ID NO: 15273

SEQ ID NO: 120742 - DNA, 453 bp, Enterobacter cloacae; identical to SEQ ID NO: 64554

SEQ ID NO: 120743 - DNA, 1260 bp, Enterobacter cloacae; identical to SEQ ID NO: 64553

SEQ ID NO: 120744 - DNA, 801 bp, Enterobacter cloacae; identical to SEQ ID NO: 96018

SEQ ID NO: 120745 - DNA, 816 bp, Enterobacter cloacae
gtggctaaaacaaagttaaacatcatgagggaagtggtgatcgccgaagtatcgactcaactatcagaggtagttggcgtcatcgagcgccatctcgaaccgacgttgctggccgtacatttgtacggctccgcagtggatggcggcctgaagccacacagtgatattgatttgctggttacggtgaccgtaaggcttgatgaaacaacgcggcgagctttgatcaacgaccttttggaaacttcggcttcccctggagagagcgagattctccgcgctgtagaagtcaccattgttgtgcacgacgacatcattccgtggcgttatccagctaagcgcgaactgcaatttggagaatggcagcgcaatgacattcttgcaggtatcttcgagccagccacgatcgacattgatctggctatcttgctgacaaaagcaagagaacatagcgttgccttggtaggtccagcggcggaggaactctttgatccggttcctgaacaggatctatttgaggcgctaaatgaaaccttaacgctatggaactcgccgcccgactgggctggcgatgagcgaaatgtagtgcttacgttgtcccgcatttggtacagcgcagtaaccggcaaaatcgcgccgaaggatgtcgctgccgactgggcaatggagcgcctgccggcccagtatcagcccgtcatacttgaagctagacaggcttatcttggacaagaagaagatcgcttggcctcgcgcgcagatcagttggaagaatttgttcactacgtgaaaggcgagatcaccaaggtagtcggcaaataa

SEQ ID NO: 120746 - DNA, 474 bp, Enterobacter cloacae; identical to SEQ ID NO: 14829

SEQ ID NO: 120747 - DNA, 744 bp, Enterobacter cloacae
atggcattatgtcttgcggaaacgcttcttgagaaaggcgatgctgatactatatgtttcaggaataagcttctggaatggtatcagcatggttataacagttcaaatggcgtctgttttgatataggtaatacaacgcgatttgctttagagcaatatttaacaattggcccaggatggagcggcaatactgctccagaaactgcgggtaatgcttccattatcagacaagcccctgtctctattttttttagaaagtcattaagcaaagcgttttatgaagctaaaaaacaatgtatcgcaacacacggtgccgcggaagcaatcaatagcacgcagtatttaagttatttgcttgtgcatatgattaacggtagcaataaagattttgttttttctccgcacgttatgccgcttcagccacgcgtaatgattatcaacgcgggtgaatataagcaaaaaactcgcgatcagattcgttcaagtggttatgttatcgatacgcttgaagccgcgatgtggtccgtatggaatacggataatttccgtgatgccattctgctggcagccaaccttgccgatgatgctgacagcgttgcggcgacggcgggacaaatagctggagcattatatggttattccggtattccgcaggagtggaaaaacaatcttgtacaacatgaacgtatcgccaaaatggctggtgaattgttcgatagagcccccgaagacactttcttataa

SEQ ID NO: 120748 - DNA, 381 bp, Enterobacter cloacae
atgaatgaaatgacaatgtttggttacgttgatagagcattaactttagcacagaaaagatatgcagacgtcaagaatcgtgatccccaatccccgcttttgcaaatgtacgactctattgtacaacaattattatttctacgggatttaatcgaaggcaaggaaaaggatagagcgaaattatgggatatgacgttcggtatgtatgcagggaaggagtttgatcattctgatgagttgttttttgaaaggttgtcagatgcctggtttattgtggatcaaatccgccgagggttaaaggttaggctgccgcatgaggtcgataccaactataataaaaagaaacaaaacctcatgaagaaattccctgatgaattttag

SEQ ID NO: 120749 - DNA, 228 bp, Enterobacter cloacae
atgtggtccgtatggaatacggataatttccgtgatgccattctgctggcagccaaccttgccgatgatgctgacagcgttgcggcgacggcgggacaaatagcgggggcgttgtatggttattccgctatcccgcaggactggaaagataaactcgtacaacacgaacgtattgccacaatggcgggtaaactattcgatagagcacctgaggataattttttatag

SEQ ID NO: 120750 - DNA, 1074 bp, Enterobacter cloacae
atggttactgaaaaaaaatatctttttcctctcgagatgaaggatcaggaaaaagagattcgggaaaaattctggaaatgtctctatacctccggagaaaaagagatgttccattactggctactgttaccacagaatgttaagccagcagagttaaaaccggtcacgtttcaggaggttggactgacgaatattggacgatacatcgccgatgacaccggcccctatattgaagtctgggctgcgtatgaacactgccagtgggagatgaatgcgtcagactggcttatcaataagctcgacttaatgggcgagaaagtactgagccagaggataattacgcatccttcaggaagtgggaaatttgcggatatcctgtccattaaaaagatgccatcgggtgatgaggtcgtttcacggtatacggtgcaaaaggattataatcctgtaaatggtggaggtaattacttccttttgaaaacggcttgtggttctaaggattacaactcgatcgccgatactattttcctgattgctatcaactgggatttaatgcatcgcagcaatatgatgctttcagaactgttgaaaacagttagccttagcaacaaaaatgacaatggatttaaaattccggattcatggcaggtgagtacactggatgataatcgtctggtaattgaacacacgttaggtaatgtcaaccatggagtgattaatttctgtcttttccgtcagactgattatccttctgcgcaggctattttcgaagtagcaactgcgcgttttaaccgtcacgatagtgcggtctctcttgcgacgtcggacattgccagcattccaaatgatatcaatctcacgtttacaggcgatctttatagctgtactggagaggttgtcagcgctgctgagaatatcagggcttattacgacatgcgtatcttcaaaattaatgatttatggtgttacgttgaggtggttgggccccatcgtaatcatcgggattattattacgaaaccaataaacgatgtatggaaattattctttctacgtttcgcatagaaaaacgatga

SEQ ID NO: 120751 - DNA, 435 bp, Enterobacter cloacae
atgcattggtttttctttattctctttatgatttggacgctagcgctaatctggaatggaaaagatttatttaacaaaaaacaatggctcctggctgggttgatgttcgttctggtgctagtggctacagtcgtcattggctttacgttgaaatggcttgctcagtcaatgtcattattttccgtcgcaacggccaaacattattcgatcatcttatccatgtctttcctgtgcgtctggggattaaaggtcacagtagtcctgctgtgcacgttattttccgggattatgggggggcacaaaagatacaacgcagaaaattatgaaaaattatcgtctatgacacgtgccgtggcgcctggcttacttatctttgctaaaagcttaattaccctcggaagcttccttatgttttcgggtttatggcttaagtaa

SEQ ID NO: 120752 - DNA, 1056 bp, Enterobacter cloacae
atgggaaaaccagccgccagagcgcgcattgattccagcgcacatactggcccaattcaaagcggaagtcccaacgtaattattggcggatttccggcggcacgaaaaggcgacccgctttcatgttctcaacatggtcagggaagtattctcagcggttcaacaacggtctttgtgaacggtttacctctcgccagggaaggcgacaagacgggttgcaatacttcagcgacccctgcggtcgcaaccactcaacctgcacctccgcaatattggggaggaacggcggcgaagggtgcgggtaaagatggtgctatacatggtgatgtttacgacgcccgggtgctcggcgcctatgcaagtcttgaagataaatccggctttggaaaacccgatacggcttcagccggattcgcgcttgccgatatcacggtcgggaatacaaaaagccaggataaatataaaggtgaggttcgtacaaaagtaggggtggcgaatgccagcggcacgttagtgacagatagggccgattacggggctatcaacctcaatgctaacgctaccgcgatacaatatggcgcctcgggtagcattggaaaagaaggggagcaatacggcggggttggtggggacgtgtatctggcaaccgctgaagcgaaggctgtcagtgaaatgtacgacggtaataaaggacgttatggttttaatgtggaacttggcgcagaagcagcggcggtcaaaggagaagcgacggctaaagccgatttttatggcgtagtcgttgccgatggcaaactttcagggagtgcagggagcgctggcgcttctgctggcgtgggaacctggattgatagtacagattattcgtttaacctcaaggtatcaggtgagcttgcagtggcgcttggtctgggaggggatgccagtatcaaattggctctcaaaccgatccttgactggatttatgacgatgatgagagcaagccttctccagcggcgggcagtggcgatggtgtgattaagacgggctgtgttacagtcctggtaggagattaa

SEQ ID NO: 120753 - DNA, 603 bp, Enterobacter cloacae
atgccgccgtgggcgctgccggctgcggcgacgcagatgggcttttatagccgcagcaaagatggccataaagacaatgccaatattctccgttttgaagataaagccgggcacgagcagatctggatccatgcagaaaaaaatatggatacggatatagaaaattctgaaactcatgatgtcggtgtcgatcgtagaaaaaccatcggacaggatgagaatataacgattaagcggaaccagaaatcagatgtaggtaataatgaaacgcataatattggtaacaagcacgttataaacgttgggaaagatcaaaccgtcttgaccatggataaagaaggtaacgcgctgctggaatctgtgaccacgattaaactaaaagttaaagacaactatattctgatcgccccggataccattgagattcacgtaggccaaggcaacctcaaagcagaggctgtggaacaagccatcttcaaaggtgaagagcttacaaaactgggtgatgggatcaataccgagctcaaggcaaatgatacggtgagtataacgggaactaaccttaccgatattaagggcgcgattgtaaaagttaacagttaa

SEQ ID NO: 120754 - DNA, 564 bp, Enterobacter cloacae
atgaacataaaaaatgcagtccaagatcttgtgaacaaatttaaaatgaatgaattgaatatgggagagatagactatacagacgatgaaaatgagacttcttttcccgagaatttaaatggggaggttgattttttttatcgtcatttgattttaaatgacagtccaacatttgatggtactttttatttacagattattgaacctcaagatctcaacgaaatattatccggttggcgagttcaaaatgatacggcttggcgcgatgaatatataatctttgctgaaagaaatggtgacgttcttttttgtgacacccaaaatctaacatctcctgtttatggtagcattcaaaaacgaaactttataatttctggttccttagctgactttttgaatgctttttgttctgctattgagatggaacaaaataattatgatggtgatgctacagatgatgaatttaatttaagagaagattttctggaagatatcgatgtgatgcttaaaactaaactaaaagatgttgaggttgaagggtttaagaaattcttttttggttag

SEQ ID NO: 120755 - DNA, 519 bp, Enterobacter cloacae
atgaatattaataaagatgatgatctccttgtgatagtaaagaaagaaggaatatattattggttcgtggcgttcaaagaaatgtgggttttagatagaattaaatggatagaggattttgtgaaaagtggggtggaaataaatctacaggatgtccataaggaaagatataacatacccgtagtaaatgaagaaaacgcgcagatttttattgatgggttaattaaagatggctattcattcgataaggatgacatagctgatgagttttttagtaggctttcgcaaaaaacaacttggtgggatatatatgatcttatgccggatttgcttatagattttgataataaaagactatattcggagtatgttgaaagtatgcattatcaaaaatatgttcctgatggttggcaaggtgagcttgttgatttctgcggtaatggaacgttacctcaagatgaaatgttctggataaagaatggaacaaatcatagaaacgttatcattgctaaagggtaa

SEQ ID NO: 120756 - DNA, 318 bp, Enterobacter cloacae
gtggatgtcatagcgccagcgaatgccgttgaggtgcgtcagacggttgtgcgtaaccttctcagcagatccttcgagcgggttaccggtagtatcccagcggtgcaaccaagagcactgaaaattaccggtaactatatcccggcgatgcaggcggccaagacggtcatattcgctgcgggttcgttagtgttagtagtttgcgccacggttgaatccgataatactgaactggacgatgccgaccgtgaagagtttatggaagagctgggtcaggaagggccaggcgcgaaagaaggaggcaagatgcgtgcataa

SEQ ID NO: 120757 - DNA, 1737 bp, Enterobacter cloacae
gtggctacgggcgatggtcttttcctgcggctcgaccgaaatctcggggagatcgctgagaatggcccaagtgcacaaaaaagcgcgcgggaagcgatagacgtcgtcgatgcgactacattacgaaaagggctggtgcagctcagtaatgcgaccgacagtaagtcggaggggctggcggccacaccaaaggcagttaaggatgcctatgatcttgcaaaagggaaatatactgcccagaacgccaccacggcacaaaaggggattgtccagctcagtagcgcaactgacagtgacagtgaattgctggcggctacgccgaaagctgtcaaagcagctaatgataatgctaatgggcgtgtaccctcaggacgtaagataaatggtcacgcactgacagaagataccagcgtaacttcgcaggatatcttcaacgaccaggctatcgggctttctaccgaggatttggatacgttaaaaacgccgggtatttattatcaaccactgaatgccaatgcctcagccgcgaggcactatccagaaaataacgccggaacgctgctggtttacaaaaatgcgggcgtgacacaagtttatctggtttacaacagttctcgtgcctacactcgcagccagtattctacgggcgcatggactgcctgggccaaacgatatgattccgccaataaaccgtcccctgctgatattggtgcggtgaataaaggtggcgatagcgtgaatggcgtactaaaggctggtgcagaagtccagagtaccattgcaaacaatttccgcattgcctatggtgactacggctcattctggcggaatgatggcagcaacctgtatctcatgctgaccaataagggagacgcttacggagcctacaacgcgcttcgaccattgcgtgtaagccttgaaacaggagcacttcaatctgaaacgccacttaccgtaggtaatacggtctatgcctctaaagagattacagcaggttatagcggagcgtttgcgtgggtagaacaatataaaacgaaagcaccattttttaattcatattcaacaaccggcgctagcgaataccacccggttatcaagcaacaggcgacaattgcgagtaaaaactcctggtctttttcgtttggttctctggtcgcgggaaccgaactttcatggcatctgcacatgaaaggcagtggcggatcagaggttaattttaaatgggacactaatggtaacttcaacgcgccgggccaggtgaatccgggcagctatgctaattttgataaccgttattacactaaatcacaatcagatgcggggtatatgccgagaacaggtgcatacaccaaagctgagagtgacgggcgttttcagcctaaaggcagctacacacctgcgggtcaggcttatacgaaggcggaaagcgattcgcggtataacctaaaaaataccgcaaccaaatcagccaatgccatgacgcataaagatgcttcaacaggtgttatggaagtggtaatgagtaatatatccgtaacaaactatacgaatgtgaatgttactttccctaccgcattccccaatgcatgtgttggcgtggtaataacctatgatggtgcgggccatggctccggtgatgactcttcaatagccgttccgtcgtatagccgaactgggtgtgtgctgcgggcgaataatgctaacggtaaatttatgcttattgcaaagggatattaa

SEQ ID NO: 120758 - DNA, 423 bp, Enterobacter cloacae
atgacagtctactttagcgccgctgaaaatgggtttttcgatgatgcgttcaaaactgattacatatcggctggtacctggccagctgacgcaatcgtgatttctgaacaatggcatcaatacttacttgaaggtcagagaaaggggaaggttattgttctgaacacctataaccaacccgtgcttgatgacccgccagcacccacgaaggaacaactggatgcagaagctgaggcacttaaggctacgcttatagctgctgcaagcgaaacaatctctatcctaaaagatgctgtagatttaggcagggccacaaaggaagaggaggcgcttctgttagcgtggcgggaatatcgaatatcgttaaaccgcatcgataccagcaatgcgccagatattgaatggccggtcaagcccacttaa

SEQ ID NO: 120759 - DNA, 756 bp, Enterobacter cloacae
atgaaaatttttattgtaaatcttaaaaagtcagtagaaagacggcagaaaatggaagctcagcttcaagctctgggcctagaagctgagtttatcgaagccgttgatggcagactaatgtctgaagaggagaggaaaagtgtcactgcgaaagtgaattatgcttttcttcctggggaaatcggttgtgcgttaagtcaccagaaaatctataagaaaatgattgacgagaatatagataatgcgctgattctcgaagatgatgttattttggatgaagaatttaaaaaggttatggcacaaatcagcatccctgccgatcgtccttctgttattttattaagccgttccaataagttttttaaaaaacctctaaaaaaattaacgagcaagcattctctgcataaaacattacatgcaaccactactcatagctatatagtaaataacagcgcggctcgttctctacttaaaggccttaatcctgtttggattgtggcagataaatggggactattcgaagatatgtcattagttgacgtatattctgtagtccctcacccagtacatctgtcggacgaggctaaaagctcaacgatcaatattcctgaagatgctcaggctatccacaagaaaaaaaaggaactatggaatctgcttatgtcccgcaggacattgaagacgaagattaagcataagtacagaagagccatccttccaattttcagtaaagtagtcaatcaagggaaaggttga

SEQ ID NO: 120760 - DNA, 840 bp, Enterobacter cloacae
atgtctattttctgtacggggaatcactggggaaaaatcggggaaaaataccgtcaaaaaatcaggcacaacaagctaattgccaccgatccgtttgtaagacttaccagcacgctactttttctcactgccttatactttcagtctgacatccaactggaagtttctatgtgtggacgctttgcacaagcccaaacccgtgaagaatatctggcatatctggccgatgaagcagatcgtgacatcgcgtatgacccggaacctattggccgattcaacgtcgcacccggtaccaaggtcctgctactgagcgaacgcgacgagcaattacacctcgatccggtgtgctggggttacgcaccggggtggtgggataaaccgccactgattaacgcgcgtgtcgagacggctgccaccagcagaatgtttaaaccgctttggcagcatggccgggctatatgttttgcggatgggtggttcgaatggaagaaggaaggcgaaaagaaacagccctatttcattcaccgcaccgacggccagccgatttttatggcagcgattggcagcacgccgtttgagcggggcgataatgcagaaggttttctcattgttacatcggcagcggataaaggtctggtcgacattcacgaccgccggccctttgttttgtcaccagaagcggcccgggagtggatgcgccaggatataggcgggaaagaagcagaagagataattgccgacggtgcagtacccgccgacaagtttatctggcacgccgttactcgcgctgtggggaatgtgaagaatcaggggccggaactaatcgagccgatttcgtga

SEQ ID NO: 120761 - DNA, 240 bp, Enterobacter cloacae
atgccacgcacagcagacatacatgccgcctttatcgcggcaatagagcttaacccaaagggttaccgctatctgagaacagacagcttcattcagaagttaaggggcttaaactggcattttacccgggccgatgcaaattcgtggatagagcgcaaccagccaggcttcgctgacaagacgaatgacggtagcgacaaccgttactggatcctgcgcaacatggggagaattcactga

SEQ ID NO: 120762 - DNA, 180 bp, Enterobacter cloacae
atggatagcaggaatgcaatagcaatgatagaagccgatgggtggtatctggtgagagtgaaaggcagtcatcaccagttcaaacacccaacgaaaaaggggctggtaacggtaaagcatccacagaaagacataccgttaccaacactgaaaagcattaaaaaacaggcggggctctaa

SEQ ID NO: 120763 - DNA, 939 bp, Enterobacter cloacae
gtgctccccgctggtcacggcaaccccttccggggcagagaacagcagggtttcgttcagcggcttcaggcgctgctcaaacatctgtatctggctgtccacgtcagctttcagcgcctgcgcctgctctgccgccacctccagctgctgaagctgtcgcaggcagacgtcgatttccctgagtgccgtgttcatgtccagcaccccgcctgcggccttctgctgcccgtccgcagtgacaaacagcccctttgccacgcgaatgacgccgtgttcatcggtccggagttcaaatcctttgccccggtgctgctcctgcgcgtccaccagatgcccgctgttgagctgcgtcttgccgtactccgtggcgagcctgacgtgctcctcaccgcgcttatcctccatccgcagcttgttgttcgccggagtgcgcagcacgttgcgggtgtggttgtcgcgggtcacggggtcggggtgttccgagtcgtgcagcgcatacgcgatgtacggcaggtcgatgtcgccgttgctgtacgcaatcgccacttcggtcccgtcggtcagtggcgtatgccagccgtacgtttctccggcatacggtttcgccatccgcagccacaggtatgcgaagccctgttgcgcatcgttccggtcaaagtccatcctgacgcggtagcgtccctggtcgtccaagtgggcgtagatatcgttcttttcccggctctcaatgcgggcgggcagggtaccgtggatttccgggcgcgaaacttccctcgggcggaaacagtaccgttcggtgtaaggcatgccccacaccgatacgtgcaggcgggaatcacgggcgccccggaaagtcaccagcgtgaggatggccccctctttcagggcatcaatgacatcgccctgcggctccagcacctgaccgggcgcgaggagtga

SEQ ID NO: 120764 - DNA, 480 bp, Enterobacter cloacae
atgcgttcgccaaaagatcggctgcatacaatttcctgctttaccggggcgaactcctccagatccagacatggctcgccgcgcagctcccggacggttcgctccagcacaacgttaaagtgttttcggataatccacgtactctgctctgaaaggtccagtgcggttttgatgcccatagcgttcagcttcttgctgatgcgccggccaactccccagacatcctccacaggaacaagcgccagtagcctgcgctgccggtcgacgtttgagaggtcaaccaccccaccagtctgccgttgccattttttcgcagcatggttagccagcttagccagcgtcttggtctgggctatgccgacgccgactgtgagatgtgtccgctgtaaaatagtcgcgcggatctctttcccgaactcagtcaggtcacggcaattccttacgccggtaaggtcgcaaaaggcttcgtctatgctgtaa

SEQ ID NO: 120765 - DNA, 822 bp, Enterobacter cloacae
gtgcatcacagctcaccgatttacgtgaagcgtaacattttgacgagcacctacatcccgcacccattgctgtcacgtcaggatttcagccgccttgtgctcgattatctggtgtttgccaacggctatcttgagaagcgcatgagcgtgaccggtcagctcatgaagctggaaacctctccggccaaatacacccgcaggggtgtcgaggaggatgtttactggtacgtgtcggacttcacgcacccgcaccagtttgcccccggctcagtctgtcatctgctcgagcccgacatcaatcaggagctctacgggatgccggaatacctgagcgcgcttaattcagcctggctgaatgaatccgccacgttgtttcgtcgtaagtattaccagaacggcgcgcacgcgggttacatcatgtacgtcaccgacgcggcacagagcagcaccgacgtcgaggcgctgcgctccgcgatgcgcgactcgaaagggctcgggaatttcaaaaacctgtttttctatgccccgaacgggaaaccggacggcatcaagattgtgccgctgagtgaagtcgccacgaaggatgattttttcaacatcaaaaaggtgagcgccgccgacctgctcgatgcgcatcgcgtaccgttccagcttatgggcggcaagcccgaaaatatcggctcaatgggcgatatcgagaaggtggcgcgggtatttgtacgtaacgagctgacgccattgcaggagcgtttcaaggaaatcaatgaatggctcggtttagaggtgatccgctttaaggattacaacatcgaaactgagtaa

SEQ ID NO: 120766 - DNA, 705 bp, Enterobacter cloacae; identical to SEQ ID NO: 8686

SEQ ID NO: 120767 - DNA, 402 bp, Enterobacter cloacae
gtggtaaatgttgatgtttatccttcatcagaatccggagtgtcgcgtaatctctttactgatatagaacgccaccgggataacagcgcagattttctgctttatcagcctgaagtttccttgcccctgtctccggccccggagcctgcctcgccagcaggcctgtcagacgaagaggggggcagctactgggaaacattactacagaagctggatattgcggacaaagccccgcctccccgacaactgaatgataatcgtaagttcgaataccggtttgaaatttacggtgcacctgggcaggacgaacggggtattgcggatgaggtaggtgccatgacgaaaagtaatccggcatttacgggtgacagcagcatgctggacggagggcaaatctggtga

SEQ ID NO: 120768 - DNA, 360 bp, Enterobacter cloacae
gtgcaggtatcgacggacattgccagctatctcagtttcgtaatggcgctgtttatggctttcggtgtctcttttgaggtccctgtcgccattgtgctgctatgctggatgggcattacaacacctgaagatttacgtaagaaacgaccttacgttgtggtgggagcattcgtcgtcgggatgttactgactccgccagatgtcttctcgcaaacgttgttggcgataccgatgtactgtctgtttgaagtgggcgttttcttctctcgtttctatgtcggtaagcgacgtacgcgagatgaggacaacgaggctgaagaagcaaaagaagccgaagccaccgagaaaacagaagagtaa

SEQ ID NO: 120769 - DNA, 276 bp, Enterobacter cloacae
ttgcagtataccggcaagcccgggcgaaccgtccggcttgaaggagaatcgcatgctttctttcgcaagggggtggatgctgttaacgatctcttcgacctcgcagaccagaataagcctcagcagctggtcagcggtgaaggagatgtcctgggctggtgggtggtaatcgacttctcagatacgaccagccgattcctgcctggcggtggccaccgaaacaaaaactggacgatgacgctgaaacattatgccgacgacatatcaaacccgtga

SEQ ID NO: 120770 - DNA, 276 bp, Enterobacter cloacae
ttgcagtataccggcaagcccgggcgaaccgtccggcttgaaggggaatcgcatgctttctttcgtaagggggtggatgctgttaacgatctcttcgacctggcagaccagaataagcctcaacagctggtcagcggtgaaggagatgtcctgggctggtgggtggtgatcgacttctcagatacgaccagccgattcctgcctggcggcggccaccgaaacaaaaactggacgatgacgctgaaacattatgccgatgacatatcaaacccgtga

SEQ ID NO: 120771 - DNA, 852 bp, Enterobacter cloacae
atgagtgaacgactgaccattaccccgctggggccatatattggcgcgcaggtgtcgggcctggacgtaacccgtccgctgagcgataaccagtttgagcagctgtaccacgcggtgctgcgtcatcaggtggtgttcctgcgcgaacaggccattaccccacagcagcagcgcgcgctggccctgcgttttggcgacctgcatatccacccggtctacccgcatgcggaaggggtggaggaaattatcgtgctggacacccataacgataacccgcccgataatgacaactggcacacggacgttacctttatcgacacaccgccagccggggcgattctggcagcaaaacagctgccggagacgggtggggatacgctgtgggccagcgggattgccgcgtttgaggcgctctccgcgccgctccagactctgctgagcggcctgcgggcggagcatgacttcaaaaaatcgttcccggagtacaagtaccgcaaaagcgaagaggagcaccagcgctggcaggaagctgtggcgaaacatcccccgctgctgcacccggtggtgcgtacccatccggtgacgggcaaacaggcgctgtttgtgaatgaagggttcaccacgcgcatcgtggacgtagcggaaaaagagagtgaggcgctgctcggcttcctgttcgcgcacatcaccaaaccggagtttcaggtgcgctggcgctggcaggagaacgatctggcgatctgggataaccgcgtcacgcagcattacgccaatgcggattacctgccgcagcgaaggattatgcagcgggcgacgatcctgggggataaaccgttttaccgtgcgccttga

SEQ ID NO: 120772 - DNA, 768 bp, Enterobacter cloacae
atgctgaacattacaaacctgtctgccgattacggcggcaaacccgccctggaagagatcaacctgacgctggacagcggtgaactgctggtggtgctggggccgtccggctgcgggaaaacgacgctgctgaacctgatcgccgggtttgtaccgtatcagcacggcacgatccagctggaaggaaaacgggtaacggggccgggcgcagagcgcggcgtggtcttccagaatgaaggattactcccgtggcgaaacgttcaggaaaacgttgcgtttggtctgcaactggccggtgtagcgcgtgaacagcgcctgagtacggcgcgcgatatgctgaaaaaggtcgggctggagggggctgaaaaacgctttatctggcagctttcaggcgggcagcgtcagcgcgtcgggatcgcccgcgcgctggcggctaacccacagctgctgttgctggacgaacctttcggggcgctggatgccttcacccgcgagcagatgcaaaccctgctgctgcgcctgtggcacgaaaccggcaagcaggtgctgttaatcacccacgatatcgaagaggccgtgtttatggcgacggagctggtgctgctctcaccggggccgggacgcgtgctggagcgcctgccgcttgagtttgcccgccgctatgtggcgggagagccggtacgcagcatcaaatccgatccgctgtttattgaacagcgtgaatacgtcttaagccgcgtgtttgagcaacgggaggcgttctcatga

SEQ ID NO: 120773 - DNA, 1401 bp, Enterobacter cloacae
atgcaaacagaacaacaaaacgggcagcttaagcgcaccatgaaaacccgtcacctgattatgctctcgctgggtggcgttattggcacagggttattcttcaataccggatacatcatttcgacaactggcgcggcgggcacgctgctggcgtatcttattggtgcgctggtggtctggctggttatgcaatgcctgggggaactttccgtggcgatgccggaaaccggcgcgttccacgtctacgccgctcgttatctcggcccggcgacagggtataccgtggcgtggctctactggctaacgtggacagtggcgctgggatcgagctttaccgcagccgggttctgtatgcagtactggttcccgcaggttcctgtctggacgtggtgcgtcgtcttttgtgtggtgatttttgctcttaacgtcatttccacgcgcttcttcgccgaaggggaattctggttctcgctggtgaaagtcatcaccatcatcgccttcattattctcggcggggcggcgatcttcggttttatcccgatgcaggacggttcaccggcgccgggcttaagcaaccttactgccgaaggctggttcccgcacggcggtctgccgatcctgatgaccatggtggcggtcaactttgccttctccggaacggagcttatcggcatcgcggcaggagaaacggaaaacccacacaaggttattccggttgctattcgcaccaccatcgcccggctcatcatcttctttattggcaccgtatttgtgctggcggcgctgatcccgatgcagcaggctggcgtggagaaaagcccgttcgtgctggtgtttgaaaaggtcggcattccgtatgcggcggatatctttaacttcgtgatcctgacggcgatcctctcggcggcgaactcgggtctgtacgcctctggccgtatgctgtggtctctgtctaacgagaaaacgctgccgcgctgctttgcccgcgtcaacaaaaacggcgtgccgctgacggcgctctccgtttccatgctgggtggcgtgctggcgctgttctccagcgtggtcgcgccggatacggtgtttgtggccctgtcagccatttccggttttgcggtggtggcggtgtggatcagcatctgcgcgtcacacttcgtgtttcgtcgccgtcacgtgcagtccgggcagccactttcggcgttgcagtatcgcgcgccatggtatccgctggtgcccgtgcttggctttatcctctgtctggtggcctgcgtcggcctgtggtttgaccccagccagcgtattgccctttattgcgggcttccgtttgtcgccctgtgttatggtgcgtactacctgacccgaaacatgaccacgcaggagcctgaacatgtcgcagaataa

SEQ ID NO: 120774 - DNA, 1110 bp, Enterobacter cloacae
atgcgatttaacggactgaccaaaggtttctttattctcatcctggcccttgttacctgggctttctttgacgtgctgtctccctatttctcggcgattctgtgggccgctatcctgaccatcattttcaacccggtgaaaaacaaactgcgtaccgcgctgggcgatcgcaacgggctggcttccctccttacactcggcattatctgcctgatcgtgtttattccgttgatggtgatcctttcctcgctcgcggtggaactgaacatggtttacaccaagctgcaacagaacaacacgcagttcccggaagtcatcgccggtatcttcaatcgcctgccggactgggccagcggcttcctggcggatcacaacctgaccaacgccgcgcagattcagaaaaagctttccgatgtcgcgttacagggtggacagtatctggcgggaagcgcgttcctgattggtaaagggacgttcggctttgctattagcttcggtattatgctgtacctgctgtttttcctgctcaaagacgggccctatctggtgcgccagatcctcgactcgctgccgctgtctgacttcgccaaacagcacctgttcgctaagtttgtcggcgtctcgcgagccactgtaaaaggtacggcggtcgtggcagtggttcagggtacgcttggcggtatcgcctttgccatcgtcggtattgacggtagcgtactttggggagcgctgatggcgttcctctccctggtgcccgccgtcggctcggctatcgtctgggttcccgccgcgatcttcctgtttgccactcaccagctttggcagggtctgttcattgtgggcttttttgtcattatcgtcgggctggtggacaaccttttacgtccgctgctggtgggcaaagacaccaaaatgccggactacctgatactgatcaccacactcggcggtatggagctgtacggcattaatggttttgtgattgggccgctgattgccgccctgtttatcgcctgctggaacctcttctccggccgcgaccacgcaggcaacgccgaggagctggacgcagactttatcgaagagggaaaaaaccctccggatctctaa

SEQ ID NO: 120775 - DNA, 1785 bp, Enterobacter cloacae
gtgcgaatcgccacgatcacaaactgggcctatggtgtcacggtgtgcctgaccattgcctccggtatcgtcatgctgatggcttcccatgccgacaacgtagagcgtcaggctgttaagcaacgacaaatttttgaccagcttacggaagagattgaagcagaaacctggatgctctccgatttagcgcgcctttacgccatcaaaaaagagcccgatgtgctgaaagcgtaccaggcgaaagaaggtgaactgaagaatattgaacacaaagtgggacagttaaaagatacgggcgcaacgggcgaagagctggcgctgctgtatgaagggctgaagattgttgatggcctacaggatgaacagcaggcagcaattgccagcgtcgcccggggtgaggaacaacaggccattgcgttactcttcggcaaaatctacgaacttgaaacggaacgcgcccagagcaagattgaccattttcgtatgctgctggataagcgcattattgccgatgtccaggcggcgaccaacacgtcgaaaacgctgcgtaccgcctcagaggtgatggtcggcctgaccgccctgctcttcttattcgtgatgggctttattctcaagcaccgcgtgctgcgcccggtggtgcgcctcagcgatgtggttcaccgcctggcctcacaggattacgccgtcgaaacgcccaatttcaaccaggtcgatgagataggcgatatggcgcaggccattcgcattttccgcgagaacgggctggcaaggcagcggcttgaaaaagaacgcgacgcagactgggccatccgcgagctgctcgcacgaatgacccagcgcttgcaggggtgcgagaacgtcagcgacgtgattgaggtggcagagctgtttgctcccaacattgcgccgggtatcgccggacgtctgtatatcatggatcgaaacccgtgggagatgcgctgtgcggcggaatggttatctccacatggagaaaaaaatgctttccaccccgatcaatgctgggccatacgccgtggtcagagccacccactggtcaacggcgagccggatatcggttgccagcatctgcctgaatcacaaaaagacagctcactgtgcgtgccgctcattgcgcagggggaagccattggtttgctgtcgtttcagaacatcacgcctgaaacagcgccgtcccgcgcatatctcgaattaatggcggaagccctgggtctggcgctggccaaccagcgtctgcgcgatgccctgctggaaaaagcgctattcgacccgctcaccggcttgcgtaaccgccaccacctggaagataccctgcgcactcagatagctcaggcaatgcgcaatgatgagccggtgagctgcatgatgatcgacatcgatcactttaaaagcattaacgatcgcttcggccatgaggctggcgatcatgtgataaagagcgtggcgacaattgttcagcgtgccgtgcacgatgccggcctggccttccgctttggtggcgaagagtttctggtgctgctaacgggtgcggatgaggaagcggctcacgcctgcgcaactgagatttataacggcgtccatacgctgtcgctgcgctatgggcttgctgagattggcccagtggatgtgtcgatcgggatcgccagttacccgcagcacgcccaaagcgacgacctgctgcgcgcggcagacgtggcgctttaccgggcgaaagagctggggcgctcgcggatcgtcagtttcagtatgctggagacgggttaa

SEQ ID NO: 120776 - DNA, 1026 bp, Enterobacter cloacae
atgatcaagtactgctgtgcgagctgttttggggataatggtttaaagaaaaatatcataccttcactttcccctgattttagcgattgttcgtattgtggtaccaaaggtattgagattattgagcctcatgctttatttgatcattttagttcattgataaacatctacgaaaatcatccggatggtaagagtttagttgcacatttgaaagaggattggaagctattttcacatcctcttttagatgaggctcatgccaaagagttattaggtgatattcttgatgatgggaatattgttagaaaaaccttcgtactttctgatgattataagagtgaatctctcgcattatgggatcatctttgtcaggaactcatgtatgaaaatagatattttctgaataaatcacttgatacagataggcttggcgagttattaagtttccttgctttagatgatttttctaaaacttggtatcgagcccgcatttatgcagacgatgcggcttttacgatagacaaaatgggggctccccccaagagattagttagtcatgggagagcgaatcctactggtataccgtatttatatcttggatctaaaccagatacagctttgtctgaaattcgacctcatacaggtgacagagcttgtgtcgcagattttactctaaaagataacttgactctaatagacctaagaaaccctcgtgaaaccgtttcaccgtttttattaaccgatccaggtgaaatgggtaaaatgcttgcagatataccttttcttgaacgacttggttatgaactaacaagacctgtattacctaaaagtgcagcccttgattatattccaagtcaatatatatgcgaatttattaagaaaactggctttcatggagtactttatagtagttctgtaagtgaaggaatcaatcttgctctttttgatccgttaaatgcgactggaggcaatgtaagtatttatgatatagataaagtcgaagttagcgtaagcaaacaagattaa

SEQ ID NO: 120777 - DNA, 933 bp, Enterobacter cloacae
atgtattatccttattttcgtgggaaacaatttgaactgttggctattagagacactgctaatgtaatggctgaggcaggttttactccaattatagagcctgtgagagaggctctcaatggtcttgagcgaacactgaaaacaataaaaaaaaatgatggtagggctattgtcatcattaatccggcatgtggtgatcactctaccgatggacaaagtatagctcaattattaaaaaatgaatttagtaagtatgaaaaaatttctgtaggaatacttcttgataagagtatgactattgctaaggttgataacctccttcattcagatctcgttcatgaagtcacctttatccatgccgggtttgatgagccaaaagcattacatgaaagatttggggatggatacaaacatgtatttatttctaactattgttctaaagcttatcgaaaacatttttcgggttcagaaagaattttaattaaagatggctttgaaaaaagacgaaatgctgaccatcccgattctgagttcttttcagatcttcatcttaattatgaagaagagggtatgaatggttttggtgatttcttaattgttggtgatgaatttagtgagtccggtggccctgcgtatgcggttgctattcatcttacttacattaatacgaagcatgaagatgaaatgtacatctatcattttgtttcgacaacacgtgatacaccgacagacccagcaggtaagttcgcacagtcccttgataaattaatggctgctttaaattcaggcaaatccatgttgcttgaaacgtcggctatcaaagagtttaggcgattacataatccgagtcactttcctggtttagggacagttaaaaaattgtctatgattcaccatatagaaaccctagccgatttcatggatggtaaataa

SEQ ID NO: 120778 - DNA, 801 bp, Enterobacter cloacae
atgtttgctcgctctctccgagagaccgagctttttgaccatgccgatacacatgggattaccgttggtgaagccttcaatgaggcatttgccttactcagacaaacaggcttgcggaatgagtatgtttatcgttctgcactcacacacaatcttttacttggcaagcattcattaagaactgcctgtatgcttaacgaattcaggatcggctcttgcaaggctgatctcatcattctgaacggaactggaacggtttacgaaataaaatccgaaagagattccttaagccgtctacaaaaccaattaacaaactaccgtaaagcatttgggaaaatctatgtaatagcaggttcagagcatatagatgatgtgctgaaaacaactgaatctaccattggggtattgagtttaacccgatggaatcgaatctctactataagagaagctgaagaagttttagactttatatgccctgtaacaatctttgaatcattaagaattaatgaggcgaaaattattgcttccgagttaggtataagaattcccaacttaccgaatactcaaatgcatggtttcttaaaagaagagtttagtggcctaccacctgtttctgtatataatttaatgctaaaaactttaaaggaaagcagaagtttactttctttaagagagttgattctcaacttaccaaagtctttacaaccagcagcactttctattcagcttcgctctaaggatcatgagcgattaattaatactatgcagcttcctcttaatgaggcattgttatgggagtaa

SEQ ID NO: 120779 - DNA, 1503 bp, Enterobacter cloacae
atggaaattcaagaatttattgcaaactatcgaaatcatccagttctcttcattggaactgggtttagcttgcggtacctttcaaactcctttgattggaatggattactttcacatatttgtttcgaactcactgatgataaagaaacatatctggatattaaatcaaaatgtcaaatcaatggcgagtataagtatgataaaattgccagtgaaatagaaaaaatattcaatacaactttatctaaagatagaaatggaaaattcaaagagataaatgatattttttatagcgaaatggataaaggaataaatttaagcaggttcaagatatacattacacatttattatccaatgtgatcattaaagaggataaaaatgatgaaatagctgaacttattaaaatgagaaaaaacatcggttcgattattacaactaactatgatactttgattgagcaattttttgaatttgagcctttgatcggcaatagtatattgctaagtaatccttatggctctgtttataaaatacatggctgtgtatcagccccttctgaactaacgattacagaagaagactataactattttgatagcaaatatgaattaataagagcacagttgctttcattattcatacacaacccagtaatttttataggttatagtattagtgatagaaatattcaacaaattttaaaaaccatattttcttatgttcccacaaattccgttttagccaacaagattcgcaataattttttattagttgaatatgaaccagattcaaactctactaccatatcagagcatgatatatacattggatcaggaacaactatacggataaacaaaataaagacagacaactacatatccattttctcaagtttatctaatcttatccttccagtttcagcgatggatataagaaaagttcagaaggtttggaatgagattaaaagtggtggagacatagaggtaaaaattactgaagatttagatcagttaaaaaatgggcaaatggttttagctgttggctcacataaaagggtcaagtatgaatttcaaacgaaacctgaaatgatgcaagattatttcaagattgtcgaagaagctaacaaacagttaattatactattgaacaaacagaaaatacaaagttctcaattcttcccaatttttgcttttagtgaaatttgcccggaattagaaaatgtcgagatctataaagaacaacagaggagaaaacttggagatcattttgaaaggacctccgctaataattgtagcaataatcacaacaccattgcagaaataatttcaaatcatacaatttctttatcaaagaaagatgattgtatttttcatagttactatgaaaacaggttaacatctgatgaagtcaaatcatttttgttagaatgtgcagataaaaatagcacatcctataggcggttactttgtctatatgattacaagaactaccaacatttatag

SEQ ID NO: 120780 - DNA, 216 bp, Enterobacter cloacae
atggaaaaaattttttatagtaaagttttcaaaatggctatttatattgcatcttttgtatatatactcatagttactttttgtatcttgcttttaaatactgcttctctttctgagttcaatatgaacatgctgcgttgtttcacgacagcatgtatttttcaattgccaatgatagtctatctattatatcggatatttaaacttagtagatag

SEQ ID NO: 120781 - DNA, 1347 bp, Enterobacter cloacae
atgaattgggatttaggtcagttagaatgtgatttttgcaaggatgtttttaattgcagcatagggttatcaaacaaaaacacaccacaagtgttcggcttttgctgcccgcactgtagtggtgttctctcaattgagattgatccaatacggtctacaaatcgaatattgaaaaatgtcactgcagtcgggcgaaaaaataaagatatatttaatgtaaaatcaattaggttacatttggatttcccagcattactaactaatggctggtctcctttaactcctttcaatattgcatgtcttggattaaaagaaggttataacattgaacatttcaaggttgtaaccagtgaacttaacttctacagtgaacatattttagtacttcagagccttttcaatttctataaaaacagcaagattaaggagttgtatcatacttcaaggacattattgcgtgaagatttcgatattgtaatcggtgtggattcaaactacattgatagtatttctgttattgattatataacttcaagagatgttgatattatattttacaaaacactattcggtatatcaattgccttaaataaaggtatgaaacctgaccatgatataaaagaactatcatcctatttatcaggtttaaaaaaagagaaactatgtgagtttcattcatacttatctaataataggcatttaaaagactccataaaaacaacaaacaagatctactccaatatatattccaatgaggaattttttaggccatccattttcctttcggattatagtagtactaattataagaaaggaaaatcgccactacgtttagttagtgaaaaggttgaggttattcttaatatatacaaagacttgaccgaagttatatcaaaacaatatattcttattgtcggattaagaaacattgaagaaagtgataattatgacactttcaaaatgaattatgtgaggacacggaaagggaaggtattcataaataacattgccgaattctcagagcttgatcttggaatgaaggcacgcttcatgaagggaagctactttgagaaggacctgaagatcatctctaataagattagaaattctatcgcacataataactgggagtataatgaattaagtcaagaagttttatttagatttaacaaaggaattaatgatgcacctaatgaaaaagacttcgaatgcaaaacaattcttgaaataaatagtgaaataatcactttatttaggttgatgcataaattaaatattatttactacctatttggttgtttttatggacgcaatgattgggataaaggagaattagacaatatatga

SEQ ID NO: 120782 - DNA, 438 bp, Enterobacter cloacae
atggaaaaaaaattaccgatatttcacattggaacaagtactacgcctgtaatagaaaaatcttcagttactaccttgataccacaaatgctgagaactcactgcgttagtgttcggcttaatgacacagaacttcacctgctcaacactaaacgcggttctacacccaaaggcgaatggttacgtatggcctcgttacagaagctccccactattgtgccaccgatcaacctaagtacatggaagactttgggcgagattaatcagaagttaaatcgcattgctctacatattgataacaagaacaaagacagcaggcttactcacactgaactatttgctgttagcagattaattaaagagcttcgccaaaacctgttaaatacagagatctggagcaaacctgatgaagggtatgcagaagatcaaaaggggtaa

SEQ ID NO: 120783 - DNA, 1251 bp, Enterobacter cloacae
atgaagggtatgcagaagatcaaaaggggtaagagcttcgctggtgtggcccagtatgcattgaaaccgggagcacatcataaatgcgatccagtcgtaatcgggggcaatatgctgggcgactctgctcttgaactggtcgctgagtttgatcgcagcaaacagcttcgaccagatgtccagaaacctgtttggcacaattcacttcgattaccccaaggagaatctcttaccaaccaacaatggaaacgaattgctgacgattacatgaagcgaatggggttcggtgatacacacctccgttgctatgttcttcatgatgatcaggctggtcagcacatacacattatcgccagcagaatcgacatagccggtgggaagctctacttgggtaggaacgaaaaccttataagcacacggatcattagtgaactcgaaatggctcacggtctgacagtgaccaagacagcaccatccctctcaaatacacaaccgaagcggaaaagaatctctcgcaacgaacagatgctatcagaacggactgggcttccctgcaccaagaaatcccttcagcagatacttgataaaagtttggcagatacacctgatcttttaacttttatcaagaggctggaagaagccgaagtcggctggacagcgaatgtcgcgtctaccgggaaaatgaacgggttctcattctcataccgcgatatagctttcaaagcttcgcaattgggtaagggctactcttgggcaaatcttagtaacaggctcaactacaacccaggcgatctagaagctctgcgatccagcacaccggcaaaagaccaccctgttcctgttcctgctcctgctcctgctactgctactgctactgctactgctactgctactgctactgctactgctactgctactgctactgctactgctactgctactgctactgctactgctactgcaacagtgttgaaaaccactgagagaaaggaaagtatcgttgaaaaaattgcagaactggaattacgactcagagaagacaaacgaaacgaaatcaaagaaaagattcttcaaaaaaatgcagttcaaaggcaaaaacactccaggcttagtggctggattccatttttaagaaggttcatagagcttctcagaagctatggtaagagcattcttcatgagactcctacaaacttctcagaagtctattcaacacatcatctaaaacctgcaagaaaaattcgtttatag

SEQ ID NO: 120784 - DNA, 1875 bp, Enterobacter cloacae
atgaataatattattttatttaaatctaaaaaacaaattacggcagaaaacaattataatgaattcataaatttttgccgctatcaactatcagggctcacccaaactcaggattgggaacaatatgtctggaaagggtatgtaacctttagaaagataggggttggacataaagcatttaactccaaagatgcaatgcatgaagattttctcgattttgcaaaatcatatatcagatatcaacactcattgaagcccttgaaaaattacggggcaacaatgatggctttgagatgtctcgaacaggctcttttgcaagttctgaacagtggtctcatttataatgttacagccgttgtttttgatgaggcaatgcaaatcggaagtaaatattttgaaggtaatgttctcgctcaatgtgggatacagcttgaaaaattatcaaagtttctatgtgaacataaccttgtgaaatcaggatacatatcctggaaaaaccatgtgaagcagaaggtcaaaaataactatctccctgagattgaggactatcacagaaacgataagttaccagatgaagcagcattacttgctattgcagatattttttctaaaaatgatgagctactgagtccaagggataaattcaccagtgcagtatttgcacttctgctttgttgtccgagcagaatttctgagattttagccttacctgctgattgtgagattacacaaaaagatgagaagggtatcgaaagatatggtctgagattctattcggttaaggggtatggccctaatatcaagtggattccacaggttatgataccagttgcgaagaaagcgattagaagattgctttccttatcacaaaatgcaagggcgtttgctcaatggtgcgaaaaatatcctgataaattttaccaacatgaactttgcccaaaagttgatgaaaaatcaaagttgacagttatacaggtttgtcatgcacttggctaccctttacatgatcacaaatcttgcgttctaaaaattaaaaagacaagtttggatggtgggaaaagtttcttaaaccccaatgattataactattcattgagtgagttatgggaaatgattacctctggttttagtaaagactttccttggtatgatgaagaaaaatccataagatttagcaatgcattatgtttattaaatcctcgccaatttactttatcccaaatgattgatatctactcatttcataagccaactaaaggattcttttttaatgatatacaaaataaaaaacgtcatgagcatggatttaaaaatattttcgcccgacacgggtattatgatattgaaggccaaccactacttattcgctcacaccaaccaagacatcttttaaacacaatagcccattatggtgaaatgtctgaactggatatagctaaatggtctggtcgtgtcaatgtgaatcagaacagggtttataatcacgtgtcagaagaagatatgttagataaaatcaaaactattaaattgagcatgaaaaattattgtcaaaggaagttcatacccacaaatgaattgacagttgattttgataacctgaatcaaggagcaattcacgtaacagaatttggctactgtgtgcataactatttagttcgtccttgtactaaaatcaatgaatttatagaatatgataatgaaaccctggaaatgaaatcaatagatcgaattagacttgaatctatccgagaaaaagtaacaaaactaaagagtataacgcagaccgcttatgaaaatggtgattatggtgcagacaagtggctgcaacaccatgaaaaaaatttggaaagaattaataagcttttgaataattaa

SEQ ID NO: 120785 - DNA, 1311 bp, Enterobacter cloacae
atgaataatttaattaaacaaaactcagataaaatgtcaattcatgaacaaaaaatcgtcacttcgattgagaaccatggaatcaatattagagacttgatatgtgttatgaacaaaagtttggtttgtggatttgtgaatacattacagtattatctttgtagtaaaagccatttgtatgtaaaaacaatagttaaaaacatgagggattttattaacaatgcttctcctgattacattgatgataaagtaataatccaatatcaaaatatgcaatcagcaaataagtcatcatattttcgaggtttacggccattttttactaaatggtttgaattaggataccccggaatagatgaaagtgctgttgaaatagtaaaatattttgacctaaaaattaaaaaagctggtcaacctatattacaagatgatccaactgtggggccactgactaaagaagaacacacttccttgaacaaggctatgagctatgcatatagcataggtgaactgtcactgtcagattatgcaatatcactattaataagtcttaccggtagacgacctcagcagttagttatgttgaaatataaagaccttcttcaaaagaagttagataatggtaaagtagaatatttaatttcagtaccacgagttaaacaaaggggcaaacaactacaatatcgagaactgccaataatctcagaagttgcatcaattgttcaacttcaagctaatcattccgtgaggcttgttgagcaaacccttggcaaaacccttgatgatcatgccaaaggcaaggttccagttttcttgaacgaggaaaaactacttgatttagtcataatagattctaacttcctagagtctaataaaatatatgcaaaaccaacaattgctaatttagcactaaagaatattgttaataatgggaatataatttcaaatcgtacaggttctctactcaatgttactcctcgcaggcttcgctatacgatagcaactatgctggctagggagggacataatgccaatactatagctgaattgttagaccattcttccacttcaagtacgggaatttatattaaaaatcttgctgagagtgttgaaagaatagatttttctgtttcagaacaattgtcatttatcgctgatgcctttatgaatggaataaagtctaaagagaaaatacatttaaaattttgttcttcgagaaaatgtcaaagtcagaatttaaatgtaaattttccttgtgatgaatgtgctttctttatgccagttgatattgatgaggtaaatccccgatga

SEQ ID NO: 120786 - DNA, 1203 bp, Enterobacter cloacae
atgagcagtatttgtgtagattcgtttatgttggaaaatggggagaggtattgtcatgttgtaaataaaaaaactggtgagccattgtattatccaaatttgtatataacaacacaagtcagaaatcggtcagagtctatatcaacaatgaaagttattgccggtagcatttcattgttatatcgattctttatgaggaaagagatcaatattgatgaaagaattcagaaaaggatatttctggctcctcatgaaattgatgatttgattgagtttacttcattcaattttaaaagtggtgtagatagtgatttttgcgtttcaaatgtcaaaaaaccaactaagtattttcggattacaacaatagctaactatctggaatggctatgtaaaatacttctttctcatacaggtcagaaagatacaatcaaagagatacttgttttcattaacaacataaaaagaaagaaaccaagaaacaatgacaaatatgttatggatatcgaaaagagcttagacaaagctcaactggattctttgtttagcattctttcgccaggaagtaacttgaatccgtttacggaaatagtacaaaaaagaaataacctaatattcctattattacattgctttggcatgagagccggtgaacttttgaatctgcgaattggtgacatagattttgcagaatcaacaatagcaataaggaggagagcaaatgataaaacagattcacgagtttatcagccattagtgaagacttgtgaaaggaagttaattgctgatgcgaaccttatatatgaaatttcagattatatcttgaatgatcgtaggaaagttaaaaatgctaataagcatgactttctgtttattacctataaggaagggaagactcaagggcaaccgctgtcattttcttcataccataagatagtgagtgttgttcgtcaatcatcctcgcttctaagtggattaacaggccataaattacgacacacgtggaattatgagttctcgaaaacaatagataaggctaaggacatatccgacgaaaaagagcaacaaatccgctcttatctaatgggatggctaccaggttcagacacttcaataatctataatcgcaggcatatttttgagctatcgaaaaaaactgcacttgagcagcaagagcaactattcaaaggaggatttgatgaataa

SEQ ID NO: 120787 - DNA, 315 bp, Enterobacter cloacae
atggatatcgaagaatttgtgagtgaagaaaaccatatgtgtaatttaggcgaagatcttttttacaagatcttcgagttggggtcaatctatgatttacctgataatgaatttaacagaaagattatttactggttaagccagtatttagtagggaatctgagagaaccgctagatgcgatctctgagcttaatatgttcaatcagttttacgtttatgagacatggttctcgctaattaaatgtcctattgagatgaaaagtctttcaaagcgaataatccaataccacattggactgagaactcttttgtaa

SEQ ID NO: 120788 - DNA, 1539 bp, Enterobacter cloacae
atgtctcgtactgcaaaaaaaattactattccggttagtatcggctacggactaacggatattatgggcggcggtgcctttaccgttatcggcgcctggttattattcttctatacgacatttgttgggttgtcaccggttgaagcggcgtctattgttgctatagcgcgcattgtcgatgctatcgttagtttgtttatgggaagtttcactgaccatttttacaaaaactattttggtaaaaaatttggtcgccgacgtttctttttgctgatcggtgcaccgttgatgctggtctatgcattgctgtggcttgatggcatgacatacggtttttatctcgccgtctatctagcatttgaaattattgctgcaatggtactgatcccgtgggaaacgttaccgtcagaaatgacaaaagactttaaccagcggaccaaactctctacctgtcgcatgtttctttcagcgtccgggacgtttctggcgacatttattcccggattactgatcggctatttcggggaaaacagcgcccatgcctacctcataaacggcgttatttttgctgtactgtttatggtatgtgtattcatctcgtggaaagtgacctgggaacgcgagttgacgccggaaatgctctccgggttggaaaaaaacacacgcccacaaacagcaggagagaagctggctgcctttggacgactttttaaggagtatggttccaccctgaaaatccgggccttcaggaaacatctcgccatctatctgctgtcgtttaccggcaaagatgtctacaacacggtatttgtatttttctgcgtctactgtctgaatgtctcttcctcactggcaggcacgctgctgtcgatgagtattgtggggctgcccgtcacgttaattgcgggtatagggatcatcagatatgggccatcaaagctatatgtatttgcctattcactgatgttgctctgtttggggggcttctttgccgtgtaccagatccctgcgttgaataccgtcgcgacgctggtcattctggccggggtgtatcaggtggggcgctgcgtccttgagtttacaccgtggaacgtgttcccgttcattccagatatcgatgaaatggtcagccgtcagcgtcgtgagggactgtttgccgcggtaatgacattctcccgaaaaaccacggtcgctattgccacctttattgtgggtctcctgttacaaagcggcggatttgtaaaagggagccagacgcagccaaccgaagccatccacaccatcgcaatgctgatgttcatcggcactgctgccttgcttatcctggccctgtggcaggctctgacatttaacctgaacaagcgtacgcacaaaatctttgtggatgagctggatcgcctgaaagccaacggctctccccaacgcgtatccgccgaagctcgccgggtcgtggaagatttaacaggctattcctacgacaggttgtggcgtgagccgacggtccggtccggcgagcagacggtgcgcacccctgtatga

SEQ ID NO: 120789 - DNA, 906 bp, Enterobacter cloacae
ttgcgtgatgacgcgacgttcaacgttaaggtattaccgacctttcgtccggacgatgtttttgcgcaaaacgaggaacagtttgccgactttatcgatcgattaggtgagacgacaggatctaaaatccagacattcagcgattttgttaagggaatgagccagcgtattgcctggttccacgaaatcgggtgccgaatttccgatcacggacccgtggagatccattttcagtcagcagatgaaagtcaggttgaatccgtgtttgcccgaaagcgccggggtgaaaatctggacgcccgtaataatgcgattcttgacagtgccatttttattatgctggcgcataattacaggcagcataactgggcaatgcagatacacttcggtgcgattcgcaataataattcccgcatgtaccgttctttgggtagtaatactggttttgactcgctgaccgatcagtcgaatcttgcggccaatctcaaccaactcctggatgcaatggcgcaggctgaagctttgcccaaaaccattctatataacctcaacgccagctataacgatattgtcgcgacgactatcgctaattttcagactgcggaattgggcgttaaatcgccgatacagtttggctccggatggtggtttaacgacactcaacgcggaatggaaaaccagctacatagccttgcggatcaggggctattaatgaattttgtcggtatgttaaccgattcccgtagtctggtttcgtatactcgccacgattatttccgtcgtattttgtgcaatatcattggtggctgggtggagcgtggtgaagttccggataataacaccatcctaacgaagatggttaaaaatatttgccatgataatgctgaaaactatttcagattctaa

SEQ ID NO: 120790 - DNA, 969 bp, Enterobacter cloacae
ttgaaggatcagatcacgcatcttcccgacaacgcagaccgttccgtggcaaagcaaaagttcaaaatcaccaactggcccacctacaataaagccctcatcaaccgtggctccataactttctggctggatgatgaagctattcaggcctggtatgagtcggcaacgccttcatcacggggaagacctcagcgctattctgatctcgccatcaccaccgttctggtcattaaacgcgtgttcaggttgaccctgcgggctgcacagggttttattgattccatttttacactgatgaatgttccgttgcgctgcccggattacaccagtgtcagcaagcgcgcaaagtcggttaatgtcagtttcaaaacgcccacccggggtgaaatcgcgcatctggtgattgattccaccgggctgaaggtctttggtgaaggcgaatggaaagtcaaaaaacatggccaggaacgccgccgtatctggcgaaagttgcatctggcagttgacagcaacacacatgaaatcatctgtgcagacctgtcgctgaacaatgtgacggactcagaagccttcccgggtcttatccggcagactcacagaaaaatcagggcagcatcggcagacggcgcttacgacacccggctctgtcacgatgaactgcggcgtaagaaaatcagcgcgcttatcccgccccgaaaaggcgcgggttactggcccggtgaatatgcagaccgtaaccgtgctgttgcgaatcagcggctgaccgggagtaatgcgcggtggaaatggacaacagattataaccgtcgctcgatagcggaaacggcgatgtaccgggtaaaacagctgttcggaggttcactgacactgcgtgactacgatggtcaggttgcagaggctatggccctggtacgagcgctgaacaaaatgacgaaagcaggtatgcctgaaagcgtgcgtattgcctga

SEQ ID NO: 120791 - DNA, 246 bp, Enterobacter cloacae
atgagcgaaatcattcaaatcgtgcccagcgagtgggtgacagaagacctgcttgtgaaaatgacagggcttcgcccgggaacgatagcgcgggcccgcaagaaaagttggctgtgtggaagggagtacgtccacatgtcgcctgacagcatcccaaaggaaaacagcgagtgcttgtataaccacaaagccatcgatcagtgggttgaaagcctcaaaaagaaacagccgggtgcgcgccaatga

SEQ ID NO: 120792 - DNA, 201 bp, Enterobacter cloacae
atggctgcttttaatgttggcgcattagtccagaagaaggccggcggtattaatggcgtagtggatagccttcaggacccggacggcgaccatccgcagttctgggtgcggtgggacgaccgaaattattcagtgcatccggaaaacgaattacgcgcggccacgccagacggtccgcagttttataaaacgatgtcatag

SEQ ID NO: 120793 - DNA, 198 bp, Enterobacter cloacae
atgaaactgacacaacagcagtgcaccatcctaactggctacactggggtattgatcgggagtttttcagattttcagcaggatgctgagaaacgtctgggcagaactttgcttacccatgaaatggcctctgccgaggttatgtctgaattgaaagaactttataaaaaagatttcctcgctttaatgcccgaatag

SEQ ID NO: 120794 - DNA, 327 bp, Enterobacter cloacae
gtgaaattttacgaatcgaagaaatcgcagttcaccagaaacctgatccggcggcgccacgctgaatggtcagaaaagaccttcggcaacgtcggccccgtcgggccgctgaagcatctgtcgaaagaggcgctggaagctgctgccgatcccggcgacctcagcgaatgggctgatatgcagttcctgctgtgggacgcacagcggcgcgccggtatcaccgatgagcaaatcaccgcggcgcttgaagaaaagctgaaggtgaatatggctcgccagtggccggagccgaaagacggcgagccgcgccttcacatcaaaccatga

SEQ ID NO: 120795 - DNA, 396 bp, Enterobacter cloacae
gtggattacagcaagttgactgacaaagatattaataagcttgtggcattcgcattaggctgcaaagaagtcgttcctgatattttcatgagcgatgagcgccgatatgaattcgagaagccaaagaataaatcaggtaacaaattcttcttcgacccgtgcaacaacgtagctgacgcatggccgatcattgttggtcacaagctaagcctgatcaatgcggacaacgagtggctttgcgttcctgatgataccgcggttgatgggaccactggcgacgatgttcagatgatttattccggcgatgggcatgttcacgccaacccacttagagcagcgatggtcgtattccttactctacaggattcagccaatgttcaggataatccagcctaa

SEQ ID NO: 120796 - DNA, 219 bp, Enterobacter cloacae
atgacgccagaaacagacaacgccatccgcgccgcctgccgccgctgcaccgaggaaatccagcaggccatgcgcaagaagccaaagcctaactggaacgaaacggtgcctcccatcatcaacaagcatcacaagaaaattgaagctctgggagttagcctcctggagttcgtcgtatacacagggcggcttaatcgccgcttcggagttgattcatga

SEQ ID NO: 120797 - DNA, 660 bp, Enterobacter cloacae
atgacaggaaaatactctcttatctacgctgatccgccctggtcttacggaaacaccatcagtaacggggccgctgccgaccactactccaccatgaagttaatcgacatcaagcgccttccggtatgggaacttgctgccgaaaacgcggtgctggcgatgtggtacaccggcacgcacaaccaggaggctatcgaacttgccgaggcctgggggtttaacgttcgcacgatgaagggctttacctgggtgaaactgaaccagaacgcggaactacgcatcaacaaggcgctggccgaggatgaagtcaccgacttttacgacttcctcgatctgcttaacgccgagacgcgcatgaacggtggcaatcacacccgggccaatacagaagacctattgattgccacccgcggtgccgggctggaacgtaagcacgccgggattaagcaggttgtctacagcccgctcggagcgcacagcgaaaagccgtgggaagtacggcaccggctggagctgctttacggtgatgtgccacgcattgaactgtttagccgcagcgcggcgccgggctgggatcactggggaaatcagtgcgccaccgccgcggtggaactgctgcccggatgcgccatcgacgttgtgaaaacggaggccgcatga

SEQ ID NO: 120798 - DNA, 483 bp, Enterobacter cloacae
atgacagattcaacaatcttggacatgtgctgcggttctcgcatgttctggttcgataagcaggatgatcgcgctgttttcagtgatatccgcgccgagcagcataaactttgcgacggccgccagttaatcataagcccggaccttatggctgatttccgtgcccttccctttgccgacaacactttccctgtagtcgtgttcgatccgccacaccttgagcgcgtaggagataacgcgtggatggggaaaaagtacggccggctgaacaaagaaacgtggcgcgatgatctgcgtgccggcttcgcagaagcatttcgggtgttgtggccacacggcgtgctcatcttcaaatggaacgaaacgcagatccctgtaagcaatattcttgcgctgactgacgagaagccggccatatggcaacgaacaggaaaagccgacaaaacccactgggttatttttgtgaaaggcggcgcgaaatga

SEQ ID NO: 120799 - DNA, 153 bp, Enterobacter cloacae
atgactcacgctcacgacgacatcagggtaggcacactgtgtcttcccttcattggtaacggctggctaatgccatggggtgaagtggtcagcaatccattaaaggctcagagactcgctgaggaatatcgggaaaggcaggaggcggcatga

SEQ ID NO: 120800 - DNA, 330 bp, Enterobacter cloacae
atgtcacaacctcctcaaggggcgggatactttcgtgcgccccaaaaattggaaacaaaggagcaagtcatcgctcgggtctgcgcttaccttgaggagagtctgggtaagaagcgggttgagaaccggacgccagaagagattcagcaggcggaggatgattactggaccgagaagcttctacgtcgctacgaagccaagctatggcacgacaacttcatggcttctttccagcctcaatacgaagcctgtggacctaaactcccctcacgcactcgctatgggcaaattgattatttcggccgcggcggcgcggtaaggagtgaatga

SEQ ID NO: 120801 - DNA, 549 bp, Enterobacter cloacae
atgaaccacttaatgattgacctcgaaacgatggggagcggaccatacgcgccgatcatctccattggcgctgtattcttcgacccgaacactggcgcaataggcgatgacttccaggtgaatgtatcgcttgagtcatcaatgaggtttcgcgcccggcccgacgcctcaacaatcctgtggtggatggagcaaggcgaggatgcgcgaaaagcgttaaccaatgacaccgaagagctttccaccgctctgtgttggctatctgaattcatcgccaaacacgccaagccgagattcgttcaggtatggggcaacggtgcatcgttcgactgcgtcattctccgtaacagctatgcactgatcgggcaggaagcgccgtggcaatggtggaatgaccgagatgtccgcacagtagttgagatgggtaaagcgagcggcttcgaccctaagcgcgatatgccatttgaaggcacccgccacagcgcgctggatgatgctattcatcaggccaagtatgtctctgctatctggcagaagttagtcaaataa

SEQ ID NO: 120802 - DNA, 543 bp, Enterobacter cloacae
atggctagcaaaggcgtaaacaaagtgatcctcgtcggcaacctcgggcaagaccccgaggtgcgttatcttccgtccggcggcgcagtgtgcagcgtgacgctggcaacttcggagtcatggcgagataaagccactggcgaactgaaagagcaaacagaatggcaccgcgtcgttctgttcggaaagttggctgaggtggccggagaatacctgcgcaaaggctctcaggtctatatcgagggccagctgcgcacccgcaaatggacagatcaagcaggcgttgagaagtacaccactgaggtggtggtaaacgtcggtggcacgatgcagatgcttggtggacgtcagggcggtggagcggtaccagcaggtggcagccaaacgcagggcggaaatcaattcagcggcggcgcacggtctcgcgcacagcagcagtcggaacccgccccatccaacgaaccaccaatggatttcgacgacgatattccatttgctcctgtaacccttcccttccctcgccacgctattcacgcaatttaa

SEQ ID NO: 120803 - DNA, 726 bp, Enterobacter cloacae
atgaatcttgatgaattagatgcgccatttgccagcgaggatattgagtggcgcattcaacaggctgggaaaaacaataacggaatctgggccaaggtgctggcctacgttaccaaccgagcaataatgaagcgcctggatgaagtatgcggtaaggctggctggcgtaacgaataccgcgatattccgaacaatggcggcgttgagtgcggcatttccatcaaagttgaaggcgagtggatcactaaatgggatgcggcagaaaacacacaggttgaagctgtgaaaggtggtcgctctggcgccatgaagcgcgccgccgtgcaatgggggattggtcgttacctatacaacttggaggaagggttcgctgtggtttcagcaacgcgcgcgcccgggttccagtacgccaaatcaaaagaggttggcgttttctattggaaggcaccagctctaccgggatgggcattgccatcaggaacaccaaccgagcagaaccaacaaccgcatgatggtcaccagcagcgagaccaggcacctcagtccgtggatgcggacaaaatcctcgccgaattctctgcatacgctggctctgaaaacgatagcgatcggcttaagcatcgctatgaagacacatggaaattgcttaacggctttgctgagcaccagaacaaatgcaaagacgttactggcattcgactcaaagaacttaaacaggcggcgtaa

SEQ ID NO: 120804 - DNA, 159 bp, Enterobacter cloacae
atgacggcggcagaacggtgggatgaagagtcattcctgcgacttatgaacgacgtgctgccggaaaagccggagaacgacgacgagccagtcaacctggccgccgagcggcagaacccggtcattagctgggatgaatttgcggggaattacacatga

SEQ ID NO: 120805 - DNA, 198 bp, Enterobacter cloacae
atgaatatcacatgcgagtgcgtagacatgcgcacgtccgtcggcccccacaacaccatcaaagtagagatggaaggcgttgtgctggccggtaccgttaaaacccgtgacgtactaccccagctcgacggcgcagaagtcatcgaatggctggctgaacagggttacgtcatcacccatcaggagcgtgcagcatga

SEQ ID NO: 120806 - DNA, 972 bp, Enterobacter cloacae
atgagcgaagtaacggatttagtcgtcattgagaaacagaacgcaatggcggtattcaccaccaaagagcagctcgaccctattattgaggcgatcgagaaagaagctcgcagcctggtaccggatgtgtcgacccgcaaaggccgcgacgcgatcgcatccatggcgcataaggttgcccgctccaaaacctatatcgacaatgccggcaaggatctggttgccgagcttaaagccctgccgaagcagatcgacgaaagccgccgcattgtgcgtgagcggctggacgcgctgaaggatgaagcacggcgcccgctcacagaatgggaagccgagcaggaacgcattaaggctgaagaagccatgaacgcgctgcacgccgaagcgctggaaatgaatatcaagttcgatcaggagtttgcggtcaagttcgaagcagaccacgaactggctctgttgatgaacaaggatttcgaccgtgaccgcgaagagcagcgacgcatggcagaacaggctcagcgtgaacgtgacgaacgactgaagcaggaagcggcagaacaagctcgccgctatgccgaagcgaagcacaaagcggagattgaggccgcagcgcgccgtgaggctgaagagaaagcacgtgcagagctggctgaacgccagcgcgtcgaagcggaacagcgtgcagctcgcgagaagcaggaagcagaagcccgggctgaacgcgaaaaagccgcggcagtggaagctgagcgcctcaaagcaaaacaggcagaagagaaacgcctggcagaagagaagcgaatcgccgatgagcaggcaaagcgtgaagctgacgtgaagcaccgcaagacggttggcaccaacatcgttaacgcgctcaccagccacaccagcttaacccgcaaacaggctatcgaagtgcttaccgctctgaaagatgacctgatcccctgcgcgaaaattcattactga

SEQ ID NO: 120807 - DNA, 249 bp, Enterobacter cloacae
atgagcaaccccatcacagtaggtttttcaggcctgacgaagcgaattttcgcgggtcggtcaaagccaagcaaattggcccccggcgttcgtgaattcacaggtgagaaatttgatgtcacagacgaggcgctatttgcagtggcccatcttctcgcggttcgtgatgacatccttatattcccgacagctgatgggaaagagattcacctgcgcgccgacatcaaagaaaagcgggaggcatcatga

SEQ ID NO: 120808 - DNA, 552 bp, Enterobacter cloacae
atgaatgcagctcaatcatctttggatgagggaaagctagtaattgcttactctgataagaatggatctacagtagggctggaattttcttctgtagcatcaagccaagcaacgctcttgatgaaagcttgttctgttgctgcttcagataaagaaaaacggattgtcacatcggttgtgatggatgatactgagatcattcaaacaacaagtgatgatggaggcgacgacatggataagcgattagcagttcttgaagctgaagttgcgcacatcaagagcagcatggcaggaattaaagaggatacccggaaaatatcttctgattctactgacgccaaaagagacaccgctgtacttttacagaagagcctggattttgatgcttcactatctaagaaaccatcggttgactactttgaagctaaattttccgctttggaaaccaagatagcagatgtaaaagcatggatgctcggtgttctcttggcctcgcttgctatgccaactatatttttcctattaaacttgtaccttaagaaaggtcagtaa

SEQ ID NO: 120809 - DNA, 282 bp, Enterobacter cloacae
gtgagcgataaacaagaagttgccttagcacatatcaatgatgtactggagtccaaaaattatattgaaactaatgctgatggggttgtaaccatcggaacggataacaatggctacgaagtttttaacttcgtttttctcaatagcaccccagtcatcggccatatgaatggcgaaatcgcagtggcaggaatgcaacgcactaaggttgcgtccgtgactttaagtaaacagaaggccttcgatttctatcagtccttgaaaagcatgttcgaggaataa

SEQ ID NO: 120810 - DNA, 489 bp, Enterobacter cloacae
atgcggattgatggtaatgtgccatcggcggcccaaccggtctcggaaacaattgatgtctttcgggttgatgttttagacctgaaagtaagcgctggtccggggtcttttatgatttctgaatttgttgaggtcctgcatgctattgagttcacaactgagcatgccagatctcttttcgggaaccgcactcaaaatgatgtgaaggtgatgaccgtagacggtgacagcatgtgcccaacaatacagtcaggtgatcgtctcttctttgacgtttctgttaggaatttcaaagttgacggggtgtacgcttttgttttcggccaacacttccatgttaaacgcttacaaatgcaaggtttgcaactggctgtgctatctgacaatccagcttacaaagactggtatgtgacagaagaaaatcaggaccagctgtacatcatgggtaaggcgctgatccatgagtccattgcttacaacaagctttga

SEQ ID NO: 120811 - DNA, 153 bp, Enterobacter cloacae
atgaaccacatcgaatttatcgagaagcatgtgcgcgatgaactgattaaacagggattcaccgtagcggtggctcagggggggggcgtttcaggccgtcgatatgtacaagcgtatgtcacaggccagtcgcaaggggaggattttcgatga

SEQ ID NO: 120812 - DNA, 870 bp, Enterobacter cloacae
atgtcaaacaccgcagaaattctcaactttcccgctgtagtttcgggaatacaggagcaacgcgtggccgatacagacgatgggtacacccgtctggcaaacgagttgtatgaggagcttatcggcgcgaacctgaccaaaaatcaggccaaggtagctcatgctgtttgccgcaaaacctatgggttcaacaagaagatggaccgcatagcagactcacaactttctgagctgaccagactacctcgccagaaggttaacactgccaaaaacgagctcattgcgatgaatgttttggtatccgacggcatgctgatcggtcccaacaaaaacctgagtgagtgggtaattccgggcactaagcctgcgccaaaatgtcaccatagtagtgactgtcaccacaatagtgacagtgtccctacggtggtgacaaaaaatgtcaccaaaacagtgacaaccctgtcaccaaaatggggacacacaaaagacactattacaaaagacaataaagacaatattaataaaccccctaaatcccccaaaccggcttcgttcgatccggctggtgttgaccttcctgaatggctgtcagtttcagtctggaagtcatgggtcgattatcgtcgtgacctgaagaaaccgatcaagtctcagcagacggtaactcaggccatcaacctgctcgaacgttgcaagtgcagcggataccagcctgaagaaatcatcaaccagagcatcgcgaatggctggcagggtttgtttgagccaaagatcgccaagcagacgcctcgcgcgcagtctcgcgtatctgagaactttgctggcaaagactacggccagactgaaattcctgcatgggcgagggactga

SEQ ID NO: 120813 - DNA, 855 bp, Enterobacter cloacae
atgacgctggatgaaaaaatcaatcaacttgagaaacgcattactgagctgagccagccgccagttcagcatgaagatatcgagctaactatcagcaccgagaactgcgaaacgcatggcccctttgaatgcaggaccaggcatttcttaaactctgtcgtgaaaattcccccgcgcccaagctgctgccctgaatgcctcaaagaggagttaggccgcttgcaggcggaaagaattagcatcaacgaagcagcccgcaaaagaaacatcgagcgcctgctggatggactgagcatcccggccaggtttgaatcctgttcactggagaattatgaaccggtgaacgaagaagcgaaacgcgccctgaaggtctgtcaggcatacgccagccgctggcctgagcgtttgcagaagggtggcggcctggtgatgtgtggcaagcctggaaccggcaagaaccacctcgcattggctatcgcccggcatgcaatcaccgagcaccaaagctcagctgtgttcaccaccgcgctgaaaattgccagggagtacaagtcaacctggtcgaaggggtcaagccgtactgaagacgaagtgatccgttacttcacgaagcccgacctgctgattatcgacgaggtcggcgtgcagttcggaagcgacgccgagaagttgatcatgttcgaaatcatcaacacccgttatgagcggatgaagccaaccatcctgatcagcaaccagacccgggaagaactggctgcattcatcggcgagcgcgttcttgaccgcatgagcgatggaggcggatgcactctgtcattcacctgggattcttaccgttccaagggggcagcgtga

SEQ ID NO: 120814 - DNA, 243 bp, Enterobacter cloacae
atgcactctgtcattcacctgggattcttaccgttccaagggggcagcgtgaaagcatgcagcgatgactatgttgttatcaacgagtattcgaaaggcgatgcagcctggatacagcgcgttgataccgatgaaaagcggaaagcactttacaaatcgagttgggaaatagccgtaatctcgctcgcaatcgttcgtgaatatgggagccggagggtaggaaatgaccataacaatccgtga

SEQ ID NO: 120815 - DNA, 345 bp, Enterobacter cloacae
atgaccataacaatccgtgagcagattcttgcagccctgcgtaataacccgggcctgaatagtgctcgcattgccagcatgatcggcatgaccaccaaaaagatttccggcccgttaagcacattgttagcagacggcctgatcgagttcgaaggcaagcacggccagcggctgtatcggctgaccagctacggcatgaaatacgcaccggaaaccatgccggccatgccgaagggtaattcgaagctggtgcagcgcacagagacaaacgtgatctgccaggagtgccgcaacagtccggctatgaagcgagtattgatggtttgggggagggtaggggtatga

SEQ ID NO: 120816 - DNA, 201 bp, Enterobacter cloacae
atgagcatgatggatttcgcagaaactaaaaaggcgatcgacgctatcacaaccgactggtctatccgtggcccataccacgaagacgacggcaaatattacgctttgcttcgcggagagtgggtcggtggcgggcatgtcggaaaacggaaaactcttgacgcaattttcgaaaagttaaccagcgaggtcgcccaatga

SEQ ID NO: 120817 - DNA, 432 bp, Enterobacter cloacae
atgagcaacatcgacatacgcgcattacgtgaagcggcagttcgcgcatgtggcgtgaagtggcaatacatgcgcgcgacgcaacattcgaaagcatacataacggacgataaaggctcgccaatcgtcaactgcactgatggtgatgttccagccaaatgcgccggatttctcgagtccgccaaccctgccgccgtgctggcgctgctggatgagctggaagccaaagacgcgcaaatagtcaatcttacagccgagcgcgatgctcttcgtgaagaagagatgggagaagcgaagcacagtaatacgcgtgccgctgccgatatctatttccagttggttgaagagtgtgaaatccatcctggcggttcactggttgaatatgtaagcgatctgcgtgaacgcgccgccgcagcctgtaaaggagagtga

SEQ ID NO: 120818 - DNA, 342 bp, Enterobacter cloacae
atggaaaaaccactgaataagcgagagcgcgagtttttaaagccagccatagttcaccgctgggaaattgaaatatcgccataccgaaaaactgcgctctgggatggtgactctctctttcctgtcaaagtgggagcaatggctgaagacctgataaagcgcggatttctggagcgtgtttctatgggatttggtcgagacattatcagggcaaccaaaaaggcagaaagcttacattgttaccgctgccattacggaaaattgattaacgaaaatggtcagcagggcgaggactgcccgcattgcgatggcggtgtaattgtgaagaggactaacccatga

SEQ ID NO: 120819 - DNA, 849 bp, Enterobacter cloacae
atgagcgaactaaccaaagaatggctcctcaagaccatcgcggagcttgaagaagagcgcgatgcgacgcccggcgcagtaaacgaagatgctgcgatgtctctggcggcgatgaagattgcgctggcatcgctcgaagcggagcaggtgtcaatcaacgacgatatggcatatgcatttcatcatgcgctgtcagattcatcactaggggctgaagaagtcgaagaaattaaggctgggttgcgtgctgcattcgctaatgtcaccgctccgccagcgccggtatctgactcgcttctgtctgagcttttagcgatagcgaagaaggcggctgatgcagcagacgaatgcgcacatgcggagtggagcgatgactccatggagcattcaactgcaatagctgattgggaacgccgcgccgccatgcttcagggtgccgaacctgtaacgacggcttacaagttgccagcgattggttggctacgtgctgactatcagaatgataatcgtggtctgcgaggtaatgctccactgttcgtgttgggtaaaaaagacccttcaacggtgtgggggctggattacatcccgcttatcagcaactctccggtgattacggatggctgggtagcttgcagtgagcggatgccagacataggcatagagatattctatttctgccaggatgatggactgagagattgcggtattgttagttcatcaaacttcagcgacagaggcgacgcacaactatacgttcatgctgaaggctatgatttgcgtttcggcgtagacataacccactggatgccactgccagcagcaccgcagcaggaggctaaaaatgtctag

SEQ ID NO: 120820 - DNA, 327 bp, Enterobacter cloacae
atgtctagtttgaagccaggcaatgtttatatcgaaatttctcacaatcaggatggaggcctttccctctgtatagccaatgacgatggcggatatcgcatctccggagccaaggttggcggctgtgaaaacctgaagtgctttgaggttaatgtcgaggagctaatcgagcagattcgcgagcacgcaaaaaaggcagccgttgagcctgggcacatcgacgaaatcgctattcaggcagggattgacccagccgtggctgatgcttacatgcagggatatcacgacgcagaagtgcggagatctgagcagcaggatgcaaactga

SEQ ID NO: 120821 - DNA, 240 bp, Enterobacter cloacae
atgtcagaatatgagaagctgtcagaagacctgtatcgggaagcgtgtcgcattgttggcgaatgctgtctgatgcttgccagcaatgatgcggaaacaaacagagaccagctggttcacgagttaaaacggcttcactgggaaattatgaagcagacagaagaatccaatctgcctattttgcttgccatcgaaaggcttgctaccagtgaggactggaagaagccatatcttggatga

SEQ ID NO: 120822 - DNA, 171 bp, Enterobacter cloacae
atgtctactccactatcccgcgtcatcaccaacgaaatatttctcgttccggcgcgccgccagcctaagcccgcggttaagccgtccgacatcccgacactgaagggctacaccgcccgcctggtagatcagaaatggctgcgtctagcggcacggaggaataatgcgtga

SEQ ID NO: 120823 - DNA, 300 bp, Enterobacter cloacae
atgcgtgaattaaaagttgatggtctcgccttaatcatcaaaagcagaattcctgagaatgtcggcgcaacagtgcgtctggttgagtatctcggggtgattaaaggcgctatttctgaagaaagatttgaagcgtggaaagtcgaatccgctagcggtggcaatttgagcggttacttgcctggagggctgatcgttgcctggccaactgttaattgcccggcaaaatggctgatgcctatagatggtggcgatttttcaaatgaactggcatctgacaaggagatgtcacatgcgtaa

SEQ ID NO: 120824 - DNA, 627 bp, Enterobacter cloacae
atgcgtaaaccaacccgtcgcacctgcaaggtctgcaaacagaagttcaccgccaccttcgacaacgtctggtggtgctgtcctgagcatggcgccatcttcgcgctggagttgcgggcaaagcagaagataaaagaggccgctaagcgcatcaaggagcgcaaagagaaggagcgcgcggaacgccgggatctgaaagcaagaaaggtggcactaaaaacgaaacctcagtggagagctgaagcacaggcggctttcaaccggtatgtccgtctgagggatgccggtaagccatgcatcagttgcggtcgtctaccagagcagaagtttggcggaaccatggactgcggccactaccgcacccgtggagctgccgcgcatctggctttcaaccttcacaataccgcatcccagtgcgtctattgcaaccgtgatcgggacggcgcgcaaaaggcatttgaacagggccttattgagcgcattggtgccgaaaaagttgaggcgataaacaacgacaattccgtccgccggttcgacatccaatacctgcaacgcatcaaatccattttcacacgcaaagcccgcgcgctggaaaaacgccgggcccgccgacaggaggccgcatga

SEQ ID NO: 120825 - DNA, 690 bp, Enterobacter cloacae
atgaacagtcagcaactggaatacgtacgtcagcagctcatggtggcgaccgcagatctgagcggggcgacgaaagggcagttaatggcctggcttgaaaatgcccagtacgatacaaagacattcagacgcaagaaaccacgcgtgatggatgaggtgaccgggaaggtgattactctggataacccaccgatacccggtaagcagtcgcgagctaaagggtcacatattcctctggttaatccagttgagtactgcaccgcatcctggcgccgggctctcatgtcgctggaagagcgccataaggcgtggctattgtggaactacagtgaagagacaaaattcccgcaccagacaacgatctgccagatatcttgggaagaattcagagagcagctagatggggagaaaatcgcctctaaaaccatgggccgactaaaggctctggtgtggcttgcagctcaggacgtaaaagctgagttggctggcaagcgtgtttatcagcagcaggaattggctgcacttacaagcacaactccacagaactggagcaccaactacgcgcagcgctggcgtgcaatcagggagatattcttagagctggacagagaggcgttacttagtgttaaaaaagcacgatcgcaacaaaaggcgacaaattatcatcaaggtattgcagaaatgaattaa

SEQ ID NO: 120826 - DNA, 327 bp, Enterobacter cloacae
atgtccgagaaaatcacagagcaattggtcttccgccctgccagtgaaaaactgacaaaggatctggatggtgagtgggtgattctgctcaacccatgcgatggttggcatattgcccatgtggtggctctggaagaggatggcgaggtctaccatgtcggcgcatatcaatttgcaggcggcgagttcgagccgcacgaattttatgttgcctgggctttgcttccagactcaataaaactgtctgatcgctttgaagatcagaagatgagtcaagagattagagacgctcgctggcgtgaatggacagccagcatcagtaagtga

SEQ ID NO: 120827 - DNA, 174 bp, Enterobacter cloacae
atggaagcagtgacaattgcaccgacagctggcgatacctcaatgctggccggtggcttcatcaggcttaacggcgtgttgatgattccggccatgattttcgccatgggaacggagaagaacacgccactgataaacgatatcagcgcaaagatagcctgcttccagagttga

SEQ ID NO: 120828 - DNA, 444 bp, Enterobacter cloacae; identical to SEQ ID NO: 120063

SEQ ID NO: 120829 - DNA, 465 bp, Enterobacter cloacae
atggtaaaagtgtttggttttggtaagtgttggcctgttgttttttctggtttgtgtctggtgattttaaccggatgcccgggcccgggagataggtttatcccccatgaaaccacttctgttagtaaacagggaaaaaacgtatgttttaacattacagatgctcaggattatcaacctgctgacataggaataaatccgcgcggaactcccttgaaggaaaaggactttaatttttcccctgaacttacgatcgttgatggaaaattatgtattcctccttctttttatcacttccctgataatgggaagtttattgttgaatatatattaatttcaaagaaacatgatgagccacgaaaatttgttgtcggcgtggggataaatcatggggtggtttacaattttccgttgaccgatcgtgaaattgcaaggccgtatggttcaattaaagtttctgaatag

SEQ ID NO: 120830 - DNA, 642 bp, Enterobacter cloacae; identical to SEQ ID NO: 119932

SEQ ID NO: 120831 - DNA, 174 bp, Enterobacter cloacae
atggaagcagtaacaattgcaccgacagctggcgatacttcaatgctggccggtggcttcatcaggcttaacggcgtgttaatgattccggccatgattttcgccatgggtacggagaagaacacgccactgataaacgatatcagcgcaaagatagcctgcttccagagttga

SEQ ID NO: 120832 - DNA, 834 bp, Enterobacter cloacae
atggcgctttccaatactgctcagccaattaacacgtcgctgcgtaaaatcgcggtcgtcgtagccacagcggttgccggcatgtctgcttatgctcatgccgccgaaaccccgaaaaaagaagaaaccattactgttactgccgcaccggctgcgcaggagagtgcctgggggcctgcaccgacgattgcagcaaagcgcactgcaacggcgacgaaaaccgatacaccgatcgagaaaaccccgcagtccatttccgtggtcacacgtgaagagatggacatgaaacagccggggacggttaaacaggcgctggcctacacgccgagcgttttcgcaacgcgcggcgcctcaacgacctatgatgtggtttcgattcgtgggttcaccacctccagcaccgtgaataccaaccagtatctggatggtatgaagctgcaaggggataactactctgaagcgtcgatggacccatacttcctggagcgcgtagagctgctgcgaggcccgacgtccgtactgtatggcaaaagccaccctggcggcgtagtgagtatggtcagcaagcgtccaaccacggaaccgttaaaagaaattcagttcaaaatggggacggataacctgtggcagactgggtttgacttcagcgacgcgattgatgataacggcgtgtggtcctaccgtctgaccggcctgggacgcagtgaaaatgcgcagcaggagatggtgaagtctactcgttacgcgattgcgccgtctttcagctggcgtcctgatgataaaaccgatttcactttcctgagcaacttccagagcgatccggatgcgggttaa

SEQ ID NO: 120833 - DNA, 2478 bp, Enterobacter cloacae
atgtcgtcatctccactctacaaacaggttctgaagggaatcgcgttagcgctgctcgcgatgatccagcctgtgagtgcagatgacgaatttaacctgcggatccttgagatggacactccgctggaaaacacctcaacgctaaaaaatttcatcaatgataatggcttactgccgggaaactttctgacgaccattatgtgggatcgggatgttctggataaacgcacggtgagttggatcttgtctgacgataagcagcgcctgttaccggagctgaccaaagcggatctgcgtgcattaggggtaaaagtcgacacgatcccggacatgaaagatctggatgatgcggcgataatcgatgacatctcccattttattgataatgcccgctacgattacgaccaggataatcagaccctcaagctggtgatcccgcaaaaataccgcgatcaggctgcggccggggctatcgagccgaaattctgggatgacggtgctcccgccgcctggacaagctaccagtttagcggctctcagcagcactaccgttctggtgaaacgtcatctgcatggcttggtctggagtcggggatcaacctcggggcgtggcggttgcgtaacaacagcacctggagtgacaacgccggttgggatgcaatcgccagtacgctgcaacgtgatatcaaaaccctgcaaagccagcttgagataggccagacgtacactaacggcgagcttttcgacagcgtccaaatgaccggcgtgaagctggaaacggatacttccatgctgcccaccagccagcaggggtttgcccccgtggtgcgtggtatcgcaaatagcgatgcaaaagtcaccatcaggcaaaacggctacaccatttatcaaagcaacgtctctccgggaccatttgagatccgcgatttaagccaggtcacatccggcgcggatctggaggtgacggtggaagaggccgacggcagcgaacacagcttcatccaggccagcgcatcggtaccggtgctacagcgggaaggggcatttaaatattcgctggcggcagggcgttatcgcggtaatgaaggtgaggacgagcccccttttctgcaagggacggtcatttacggcctgccttatggcgtaacaacatacgccggcgcgctcgttgcatcgtcgtatcaggctatgctggcgggaacaggggccgatcttggccgtttcggatcggcatccgtggatgtgaccgccgcccgtacggcttttgatgatggacgagatgatgcccgcgggatgtcatggcgtgcgcagtattccagggatattccggatacagacaccaccgtgacgcttgccagctaccgttattccacctcagggttttatacctttcaggaagctgtcgaccagcgtgacagcgagattgacgatgggatttatacctatcggcgaaccaataatcggcgcagccgcatgcaggttaatctttcccaacgcgtttcggactggggatcggcttaccttaatggttatcagcaggattactggaacatggcgggacacgagcgcagcgtcagtgcggggctaagctccggctggcgcggtataacctggtcggtaagctacagcctgacgcgtacgccggacgccaataccgatcggcaaatggcgttgatggtcaacgtacctctttcacgctggctagcgaacgcatggtcaacttacagcgccaacactgccagcggtggattcgtttcgcatcaggtagggatcggcggcacggcacttgagaacaataacctcagctataacctccagcagacctatgccagtcaagatactggctatggcggcagtgtatccgggcgctaccggggatctgccggtgatgtcgggctggggtataactacgggggcgataaccgacagtggaactacagcgcgcagggttcaattgttgcgcatgaacatggagtaaccctggggcaatccgtccgcgacgcctttgccattgtccatatcaaagatggcgataacgtcaaagtacagaacgggcgagggatctacaccgatcgctttggtaacgcgattgtcccttccctaacggcttaccggaaaaacggtattacggtcaacacccaggatcgtgaagatattgaaattgccgccgctacccaggatgttgtcccaacaaaaggtgcggccatctcagcgaattttgatgcacgagtggggaagcgtgcgcttatcacgctgcttttccacggcaagccggtacctttcggcgccattgtcacgcaggaaagtgcaacggctatcgtcggtgatgaaggagaagtctggcttaccggtctgcatgaagcggtttccctgaatgtgcagtggggtgacgggcgcgatcaacggtgtgcgtgggcgggggatctccctcccgggcgctcagcaactattttgaaaatgacggtaaattgccaatga

SEQ ID NO: 120834 - DNA, 681 bp, Enterobacter cloacae
ttgattatctcttgctgttcagtacaggcaagtgtggttctcggtggcacgcgaattatttatccatcgaataaatccgaagtacaaatagcactcaaaaataaagaccctcatactcgatatctggtgcaaagctgggtgagttaccccaacgatgcaaaagcacctttcatcattacgccgcctgtctataaattacaggaaaatcgtcagacccttttgcacatcatttttaccggcgataaaaaaaatctgcccgcagatcgcgaatctttatttctggcgaatgtgaaatccgtctcggcgttatcacctgacttaaaagacaagaatacgctgcaattcgcgatgaaaacgcgtctgaaactgttctggcgccctgctgatttgaaagaagccgatgccctacaggcctatgaaaaaatcacgttcctccgccagggtaacaggctcattgcgaaaaacccaacgccgttttacgtctcctttggcgagctggccgtgggcgggaaaagtgtccctgtgactgacacaaaaaccacgccgggggcgatttcaatgatggtcgcacctttcagcgagcaatatttttctgtgccgcaatctgcaaacgggcccgtgacgtggactgctattagcgatttcggcgcgcaaacctcccagcgcaagcaggctctttaa

SEQ ID NO: 120835 - DNA, 306 bp, Enterobacter cloacae
atggaggcaaaagctcagcgatacaaacttgaacagttatgtagcgttaaccgctactcatgcctggttgaaacatcaggtggttatgcgctttttcagcctgatcttgtgcccgacaacggaacgcgcgtgctggtgcatgcgttcggccagctacagttcgcggtcgttatgggcggtgcgctcatcaccgaagacggtgaaagcatagaaggtgatgctttagatgaagtcgatgtcatgggagtggtgaccttttttatcaatggcgctgcggcgttcacagacgacaatccggtgatgtga

SEQ ID NO: 120836 - DNA, 1269 bp, Enterobacter cloacae
atgtttgccttagtcgatgtgaactcattttatgccagttgcgagacggtgttcaggccagatctgcgaggccgtccggtggtcgttctgtcgaataatgacggttgcgtaatcgcacgtagcgccgaggcaaaggctgccgggatagcgatgggtgagccgttcttcaagcagaaggagttgttccggcgagctggggttgtttgcttcagcagcaactacgagctctatgcagacatgtccagccgggtaatgaccacgctggaagaaatgagcccgcgcgtggaaatttacagcatagacgaagccttttgcgacctgaccggagtaaggaactgccgggacctgactgaatttgggaaagaaatccgtgcgacgatattacagcggacacatctcacagtcggagtcggcatagcccagaccaagacgctggcgaagctggccaatcatgctgcgaaaaaatggcaacggcagactggcggggtggttgacctctcaaacgtcgaccggcagcgcaggttaatggcactggtgccggtagaggatgtctggggcgttggccggcgcatcagcaagaagctgaacgctatgggcatcaaaacggcactggacctctcagaacaaagcacgtggattatccgcaagcacttcaatgtcgtgctggagcgaaccgtccgggaactgcgcggcgagccatgtctggatctggaggagttcgccccggtgaagcaggaaatcgtatgcagccgatcttttggcgaacgcattactgactatgagcaaatgcgccaggctatttgcagctacgcggcccgtggtgctgagaagcttcgtggcgagcaccagtattgccgttttatctcagctttcgttaagacctctccatttgcccttaatgagccgtattacggaaacagcgcatcggtaaggctactcacgccaactcaggatagcagagacatcatcaacgccgcggtaaagtgtctggacataatctggaaggacggtcaccggtaccagaaagcgggtgtcatgctgggcgacttcttcagccagggcgtggcccagttaaacctgttcgatgacagtgctccccgagctggtagtgagaagttaatggaagtgctggatcacctgaatgcaaaggacggaaagggtacgctctattttgccggacagggaatacagcagcagtggcagatgaagcgtgaaatgctgtcgcctcgatacactacgagattttcagatttgcttgttgtccgataa

SEQ ID NO: 120837 - DNA, 135 bp, Enterobacter cloacae
atgaacctcattccatattacaagctcatcatccttcatggccatacggaattccggatgccggtttacgacgtgagaaataagggaaataatcgcaggataaaatttccagccaacctctttgatatgctttag

SEQ ID NO: 120838 - DNA, 270 bp, Enterobacter cloacae
atgatggacctgaacggcgaaaggcaacaagacctttccatcctggttatagtattttccaaacgtgaacatgggcgcaaaaaaattccgcatgttagcgacgttgacgttaaaactgctaaaactgacccacggaatatccgatatgaagaatatattctcccgggactcttctttaggccagtaagcaaggatattgccatagcgggcaacatcttctgcataaacgcgctgaaaatggtgaatatttccatcgtaatgactccataa

SEQ ID NO: 120839 - DNA, 198 bp, Enterobacter cloacae; identical to SEQ ID NO: 94790

SEQ ID NO: 120840 - DNA, 1161 bp, Enterobacter cloacae; identical to SEQ ID NO: 94559

SEQ ID NO: 120841 - DNA, 477 bp, Enterobacter cloacae
gtgtttttgattctcctttcagcggtaccactaacgctactgctgtattgcccgataatgacaatcgtcagtgccgtgacgccctggaaagggttccgaacggccttggttcgacatcgtaagaagcattacacaaccctacatctgtcgacatttgaccgggttggccatcttaatctccgacgtgcggcacgctttcaccggagctttctggccacgttgcagctggcgctacaaagagacagcacgccggtgtacttcacatcccatctgatgcgaccggcacacctgaaaagcatgactatcctgatgtcaaaaatgggggaaacgcaccgctggcgcagcaccacagtcacgatacctccagccatcagaaacgggatacggctgcaaacatttttacaggaatggcgctggataaccgtacctgaaaccggcgtgcttgtactcattcggccgcgccggaaagagcgctaa

SEQ ID NO: 120842 - DNA, 837 bp, Enterobacter cloacae; identical to SEQ ID NO: 94561

SEQ ID NO: 120843 - DNA, 492 bp, Enterobacter cloacae
atgaaaaagactcacattgcaaaaacactgatatcttccgccgtcatgatggcatttcatgcaggagcagcaacctcttatatggaagcccgcagcgatgcgatgggcgggactggcgtagcttccgcacattacggtacagctgccttatccaacccggcactcctgacgaaatttggcgcgaacgatgacttcagcctggtgctgccgtccgtaggtgtccaggtagcagacccagataatgccatcgataataccgatgacgtaaaggatctgtggaacaattttgacaatgcagttgaccgccagagcggtgtcagcgaaagtgcagccgcattacgcaacaagctggaagacctgaaggacgtaaaagcaaacggacaggtcggggcatctgtcattgctaccactcctaataaggtgcttccatttgcggttgtcgtgaagtcctggggcaccgtttccgtaaacggcaaggtcagtgatcactga

SEQ ID NO: 120844 - DNA, 726 bp, Enterobacter cloacae
gtgatcactgatctacagtatctcgataatatcgccagcggcgccatcccgtcagatatggtagacaaggatgcacttacgtcccgcgcttatggtcgggctgccgttatcaccgatgtcggtgtggctatggcgcacgaatttgaaacagcgggacatagctggtcactggggatcacgcccaagtatcaacgcatcgatcttttcaactacagcgcaaaggtaaacgacttcgacaaaaatgacctgaattcggatgactaccgcaatactaaaaccggatttaacgccgacatcggtctggcaacaaacctcggcgacaactggatgctgggtctcgcggtacagaacatcatcgcccgcaccgttgacactaaagcagtgaatggtgagaaagaaacattcaaagtaaaaccacaggccactgcaggcgtggcatggagtaacagtatcctgaccaccgctctcgatgtggatctgaccgaagccagccgctttgagcgagatgacaaacgccagttcgccagtgtgggtgccgagctgaatgcctggaactggatgcaggtacgcgcgggttatcgtcagaacatggtctccagcgagggcaacgctttcactgcgggtctgggcttctctcctttcgacgtagtacatctggacctgaccggtattgcaggaaccgatcgtacctacggtgcggtcgcacagttgcagttcacgttctga

SEQ ID NO: 120845 - DNA, 474 bp, Enterobacter cloacae; identical to SEQ ID NO: 94563

SEQ ID NO: 120846 - DNA, 807 bp, Enterobacter cloacae; identical to SEQ ID NO: 94564

SEQ ID NO: 120847 - DNA, 1161 bp, Enterobacter cloacae; identical to SEQ ID NO: 94565

SEQ ID NO: 120848 - DNA, 288 bp, Enterobacter cloacae; identical to SEQ ID NO: 94566

SEQ ID NO: 120849 - DNA, 3543 bp, Enterobacter cloacae; identical to SEQ ID NO: 94567

SEQ ID NO: 120850 - DNA, 351 bp, Enterobacter cloacae; identical to SEQ ID NO: 94568

SEQ ID NO: 120851 - DNA, 702 bp, Enterobacter cloacae; identical to SEQ ID NO: 94569

SEQ ID NO: 120852 - DNA, 981 bp, Enterobacter cloacae; identical to SEQ ID NO: 94570

SEQ ID NO: 120853 - DNA, 1308 bp, Enterobacter cloacae; identical to SEQ ID NO: 94571

SEQ ID NO: 120854 - DNA, 771 bp, Enterobacter cloacae; identical to SEQ ID NO: 94572

SEQ ID NO: 120855 - DNA, 525 bp, Enterobacter cloacae; identical to SEQ ID NO: 94573

SEQ ID NO: 120856 - DNA, 405 bp, Enterobacter cloacae; identical to SEQ ID NO: 94574

SEQ ID NO: 120857 - DNA, 864 bp, Enterobacter cloacae; identical to SEQ ID NO: 94575

SEQ ID NO: 120858 - DNA, 3054 bp, Enterobacter cloacae
atgaatatcaaccgccttgtcttcactattgaagacgttatgaatacctgttcccgtttcgccgtctctgctgactttgtcgactactgcgacattcgtacggtgatcggactggacaaacaagatctggagctcagaccctggctggaagcgccttatataggtgtcacccatcagggctatttcctttctgtattcgaaatatccggggcattacgtgaaatgtcggaaacagcctcagacgatcatccggatgcgtttgaaggaatgatcgcgcacctcgcgtccacgctcagcaccacctggaaaaatatcggccataaactggccttcattttcgaacgagacccggaaaaagggcgtgacgaagtcagcgccatgatcgccccgcaaatgcgttcaattcagcacatcggcgtccagctggatgacctgcttaatgagaagatcaatgtcatttctccgtggcttgttcgtgagcgctgctggcttgccgtctggagctctccgacactggtgagtcatcaggaaagaaccgattttaacgccaccgttcgggccattcaggataaagcacctgtcgcgcgctttggtcaggagccctggcgctggcaaatgtctggtctgaagatccggcacgacagctttatcaccactcttgaaaaagcactcgtacgcggtggagacggcttgcttgtccgcctacttgatgtgcctgagttctgtaatgaaatcagacgtgaaacagcacgcaacagcacatcggccgcatggcgcccggcattacccgggaaggctgcgccagcgggggcgcttcaggagggcgacgctacggcactgcttgctcccttcctgaatcttcaggtatttggttgtacgccagaaacagaaggtaatctggtgcatgcaggggggctgtggcacggcatggtggccataacacttccgcctcagcatccacgccccttcaatgagcttgtgaaattggttccacgttccgttccctggcgcatacgaatcgacatcatgcctggtgggatgaaagcgctgggctggaaaaaaactatttcatcatttggacaatttattccctctattcggccactttacgacgctttcacacagctggctgcaacggatgaacgcgatccggtctgcgtgatgaccattgtggcgtccacctgggggcatacccgggaaatatgctcccgtaatcagatgctgcttgaatcagcgttgcagggctggggagtctgtaacacgaccaccacattcggtgatcctcgcaggggatgggtcaacagtatgctggccgcgtcagcgggctccggccctgttccgctttaccctccactctcccatgcgctatcgatgttgcccttcaaccgaccaggtaccgtctggcgaggggaaggcaacctgatgctgcacacggaagacggatgcgcctgggaagtcgggctggggtcttctcgccagaacaagcataccgaacttgcccctggcgattcgggtctgggtaaatcggtactgattaataccctgacggagatacaggtatcttccgcccaggtttcgcttccttatgtggctcacattgataaaggattcagcgcgatggggttaatccagctgatacgtgacagtctgcctgaagagcgaaaggacgaagcagtcggcatcatactcagcaacgacccgtctaagtcacgcaatgtcttcgacatcctgtatggcgctcgtaagccagtgacaccagagaagcaatttatcgcgtccatgttgacggccttctgtatcgaaccggataaagggaccccgcctaaccctacagatacccggcaaatagtgaaccgcctgattgatctggcgtatgacatgcgtagtggtattgagccaaacatgttccgttcaaacgtagagccagaagtggatgcggcactggagtcatccggtttgtggggtgagcacgatccggagtggtggaccgcgacaccatggtacgaagtacgtgacctcctgcatgaacgtggacaattatctgcggctcagcgggcacactaccaggcggtaccagaacttgctgatatgcccgcgctactacgcagtgaggtcattcaggaaacttttggccgaatacagcgtaacggctcacaggagcccctggtggagtacattgagcgctgcatgattcaggcccgacaggactacccgatgatggccagtcggactcgttttgcgctgaacccgaacacacgcattattgccgtagacttaaacaacgtcgccggcgataagaccccggcaggcagactgaaaaccggcatcatgttcctctttgctggccacatcactgcgggtgattttttgctgccgcagtatcaggatgaggtaatgcaaatactgccggaagcctacctcccgggcattatgcgacgcatcaaccagctcgatagtgaaatgaaaaccaaaatctatgacgaactgcacaacgtcaaaggtattgatttcatcttcgaagcactggatacgcaggatcgtgaacaacgtaagtttggtatccgcacggtgctgagtacccagttccttaccgactatccgaaaagcctgctcgactctgccaacaccctctggctgctgcgcttccgccaggaagatattccacttttacgggacagttttaagatccccgaacacaatcttcatgcattcctgcgtatgccagctggtccggctgcagacggtagtggcgtaccgatgctatgtatgatgcgcacaacccaggggacgctggcacgcattgtccggtttacgctcggaccgctggagctgtggtcgcttaactcagacaaaaaagacggcgcgctacgcagaaatctctcggatacgatcggtactgcccgtgcccgtcagttactggcggagaagttccctcgcggatccgcaaaaaaactcattgagtacagggagcgtaacagtggcgcccgtggtgataagggcgtcatcgaattgatggcagacgaaatgataaatgagctggggtatgacctttga

SEQ ID NO: 120859 - DNA, 1203 bp, Enterobacter cloacae; identical to SEQ ID NO: 94578

SEQ ID NO: 120860 - DNA, 543 bp, Enterobacter cloacae; identical to SEQ ID NO: 94579

SEQ ID NO: 120861 - DNA, 2160 bp, Enterobacter cloacae
gtgaaaaatctcattcgtgcgctttgtgcagggctgcttatctctgttaccccggcacgcgcaggtgtcacttacgatgacatagtctctgctgcaaccaatgcacaggacctctcccgacaggcactggtcactatcttcggcgatgtggtgctggaccctctcgccgccggcaataccacgatgatcgggaatctgtttgctctgtttaacggaattatcgccgtccttgccgtcgtgtggtttgtatttattggtctgaagcacattaataaaacggggcatcagggcaaggtattcagcggggatcgcgatatcaccagcacactgagcacagtgtcaggatttttgatgattatcccgaccgccaatggctggagcatgtcccagctaatcatcctctggggcgcgtcgattatgggcgtaggttctgccaacctgatggtgtccaaagctgccagtgatattgccagcggctactccctgactgtccagcccacacaggcttcgacccgcacttctgcacgcggtatttttgagatgcagctttgtagacatgccatcaatactgcgctggacgattacaacagcacggcaagctcgaccacagccagaatggcagggatatccggttcttctggagggaattatacctaccgggtcactaatggcagcggtgtgtgcggcacggcgacgataccggaacaacagaaatcggactcctcgtctggttccggaagcttctttaaccccttcagtaaccgcgatacaagtgaagtggtggatgcgcaaaacaaagctatggaagcaatgatccaggatatggacagcgcggccagcgagtttatggcagggtttatgaataaacgaacaaccggcaacggcacactcccggatattgaaacccgcattcagagagcagccagtacgtacgaacaaactgttcagcgcgcattaccggcgcagagtgaacaaaatggcatacaggacgctgtcaggaattacctcgacacatatggctgggcggctctcggtgcctggtaccagacttttgcaacggccaatcaacgcctgacagaagttgccagtcgcgcgcctgcaaccagtggaatgtcatctcttggggaaattggcagcggagacctgttcagtgcggtaatgagcgcctaccgtacccagttacaaaactctaattatgcacctccagcaggtacagcaacatcacaaaacgagttaagtgcttctgaaggtaatgacccaaatagcatattaatgaactcgttcgctccatttttcgtcagtttaaccagcaacatcgcaacaaattatagtgggacaggaacctcaacggggcaggtaaacccattagttaaaatgaaaaatgttggagattacacgctggttgcagcggagggaactttaacagcatacacagtcatacgggctgctgttgcgggtggagagtcatcccttctcgggaaggttgccaatatgacaggagcaattagcgctgtagataaagggcttgatgccatttcgccagcagtatatttcttgttactacttatgtttagcgcgggatttacactttcaatctatttgccatttattccgtttatcttctggatgactggtattggtaactggattgtcagtgttctggtaggttgcgcagcgggacctctatggggggcaactcacctaggtacgtctcaggatcgaggcagtcgtgcggcttatggttacatttactttatagataccatgattcgtcccgcactcatggtttttggatttttctttgcatctgttgcgattgttgctactggaactatccttcatgcactttttggtgtcgcactggtcaatgttcaagccaactcgttaacaggtttattcagcatggctggttttttaatgatctatgctcgaatttgcacgacactggtatctagcatatttgccttacaggcatatttacctgactacgtcatttcgttccttggcggtagagatgcagcaaatactcttggaagcatggctggttctgtcaaagatatgttcgtagccggtgggaggaatatacggcatacccctggcgttaatacgaaaggtatgaatggtcctggggaaacaaataatgatggaataaaaagttga

SEQ ID NO: 120862 - DNA, 633 bp, Enterobacter cloacae; identical to SEQ ID NO: 94581

SEQ ID NO: 120863 - DNA, 1209 bp, Enterobacter cloacae; identical to SEQ ID NO: 94582

SEQ ID NO: 120864 - DNA, 1185 bp, Enterobacter cloacae; identical to SEQ ID NO: 94583

SEQ ID NO: 120865 - DNA, 2301 bp, Enterobacter cloacae
atgaattatacgcccgtaaaccaggcgctcatgaagcgcaatgcctggaactcccctgttcttgagcttttacgcgaccacctactgtatgccggcattatggcaggaagtgtggtggcggggtttatctggccactcgccataccgcttttgcttttgctggccatcgtggccagcatcagctttggaacacaccgctggcgtatgcccatgcgaatgcctgtccacctgaataaagtagacccctctgaagaccggaaggtacggcgcagcctgttcagaaggttcccctcactgtttcagtatgaaacaacgcaggaaagtaaaggtaagggaatattctatctcggctacaggcgaatgaatgatatcggtcgcgaactctggctcaccattgatgacctgacccgtcatgtgatgttctttgcctcgaccggtggagggaaaaccgaaaccatctatgcgtggatgctcaattcattttgctggggtcggggcttcacctttgttgacggtaaggcgcagaacgacacggcgcgcacctgctactacctggcccgccgctttgggcgtgaggatgatgtggagtacatcaacttcatgaatagcggcatgtcccgcagtgagatgatccacaacggtgataaaagtcggccacagtctcaccagtggaaccccttctgctatagcactgaggcctttgttgctgagacgatgcaatcaatgctgccgaccaacgtacaggggggagaatggcagtccagagcaattgcaatgaacaaggcgctggtttttggcacaaagttctattgcgtccgtgaaaacaaaaccatgtcgttgcagctgctgcgcgagtttatgccactggagaaactggcagagctttactgccgtgccatagacgatcaatggccagaggaagctgtctctccactctataattatctggtagacgtaccgggtttcgatatggccaccgttcgtcagccttcagcctggacagaagagccgcgcaagcagcacagctacctgactgggcagtttctggaaaccttcaacacatttacggaaacgttcggtaatatcttcgctgaggatgccggtgacattgatattcgcgacagcattcacagcgaccggatactcctggtgcttatcccggcaatgaacacctctcagcacacaacctctgcactggggagaatgtttgttacccagcagagcatgatactggcccgggacctgggacatcgtctggaagggctagattccgaagctctcgaaatcaccaaatacaaaggccccttcccctacatgaactatctcgacgaggtgggagcctattataccgagcgtattgccgttcaggccacacaggtacgttccctagacttttctatcgtcatgatgagccaggaccaggagcgcattgaaagccagacttcagccacaaacgttgccaccctgatgcaaaacgccggcactaaggttgcgggtaaaatcgtaagtgatgataaaacggcaaagacaatcactaatgccgcaggacaggaagcccgggcgaacatggtcagcctgcaacggcgtgacggtatcattggtacctcctggatcgatggcgaccacatcaatattcagatggagaacaaaatcaatgtgcaggatctgattaaattgcagccaggtgagaactacacggtgtttcagggcgatccggttccgggagcatccttctacatcgagccgcaggacaaaacgtgcaatgcacccgtcattatcaaccgatacatcacgattaacccaccgaaccttaagcaactacgtaaacttgttccacgaacagcgcagcgccgtcttccggctccggagaacgtcagcaaaatcattggtgttctgacagaaaagccctcgcgtcggggtaaagcggcaaaagctgaaccctggaagataatcgatacctttcagcagcgtctggccaatcgccaggaagcgcataatctgatgactgaatatgatacggaccaccatggacgggaagaaaacctctgggaagaagcgctggaggtaatcagaacaaccactatggcggaacgtacaatacggtacatcacgcttaataagccggaatcggaaccgacgcaagtaagcgctgaagaaattcagctcgcaccagatgcgatactgagaacgctgactctcccgcagccggcttatattccgccttccagatatcgaaacgagccatttatctccccgaaactgcctgattcaccacatccggatatggagtggccagagtga

SEQ ID NO: 120866 - DNA, 270 bp, Enterobacter cloacae; identical to SEQ ID NO: 94585

SEQ ID NO: 120867 - DNA, 651 bp, Enterobacter cloacae; identical to SEQ ID NO: 94586

SEQ ID NO: 120868 - DNA, 492 bp, Enterobacter cloacae; identical to SEQ ID NO: 94587

SEQ ID NO: 120869 - DNA, 2700 bp, Enterobacter cloacae; identical to SEQ ID NO: 94588

SEQ ID NO: 120870 - DNA, 336 bp, Enterobacter cloacae; identical to SEQ ID NO: 94589

SEQ ID NO: 120871 - DNA, 309 bp, Enterobacter cloacae; identical to SEQ ID NO: 94590

SEQ ID NO: 120872 - DNA, 567 bp, Enterobacter cloacae
atgcctcactacatatcccgtgcgcctcatggcgtcgcctgtatccgtcttgataacggtgatgaagctctctttgtgaatggagaactgatttcctcatgtacagccagtgaactttatccgcgtattattgcctcagggttgaacctgtcgacggcacttagcttgccatttaaacagcttactgctcaggttcctgataaccctaaatggacatgggaggatgttactgcatcgctaggatggggacagcgtactgaacttaatcacaaaattttgcgttctgttctggaatgtagtctgagccatattacgcggagggatagcgagattctgagcgaactatgtcacgccgagtatgaaagcgaatggatccatgaatccgatctgggttacatcattcgtgttgatgccgtcagttatccgcttctagttctgaaacgtcatggtatttcaaaagcggcgagaatagtgatttacactgccatgataaaggctgacatcagcatggttcattttacttcatggggagaaatgctggcagacgttccgacgtttgaatggtaa

SEQ ID NO: 120873 - DNA, 243 bp, Enterobacter cloacae
atgaaagaccagttcatcgtcgcatgtcgcgaatactttgtaaaggagagggtaaaaacacgtcatccacggaaaatccgtgaaacgttgaaaccagacgctatcgcgccacatctgaaacaactggggacatcacttgtccgttgtgggcgtattcataaaccgatccatactccagcacttaacggggctgaatgggatcacgtcctgagtacacttgagctttcccgcgcgtacacctga

SEQ ID NO: 120874 - DNA, 267 bp, Enterobacter cloacae; identical to SEQ ID NO: 94593

SEQ ID NO: 120875 - DNA, 831 bp, Enterobacter cloacae; identical to SEQ ID NO: 94594

SEQ ID NO: 120876 - DNA, 264 bp, Enterobacter cloacae; identical to SEQ ID NO: 94595

SEQ ID NO: 120877 - DNA, 360 bp, Enterobacter cloacae; identical to SEQ ID NO: 94596

SEQ ID NO: 120878 - DNA, 273 bp, Enterobacter cloacae; identical to SEQ ID NO: 94597

SEQ ID NO: 120879 - DNA, 723 bp, Enterobacter cloacae
gtggccattgccctgcccgtctttctggttcagtccatcacggaactgctgtcaggagaattaaccagcaggaaaccgttcaaaacggtcacggagaggcatacgaagaagccctgcctgaagcacagcttcagcagactaatcacaattgcgtatatgaacaggacaaaccggagggagcagaggggctgcgccggaggcgcgccccgcttccctcgaaccccgcaggggtacggtccgtcccggaagttcaggcgtgcggtcgcgtcgggatggaaaaaggggctaccggcgaaccggcaaccccttcataaaggcgcttcaggcatgtcagagcaactcagccctgaaaaggcggggtttcccccgcctccaggtagcttacttaccggattcgtaggccataaaagccgccacctccctgttcgtgtccctgtaccggatttcgcaaagcgatttccgtgtcaggtaagtgaatatcagcagtgtgagacacactatcaacacacaccagagcagggtacttcgtggcagtttcatagcttacttctcctgtcaacgcaaagcagaagtgtcaccatcggtgcgaaacagagatgtcatgctttggttcagagaatgcgtttgaccgcctcgctatatacttccgagcgttctcttttcccaacagaaatcacgaaaacgacaactttctcgtctataacctggtatacaaggcgatag

SEQ ID NO: 120880 - DNA, 1092 bp, Enterobacter cloacae
gtgggcggcgaaactaagaatattgatgagattgcaggtatcatttccagtagaatttttgatgaattaggctggaaaacccaaaaaacaacggatataagttgggactgttgtttgagatctcatctaaacgctaaacaacttttatctgaaaatccaaaaaaaactcaccctacggatgtagtcttcaaatatagagatccttattcagatataactcagtatatacaaacagatttaaaatcttattgtgccagcacgcttgacggtacaaaatcaatattgagcgctctacgaagtttatcacaacaggtagcttgcgcgccaagaagtcctgagtggcggcgtctatttgttgacagtacaaatgagaaatatcaagttaacggcctactttttatatataatcatgacaataaatatgactctgatttaattgagaaattaaatggagccgccacagcaagttatgattttccagagaactctttgattgcagtttttgacccaactatgatcagatttttactagatgttacagaacacattgagactagaagggggattactgacaaagtaacacaagaaacaaatatgttatggcaaaaaattcctgagatagagaactgcacatatttttaccctgacaagcataataaaatagcaacgaaagggaaaatccttccagccacaattgaaatgataacatctggcatgattttttactcatatgaacacgaatatattagaaatgatgatggcgatagaataagaaataaaatattgaatattttctggaaagaaaaggttgattccagtaatcactttatatttcttttagagtatatatttaactatcaattactcaatcaatttgacaaaatatttgttataactccgttctcatcacactcaagcgttcatttgcaatccgccattaatgattacataggcatatattctttcactcaatctcatatcgaaacgttaagggaaaaaatagtatccattccttttgttaatcaaaagctatctatatttgagtaccaagttgccagcaagcaggtgaatagaaaatgtcacttttcataa

SEQ ID NO: 120881 - DNA, 1248 bp, Enterobacter cloacae
atgaataaatatcaagccacgttgttttcaaacgaaagtgacatttatactgccctccactctaacagtgcaaaaatcacagatgttacattaaggaagatcgccttcaatcgagggataattttcccatctgacttatcaaaagaggtattgatagaaaaaatatcagacctgccattttcatataatcacatcagagaagtacaagataaactggcaaccaaacccagccaagacgtcttctcagtaaaacgtatatatgaagaatttgatatagagaaactctatgacgttgtaaacaaagtgaaagaaaatagacccaagttgctagggcatgagaaaattgatcattactcagggttgcaaacctaccatatatctattgattacactgaatttgattttagaaggggtaaatttcagcagaaaaaattgtacagtgggagtataattttcatagtaaaaaaaggatatgtttcagtgagatataactatacaccacgcatttcagaaattctcaagcaaataattgatacatattcatcaacggtttgtaacaacataattgtcaacgaaatagatttatcaagcatcgttgatactgatcttaggaacattttcgctgttcatctttatgattttgatggaaattataaaaaaacaggacttgaatatgctggtcttgaaaaggttagagtaagcagaataaaaacatctctggatattaatggagataatcttgaaggaaatgctaacgaagaaacacaagaattattaaacaagatttcaccttctacagataacgaaaatgatgatgacattaataatcaggaaatggcatctgacgatgatgaaaacctaacttttaacattaataatgccgcgtatgatggcctatcattagtgaacgctcctcaaattaaggagctgtgcagtgatgggttttatagaagcttaattcgatggaagtcattttcctcagttgttaagaaccatactataacttttgaacttagttttgatgataaatatcttggaaaaaatataaaattcagagcgttatacaaagaaagcaactctgcatccgcagagagagaaaaactcagtgacgcagactttgatcaagtcatgaaacaattagaagaaaaaatatttttgattaatgactttattatcgaagagcataccaagcgatacccagtaacgaaagctatgtcttgcgagactttgaatcaggaggctggatga

SEQ ID NO: 120882 - DNA, 648 bp, Enterobacter cloacae
atgatgataaaggtaaaaatttataaagcagaaaaagatataactaaaagtgagttattacacaaagtaaatgacaacctctatgatgaagataaaggatatggttttcaaatcattaataactctgaagtgcttgaactaagatttaccatgagaagcattagtaagcaaagcttagaatatgctaatggcgagcattcagaggttgaaatagcaacttacttaaatgtggactttggcgtcagacaagggaaaaaaattatactatatgccactaaccctccattaagtatgaaaatgccttatactatggtgcaaaaactatttggtgaagatagtggattgagaccagtagaatttgatctgaggaaagttgtaaatggtctttctgagggctttgacctcaagataaaatccatgtctctatctaatatctctgttgatccttttactttagcaaagacaaaaatagtaagctcaaagaatctccaagaaatttatcagaataaatatatgaatagctcggccgtttttgattccgtacatttcttcgttaacggaattgaaacggaattatctaggacgggtagattccgtgtgagagagagtcaacttccaacacttttatccatcttagaaactctctga

SEQ ID NO: 120883 - DNA, 996 bp, Enterobacter cloacae
atggtagaggagggcatatggcgcgaacgtcgtcgtaagtttgcccgaatttatcagcgccggatgcggcgcccatcctacggtgaactcatccagattgatggctcgcctcatgactggtttgaaggtcggggccccaaatgcacactgatagtctttatcgatgatgctaccagcgctctgatggcgctacgattcgctcctgcagaaacaacccgggcttacatggaaaccctccggggttaccttaatgatcatggcgtaccactggctctctattctgacagacacagtatattcagagtaaataacccggagcgggaaggagagttgactcagttcacacgtgcgataaagacactgggcatcgagccaatccatgccaacagcccgcaggcaaaagggcgggtagagcgtgccaatcagacactgcaggacaggctggtcaaagaaatgcggcttcagggtatcagtgatattgaaacagcaaacgcatggttgccgacctttattgaagcctataacaaccggtttgctacgccgcctcgtattgctgataacgcccatcttgatgtacaccattctgaagaggaactgggttatatcttcagcctccaggcgaagcgcgttctctccaaaaatctcactttccagtacaaaagcagtgcgtttcagattcgcagtgaaggccggggatatcgacttcggcattcggttgtcacggtatgcgaaagctttaacggtgaaattaaggttctgtatgatgggaaagcgttgggatgggaaaaatatgttgatggcccggagcctataccattggatgatgaaaaaagtgtccatgaacgtgtggataatgcccgttttgatttacgctcaaaattctacgtaaaacctaaagctgaccatccttggctcacgcgccgcacgcaaagtaatcagcaagtgaagccccctaaattacccagaaagaaggctgatcccgataaaatggactga

SEQ ID NO: 120884 - DNA, 231 bp, Enterobacter cloacae; identical to SEQ ID NO: 94599

SEQ ID NO: 120885 - DNA, 732 bp, Enterobacter cloacae; identical to SEQ ID NO: 94600

SEQ ID NO: 120886 - DNA, 423 bp, Enterobacter cloacae
atgaatatgccaaactttaagctctcctccatgatcggtgaagatttcgaaacctgccgcgccgctggttactcctaccgccgtgagatgacacacgctgttatgggggcactgagtgcgcctgaaaactgggatgttaacggggagtatcgtagcgagttcgggggcttatttcccgtgcagatccgtttttcgcccactcatggccgatttgaagtggttctgtgtagtcctggtgagtttagtcaggactggatcatgctgttggtctggagaaaagggcaggaagtatcctgtatccgctcatgcccacaatttgacgctgctgtgataaaccatgtgctgagcctgaccagcaggctggacagtgatggatactcaatattcgatattctctcaacgctgcgcatggaggtggcctga

SEQ ID NO: 120887 - DNA, 1986 bp, Enterobacter cloacae
atgacagttgcagatgttaaatcaaaagcaccaaaaaaaaccagtaagaataaaactgccggaaacgaggcgctgaaagctgccctcgatgcggcagtcattgaatatgttccgctgaccgatctcattaaatcaccgctgaacgtgcgcacgattccctacaccaccgagagcgttaagcgactggctaactccattgaaagcctcggactgcttcacaatctggttgtccatgccctgcccgagggaaaatacggtgtggcagcaggtggtcggcgtctgactacgctgacgctcatgtctgaaatggggcgtatcaaaccggattatcaggttccggttaaacgtgtcagcgacgagcttgctgttgaggcttcttacgccgagaacaacgagcttgaaaccatgcaccctgccgagcagatcacagcgtttggtacgctggcggcacagggaaaaacccccgcgcagattggtgaggtgcttgggtacggttcccgccacgtccagcgcatgctcaaacttgccagtcttgcaccgtcactgcttgcacttctggcagaaggtcagcttgatgttgaacagtgtcaggtgttgtgtcttgaaagcgatcctgagcgtcaggttgctgtttacgaaagcgtaaaggaggaatggggacgcactaccgtaaacgcacttaaaaatcgtattacggaacgtgaaatttctgtctcgcatccacgtttcgcatttatcgggcgggaagtttatgaagccgcaggcggaattgtccgtgaagatctgttcagtgagcaggaaggggacggaacagtagacagtctgcttgttgaacgtctggtactggaaaaacttgaattgatcgctcaggaaatccatcaaaaagagggctggatgtggggtaccggacgtctggctgcaattaacctttacggacctgacggaaaggactaccgcattctgccggagccagatgcaatctacagcgaagatgacagccgccgtatcgatgaactgtccgacaaatttaacgctctggatcctgacagtgatgaagccgaggtcattagcagcgaaatatccctcattgaacatgccgctgagcttcgtgggtggacaaaagatctaaaagcaaaatcaggcgtggtagtgagcttcatgcacggtgcgcttcgtattcagcgtggtatatgccgcatgtctgatttacctgaccatgacagtaacggggaggattccgcgcagtctcctgccgtgactcatatgcatcgacctgatgcagcagaagggatcagcatcccgctgctcaccaaaatgtcatccgagcgcactctggcggtacaggccgcgctgatgcagcaacctgaaaaggctgtggcgcttatggtctggcgtatgtgtacctgcgtctttgctggatgtgtgaccacgccgcatccgttccgtatcaacctgaccgtttctcacagcagcctcactgagaacgccccgtccggtaaagaaggcgcagcgtttgaagtcctgatgaccgaaaaagagcgcctgaaaaccctgctgccagcaggatgggagaaggacttcacgaccttcttcgccctgaacggagaggtactgatgtcattgctggccttctgtgcggcttgttccgtagatggtgtacagacgcgtgataatggacacacatcacgcagccctctcgatacggttgaggccgcgataggttttcaccttcgcgactggtggcagcctacaaaagagaactacttcggtagcctgaaacattcacagatagtcacttcacttaaagatgcaggtctgactggtgccgctgctgacgcagaaaaaatgaagaaaggcgacgcggcagtgcatgcggagttctttatgaagcagaaccgttgggttcctgcatggttacagtcaccgcagcctgatgcaaaagacagcaccgataccgacactgacaacgcggcaattgccgcttga

SEQ ID NO: 120888 - DNA, 330 bp, Enterobacter cloacae
gtgggaaaaacattacaggaatttctgaatcagccagtgctgctgcgcgaacccaccgccgaagaaaacgaactggcggctctattgaatggcagtaccgtcactgcacccgtggtgctgcctcaggggccgtttacccgtgaagaggcgaccgctctggtggcgcagtacaccaacgtcagtattgagaacgatcagggtacttattttcagcttgttgtgcggggtgaggaagggtttttgacgaagtgcgcgtggaactttgagaacgacgtgggggcattgcttaaccgcgcccttgccagttacagagccagaaaacagcagtaa

SEQ ID NO: 120889 - DNA, 255 bp, Enterobacter cloacae
atgagcgaatttaatctttcggtacgttcaaaagaggatcaggacaggatcgccgtagacctggccgcgtcaggtgtggcatttaaagagcggctaaatcagccagtggtgccggaaattgtggcacgagaggtgcctgaagagcttcgcgaatattttctggaaaggttgcgccattaccgccagcttagccagcagttgccgaaagccagcgatccacaatattcagaaatggctgaggcaaataaaaagtaa

SEQ ID NO: 120890 - DNA, 192 bp, Enterobacter cloacae
atgaaacttgatccacagacccgtgacatcctgcgtcagtacaaaaatattattaacgcccgccgacgtgaaaatggtcaacgggaattaagaacggagcaggtgatcgacgaaatatgctattacatgacctgccagcgtgcggtgtatatcggcggtcatttcattttgcagggtggaaaaggtaactga

SEQ ID NO: 120891 - DNA, 501 bp, Enterobacter cloacae
atgaacactaccaccccggcgatttatgtaggtacataccacaaatacaactgcggtagcctctacggtaaatggtttgacctcaccgactttgatgataaagcagagtttctggaagcctgctacgatctgcactccaatgaatccgacccggaactcatgttccaggactgggaagggatcccgtcagcatttgcatccgaatcttccgttgactggaatttcattgaagcctacaagcgcgcagtagaggacggtatggatgctgcatttattgcctgggtggaatactccggagagtgtgattataaggccttcgaggatgcttattgcggagaagctgagagcgaagaagactacgcctggacaatggcagaagagtgcggccttctcaacgacattccggaatcgctgcgttgctatttcgatatgggagcctgggcgcgggatttgttcctggatggtctggtatttctggatggctacgtgttcaacggttga

SEQ ID NO: 120892 - DNA, 780 bp, Enterobacter cloacae
atgaccattgcttaccgctttatgcaccgtcatacccgaaacacactcgtagcccgcggctggccagccaacatggatatcgatacaagcctgaattactccagaggagaaggcgttgccttctatggccagctcgatgctttacagttgcagcgtctgttacctgagattgcactgcgtggtttgatgtccgatcaggcaatgaaggtgctgctgccattactggcaggaagtgaactgattgtccgcctttatcgtaattcgctggggcatcgtaaggctcatgccggaaccatttcgcttgaatatgataattgccctgagggtatgtccacgaaacatatcctctgtctgctgaaagccctgcgtgatgagattaaccacgtctgtagctgcgtggcatccgccggataccgcctgatggaagccttgcgccccgccgctaaaccgctggtatttacccgccgaacccgtaatttcctcctgacagtaacggaagtggagcaggtgcaggatgatgcgcagtgggataatgagacgctcgacgcgcgtcttaaagcggtactcgacgggaaggaaacctttcgccgtctgcaaatccgtctggaatgcaatggccgtacagtcgggcagacccacgtgccttatgcccttcgtcaccctgacagcccatcccgcgactggtttgacagacactggctgcgggatgtggtcagcagcgcacgaaccgagattgacgcgatgatgaaatccttctccggcatccggattgccgcctga

SEQ ID NO: 120893 - DNA, 423 bp, Enterobacter cloacae
atgtacggaacccgcgaagaactttgtttacagcttgaaaacatgttcacgtctgacgaacccctggtcctgctggtctggacggaagagtggattagcgtggcctgccgtgaaacccagccagaaccggacgaggctgaaatccgggcggtgatgaaggcgcttggtgaaatgaaaatgacgcaataccgccaggagggggtaaataatctgactgtcagcgatctactgacccatcagcgggaagcggcaaaccgtcaggtgagtgtaccggcagctttacttgcacgcgtcctgcgcgactatgagtgtgagctggagcatcgcgctggaatggcctgggaggccgggcggcctgaacccgattccgtaaaggaagcaaggaatgacgtctacgcactgaaagacgcgctggtagcctga

SEQ ID NO: 120894 - DNA, 222 bp, Enterobacter cloacae
atgaactacccgggccttgaatccctgcgcgcggacgtggccgcgctcagcaatgccatgtgtgacgtgcggatgctgctgaaccgcctcgaatcgcagcaccggcacgatgcggcaacgctggctgaacgtatggccgcccagacccttcgccggatcaattccctgcttctggaagcctaccgggaagccctggtgctggacgagacctttcaggactga

SEQ ID NO: 120895 - DNA, 693 bp, Enterobacter cloacae
atgtcccgttatatcctgggtgactgcgtgcaggtgatgtcccgtttcccggcacgtgccgtcgattttattcttaccgatcccccgtatctggttggctttaaggaccgtaccggccgcactctggccggggacaattcgtcggaatggcttcagccagcgtgccacgaaatgtaccgcgtactaaaaaacgacagtctgatggtgagcttttacgcatggaaccgcgcagatctgtttctcaatgcgtggaaatcggccgggttccgcgttgttggccatatcgtttttgcgaagagttatgcctccaaatcaacgttcgtgggctacacccatgaaaacgcttacctgctcgcgaaggggcgaccgcaaaccccggaccgtcccatcccggacgtgatcccctggaaatacacgggcaacagacaccatccgacggaaaagccggtgcagagcctgcgaccactgatcgaatcgctcactcgtccgggggccattgtccttgaccccttcgctggcagcggttccacctgcgtggccgccgccgaagccagccgccgctatatcgggatcgagatgcttgagcagtaccacgccgccggcgttcgccgtctggcacaggttgaacgggcgagaaggatgccagcggccaatgacggtacgttttaccctgattatccggaggcggcatga

SEQ ID NO: 120896 - DNA, 468 bp, Enterobacter cloacae
atgttcagactgacctgtattgaactcaataacggcgcattcgccgtgtatatcaacaaccattatctgtggagtgaggatgccagcggggaacgactctacctgggtgaggtgctggagcagctttccctgatgccgggtgtagaaacctgcactattcacgaggcagttccggaggacgaagaatggtgctggaatgacattgccgatcgcgtgttgccgtcgctatcctccagccgcgagggtgtcaccgtggcagctctcatcgcgcggttacagcagtatccgccggacgcactgtgtatgggaacgttctggctggctgatgattttctgtcgctcgatggcagtctgtcggaggaggaaattgcggaagccatgcgtgtctgttatcgcagccacgatgccggcatcggttttaactgggacacactgcagttcgctatcgaccacgtaaaggggcgctga

SEQ ID NO: 120897 - DNA, 582 bp, Enterobacter cloacae
atgactgataacagcatccccgtagactttaattccagagacgcattttcccattttaaagaatgtttaaggttagaagtcataaaccggaatggagaaaagaaattttcatggtttaaggtctttcaccgtgtgctttttagccataaaaagagattttactattggtggcgacttgctaattacatgaatcagacaccgtccagacgatatcagaagtgggcaaggaagataaatgctaatctgcgttgcaaatatggtgctgacattagtatcgaagcgcaaatcggtgaaggcatgaaactcaatcactatgtatgtatagttatccgttctgaatgtaagatagggaaaaatgcaaatattcgtcagaacacgacgattggaaggaaaacgtccaatgatgtaatcggcatgactgtaattggggataatgtagatattggtgctcattcttgcatcataggtgatatccatattggacataacgtaacaataggtgcaatgacatttgttaacaaagatgttcccgacaactcaattatctacaacccagttacatcggtaataaaaaccaaataa

SEQ ID NO: 120898 - DNA, 774 bp, Enterobacter cloacae
atgaatctatatgcacttctgactgcaacccgtgtatgccagatactggacaatcacggctggcctgctcttacagttaatgtcgaggagaatggctggatgatgaccatgaaaactacaatgaccacggatgcccttgtgaaattaatttcggcaatgattgagcggggccgtatcggcaaagaggcgatggctggtttaactctgttgtgcgataaaaatttggtggaggcaaccatcagtgcggaagtttgtggtcgcgacatttccattgaggtcaatttatcaggtatccctgagtctcagtgcctgtgccatgattacctgaaaatggtccttgaagatgatctgcgggttatctgcggcgacgtgtggcgggatgcagaaactattctgctgcatactggtgcccgttatgagggatctcatgtttttgaacgtacgagccggaattttatcgtcgcagcggaagtgttgccggaacttcctccaatgtaccgcccaggcgagttgctgctgcaggcatggctaacagaaattctggtatatagctctgatgtcctgacgatcggcctcgttgtatatcgtgattatggtatggtccggatgagcgaattctgtctgcctgaagtctgcgttattcgtcccaactcactcgtcaggcactggctgaaccgtcatcacgtcaccactgtaacaggtatggcacgtaaccttattgcacttgagaagaaaatttattcgagttttgtccataaacgcaaaataaattga

SEQ ID NO: 120899 - DNA, 429 bp, Enterobacter cloacae
atgtttgaattattgcgtgttgattgcgaaccggaaattatacccatccctctttatagcgagaggtgcccggcggggttcccgtccccggcgcaggactatgtcgaagccgaacttgacctcaatgattactgtatatccagacccagctcgacatactttgtgcgagctattggtaattccatgactgatattgggctacattctggcgatctgctgattgttgataaggccgaaaaggcacaccacggcgatatcgttatagctgagattgagggtgaatttactgttaaacgattactgttgaaaccgagaccagggttacaggcaatgaatccagcctaccccactctatggccagagcctgagcagctacaaattttcggggtcgtaactgcctttgtacacaaaacccggggacatgactga

SEQ ID NO: 120900 - DNA, 1272 bp, Enterobacter cloacae
atgttcgccctggcagatgtgaacagcttctatgcgagctgtgagaaggtctttcgtcctgacttacgtgataaaccagtggtcgttcttagcaataatgatggttgtgtaatagccagatcgaaggaagcgaagcggcttgggatcaaaatggggatcccctggttccagctgaaggcaatgcagttcccggagaaaatccttacgttttccagcaattatgagctttacgcgagtctgagtaaccgggtcatggcacatctggaagaactggcaccccgcgttgagcagtatagcatcgacgagatgttcctggacattcgcggcatcgatggctgtactgactttgaagatttcgcaagacagctgcgcgagcacgtcctaatcggaaccggactgacaattggcgtcgggatgggcccaacaaaaacactcgcaaaatcagcacaatgggcttctaaggagtggcctcaatttgggggagtgctggctctgaccactgacaatctccgtaggacggaaaaactgctctcacttcagccggtggaggaaatttggggggttggtcgacgcataggtaaaaagctgaatacatacggcgttacgactgcactgcagctggcgcgcatgaaccctgcgtttatacgcaagaactttaccgtggtgctggagcgaacagtacgcgagctgaacggtgaggcctgtatatctcttgaagaagcaccgcccgcgaagcagcagattgtctgcagccgatcattcggggagcgcatcacgacttacgacgcgttacggcaggctatctgccagtactccgaacgcgcggctgaaaagctgcgcggagagcatcagttctgccggcacatttcggtctttatcaaaacctccccttttgcagtcaacgaagcgtattacggaaacgtggccagcgaaaagctactcgtacctacccgcgacacccgggacatcattaatgcggcagtaaaagccctggaccgtatctggctcgacgggcatagatatgcaaaggctggcgtaatgctgaatgacttcacccctacgggagtagcacagttaaatcttttcgatgacgctaagccgcaggaacgaagcgaggagctaatgaaagccctggatggcataaaccattcagggctcgggaggatatggtttgctggtcgtggaattgcaccagaatggcaaatgaaaagagagatgctttctccggcatacactaccaggtggtccgatatccccagagcctcaatttga

SEQ ID NO: 120901 - DNA, 390 bp, Enterobacter cloacae
gtgagcgaggaacggaagaagttaacggtttatcttcatccggaccaggtggcggataatgtgtctttagacattattgactctgtcccacggaacgatagaggggatttatataggaaagcgcttatctccggcttagcacttcaccacctcgacccgcggcttcctggcttactagcactgttgttggataagagtttcactgctgatagcctggtgggtttactcagtcagacaacgggatggaagccatcccaggccaatattcgtgatgtgcttgcagaactgggggctgggacatttgattctgcaaccaagcctgaaatcgttgaagatgatgagaagcggcgactggaagaggcccggatcaaactgaaaggcctcttctga

SEQ ID NO: 120902 - DNA, 972 bp, Enterobacter cloacae
atgaaagtgtattgtgatgatggttcaacaactgtaaaacttgcatggctcaacaataagaaactttataagtcattgtcatctaactcttttcgtcaggggtggaaggtggaaggtatgggcgtacgtcagaccttcaactatgagcttgaaggtaaaaaatacacctatgacgaagtcagtaatgaatccattcttactactcatattgagtatcaatataccgatgtaaaccttctggcggttcaccatgcacttcttaacagcgggcttaaacctcagcctgtctcactgactgtgaccttgcctatcagtgagttctacaccagggattgtcagaagaatgagctgaatattcagaggaaaatcgacaacctgatgcgtccggtcaaattgaataaaggcgaggtgtttaccattgagcacgtcgaagtcatgcctgaatccttgcctgccgtatttgaacgccttgtgaaagacaatgtagggcagtacgaaaagtccctggtgattgatctcggggggacaactctcgacgttggcgttatcgttggccagttcgactctgtcagcgcgatacatggaaactctgatatcggcgtatcgctggtaacgaacgctgcactcacggcgttaaaaatggcatccagcaacacgagcgctatggtcgccgatgaacttatcaaacagcgtacaaacgctgacttcgtccgtcaggttattaacgatgaaagcaagacagcactggtgttggataccatcgatagcgcgatcgctacactgggtgcccaggtggtcgatgacctggcaggattcaaggacgttaaccgggtttatattgttggtggcggtgcgccactgatcgaggatgctgttaaagctgcatggcatcatctgggctcgaaggttgtcatgatggattcgccgcaaacatcactcgttgaagccatcgctgcatttaaaggggaataa

SEQ ID NO: 120903 - DNA, 639 bp, Enterobacter cloacae
atgattactgtcgtaggtggaaacaaaggcggctcaggtaaaactacaacggcgtcaaacttagcaatagctctagcccatgagggccacgacgtatgcctgttaaatggagacttacaacggacggccgctaaacatcatgctgaacgtgaagcatcgggaatagagccaacattcacgctcatcgaaaaattcgataatctgacacagacccttcgaggattagacgaaaaatatgatcatgtaatcgtggatgtagctggcaggaactcaagagaattcattactagtggcgtcgtcgcagatcagatcattgcaccattacaatgctcacagcccgaccttgatacattgacagaacttgctcagcaaattgaagctatgcgagatctcaaccctgagttaaaagtctattgcttacaaagcatggcgactacgaacccagtgctaagaggaaatgagcggaaggagtttctggagtacctggaagagtttccaactattgaaacgctgcaaacagtaatctgtttccgcaaggtctatcgagattgcatgagcaacggaactggtgtcgtagaaacgaataatgaagcggcgaaagcagaaataatgcaattaatgaaagaggtattcggataa

SEQ ID NO: 120904 - DNA, 279 bp, Enterobacter cloacae
atggttaaaaagccgagccagcaagcgactaccagaacaggtgtcacggcagaacaagctgaagccctcgcgcagcgccttgcagataagccctacggagcaccagaaaaaccggaacctgaaaaacagtgccgcacgacaatctcgttaggggagtcaatgttagtgaaggtcgaagatatagcactgcggaacaagcgtaacgggaaggatcctaaaaacgtcagtgcaatagtcagagaagcccttgagctgtactttcagaaaactggcggataa

SEQ ID NO: 120905 - DNA, 348 bp, Enterobacter cloacae
atgataacagatcatctgaacactccacatgcaaacgagggcgccgatgacgtcattgccttactgaaactgtgccagcagctgcagtcagaaaaggacggcagggtacggccggagcccggggcttattcccgcgatgaggatgcgtttgccgatcgtatccgcacagcgtgcggtcatgccctgcagcttcgccggctgctgccggtgatgacgaccctgagcgccatcggcgccgagatggaacgccggggagaaatcagtgtgctcccgggcgaggattacgcgcagaaagcactgtctcgacttacagagcaatacctgtccggcaggggcaacaagcaatga

SEQ ID NO: 120906 - DNA, 732 bp, Enterobacter cloacae
atggctgactggtttattgcgaccgaaggcgtgaaggtggtgaaggacggcgccagtctggcacctcaaatcatcacggcagtaacgtcgattggcgcggccctcgggggcgtcgcgctgacgcattacttcacccgcaagcgtgaggaaagagcggcagaagcgaaacaggccagtgaacgactttttattgccacagagcttgtctttttgctcgaacaatttgccgaagcctgcgccggggtcgcaaccgatcatggctactcaaatcaggacaggattaccgtaccggaaaccactgttccgaatctcagttactccgcagtcacaggcgactggcgggttttaccggcgaagctgatgtaccacatccgggaattgccggttattcagggagaggccgatcgcgccatcgccgctgctgaagcttaccctcctgattacgacgaattttttgaggcacggcagtaccagtacacccgcctcggcctcaaagccatcatccagtcgcgccgtttgcgacagttcgcaggcttacctgacactcgcctcgatgcttctccctggtcggcgcagaatgtgctctggaaggagtggcgtcttgaaagaaagcggcgacatgcgcatgcggtgctgatggctcagtctctggcgacgttcagaattgtgaataagctgcgagatgacaagaggaaaggccctcaagccgttgaaggtgataatgaggaataa

SEQ ID NO: 120907 - DNA, 330 bp, Enterobacter cloacae
atgtgtgatttatgcagggcggacgggaattacttccatacgccggaatgtgtgtatgaccagctggtcagtgagtaccccgtgatgtggctgcgggactcgacccggatcggcgcctgctacaccctccgtgagctgctgtcgccggaagggatggtgctggccatacagaacacgcctcccgagacgggatggcgcctgcgcatgcggtataacgaggccactgacgaagtgattaacccgcagtgcggggactgtatcgagctgccctccagggcggacgccatgcgggcctttgagccgttccgtggtagcgcggcgtcagtatga

SEQ ID NO: 120908 - DNA, 330 bp, Enterobacter cloacae
gtgcttatcaagaaaattataaatgtgggcattattgtgtccctgactgtcgcgggagttagtctttaccgctacctgcaggaacgcggtgacggtaagggcattgtttcctgctccctgccgacgggcaacattgagatcatcccccgcgatggtcgcctgaatgcggtgaacacggaaaccggcatgaagctcggggtccctgagcgctggccggacgggcagatcatgatcacggcgaacggtggccggatgattaacgccacagcctgtcttggtcagcacagcagctggtttgcggtgaaggagcctgctactcaggcccggtag

SEQ ID NO: 120909 - DNA, 180 bp, Enterobacter cloacae
atgggaaccggaaaaataaaaatcagcttcattgcgccgataatcacggtgttctgtatcacctgccagaaaacaggggatgacatcagcgtggcaaaatactgcatcccgacccagatattcggcgggataatacggtactgctcaaacgcaattttggtttcccaaatgggtaaatag

SEQ ID NO: 120910 - DNA, 1236 bp, Enterobacter cloacae
atgctcaataaagaacggcattatgcaattttgacctggcttaacaggtacgaacgggcgacggtgaatcagcttgcgaaagtatttaacgtcaccagggaaacgattcgcagcgacctgaacttattagcgcaggaaggcggcattgagcgatgccacggtggggcaattatcaaacgccgtatttttcatacccaatcagtcaataatttagatagcaatatcattcatttttttgactccgcgcagtcaagaaaaacgatcaaatcccgacataaagggcgaaagatgaaaggtaaagtctgtattctgggttcattcaacgttgatattattgctaatgtcgatcgtttcccgcaaagcggagaatctattttctccgaaaataccattattggacccggcggcaaaggcgccaatcaggcgctggccgtaagcaaatgcaatgttaaaacccattttgtcggtaaggtgggtaacgatcagtttagtcagatggcctttgaacatctttcatcttctgctatcgacagcttcacgctttatcaggataaagatcagaaaaccggcaccgcgcttatttatgtttgtcaaagtgatggtgaaaatatgattgccatcagccctggggccaatcggtccattacagccgatgaagttgaagcgattacccctgaagtgaaaaactcagatatttttttaacccagctggaaaataatctacccgctacctttcgggccattgaaattgcccgccgtaacgggattaaggtggttttgaaccctgccccctggtcatctgatgtggttagctgcctgaagaacgtggactttctgaccccaaacgagactgaggcctcattgctgtccggcattcatatcgtggaccttgccagcgcgaaggaagccgccagagccattaaagcgaaaggggtaggtcacgtcatcatcaccatgggagcgaaaggcgcgcttatttatgacggtgagcaatttattcatatcccggcgctgaaagccgtatgtgtggataccaccggtgctggcgatgccttcaacggcgcattcgccgccgcgatggcgaaaggggaatccattattcaggcagcaaaatttgcctgtgctttcgcctctttggccgtcgaaaaagaaggcgcatcaaatatgcctgaatataaagatgtcctgacccgcctcgcgcaatacgataaaaacattctcaccgagaaaatttaa

SEQ ID NO: 120911 - DNA, 1473 bp, Enterobacter cloacae; identical to SEQ ID NO: 120198

SEQ ID NO: 120912 - DNA, 915 bp, Enterobacter cloacae; identical to SEQ ID NO: 120199

SEQ ID NO: 120913 - DNA, 936 bp, Enterobacter cloacae
atgccaactgttgtttcgctgttttcaggatgtggtggttcagatgcgggcgtgttaaacgccggttttaacgtacttatggctaatgacatcttgccttacgcgcgtgatgtctatctcgcgaaccatccagagactgactacgtattaggcgatgtcggtggcataactacttttccaactgccgatctcctggtaggttgctacccatgtcaaggctttagccaagggggggttcgtaaagcagaccggaagattaacactctttatctggagtttgcacgagcactgagagcgataaagccaaaggcgttcattgtagaaaatgtatccgggatggtaaggagcaactttgaacatttattaaaagatcagtttaaagtctttgctgaggctggttataaagtgaagtcacagattttgaatgcttcacattttggtgttgcacagaatcgtaagcgtatttttattgttggtatacacgagagttttgggacagagtatacgttcccacaagcatctttcggcgaaggtttgaagccatataccactatcaaggatgcaattggtgatctgcctgaatggccgactggtgaattctatgatactgattttcattggtattatatgtcacgaaatcgtcgtcaaggatgggaccagatatctaagacgattgtcgctaaccctaggcacatgcctctccatccagtaagtccagagttagaaaaagttgggcctgatgcatggcgtttcgtaagtgacgaacgagccaggcgttttagtttccgtgaagcggctcgtctgcaaggatttggagacattttgttcccggaaacagaacgagcatcaatgaatatgaagtatacagtgattggaaatgctgtaccgcctcctttgtttgaggcggtagcaagggctattccagatatctggtaa

SEQ ID NO: 120914 - DNA, 927 bp, Enterobacter cloacae
atgctgttcaatttggaatcattaccctcaaacgatgagtttttttgggcggattttcttgagattcgagcattggtccacccagataaaaggttcaatcgcggtgagttagatagtgttatgcgcagccaacctgagggatatacgagagagcaatctcaggagaaatggcgtttagccattgattttataattcaaagacaagtcatttttgggaatagttatccttttcatgtaagtgatgatatggatgaagttattcttaatgaaactgatttgaatggtttgagttcattacagcatatgtatttatccttattgctgtgcgccaacattaaatatattcctaagcgtagaagggctgaagttacacgttcttttgaagtgatcagcttgcccatctttagttctttaatgccccgaggcgttcaagtagtccccaactgggcaggcggcggtgaagaagcgaggtatcgtggttcattgtttgagaaataccaagcaatagcaaatgatattagatgtaccgcagttggtcttagagagcgcgatttcaaacctggtgaccacggtgacggtgggttagatattattgcctggcatcccatgggtgatgatcgcgatgccatacctattgcatttgtacagtgtggatgctctcaaaaagaatgggttgctaagcaattagaggcttcgtatgcaaaacttggatctcgtatccccgttacgcacccttgggctacttactatttcctcccacaagatttgaggtggatggatggtgattgggcttacaaagcagatataggaaatgcgatttttgtagaccggctacgtttgattaacctggcaagagagaatgagttgatagaaaactttcctctccagccttacgtctcagaaacctttgatatggcttatcgataa

SEQ ID NO: 120915 - DNA, 1080 bp, Enterobacter cloacae
atgtcgcagcctagaaacatagaatttattcagacgcaattactttcattcgacccgaagaacccaagattttaccgcttgaacgacgcaagtagtgatgaagccgtcgttgaagaaatgcttgatgatgagagcgttcatgatttgatgctttcaattgggcaacaaggttactttcctggcgaaccccttttagtgttcatggatggcactgactatgtcgttgcagaaggtaaccgcaggcttgccgcagtaaaattgctgaacggtgagctaagtgcgccagcgcgtaaaagcaaaagtgttgaggatattaaaagcgatacttctaacaaaccaattgaacttccctgcctggtatatcagaccagagaggaagtgttacgctacatcggttaccggcatataacgggtgtaaaagaatgggattccctttctaaggctaagtatcttaaagaactatgtgaagagttctataaatctgtttctaaggatgagctccttaaaaatcttgcgagagagattggtagtaaacctcattatgtaggtgcattgcttaccgctttaatgctctatgaaaaagcacaagaaaagggtttttatgggctaaaaatggatgagaatgatgtagagttttcctacattactacatcccttggttatacaaacattactgaatggctcggacttgaggataaaaaagattttgatagcggcgatattgatgaagaaaacttaaaaaatctttttgcgtggtgttttgttcgtgaccaacagggacggactattattagagagtcccgaagactaaaagatatagctaaaattgtcgataatgacgatgcagtcaataacctgaaagaaacaggagatattgaccaagcctatttgtatacaaacggacaacaggaggcgttggaagaatctatgcaggctgcttctgcgagacttcgtgttgtgtggaatatgcttctgaagcttgattcgtttagtgccgatgacgaagagtccgccaatcaaatgtttgaaatggccaagaaaatccgctcccatattagaagcgtgcgagaggatgattaa

SEQ ID NO: 120916 - DNA, 1065 bp, Enterobacter cloacae
atgccattaatcacacgcaatgtatttattgatactgagtttttcgttaaagccaatctcgattttggctcaaggacgataaaatcctttgaagaactttgtgaaaaaggtgagcttcatcacatcacgaccactattgttatcaaagaaattgagagaaaaataaaagagcatattaaggaagcactgaaaggaataaaaaactttcgtcgtaaagctatagtattgagagagtatgaagatgataacattcaaaacctttttaaagatattaatgataatgacatagaagccaaagctctggaggcctttagtaacctcatcgaaaattctgaaacttcaatactagatatgaagaatgtagacctaaatgaagtaattgaaatgcatttcaatgaaatcagtccatttagtgctaaaaagcccaatgaatttcgtgacgcctttacattactggcgttacgggcggcattaaacgagggagagaagatttatgttatatctgacgaccccgaccacaaaaatttttgtgatgaaaataatgacttcataaacgtagacacgctaagctccttgctggatatttataacaaacacaatgatgacagagcgaagtttgttgcggaatttttagaaaccaaacgcgatgtaattaaagcagaacttaaaacgcaactagatgatgcagaggcatataatagctcttcatgggaagattcagaagttgatagttttgaagttactgaaatatccgacttcgagcctcaaatcattcatctggatgatgagagctgccaaattcacttcgatgtcaccgttaagttcacagttgaaaccactggtcccgacactgcaaatggttattatgacaaagaggacggtgtgctttatacgttcgaatctattactaagcaagatgagcaagaaaaggaattttcagtagacattgacttgaactttgaaagggatggtgaaaaattcattaatgacgtatttgacatacatgtcaaaggccttagttctggaattgaatttgatattgaagaaaacacatttgacttctga

SEQ ID NO: 120917 - DNA, 180 bp, Enterobacter cloacae
atgtcaaccatagaaattaaagccaaaggtaacaagcagatcgcattacgcgtagaaccaaacctagaagaaggaattaaacaggctctggcgcaagatggtgacgcttctgtatcagcatggataaagcgaataatccgcaaagagttacagcagcgaggcattgagccgaaaagctga

SEQ ID NO: 120918 - DNA, 444 bp, Enterobacter cloacae
atgagtattcccgggcaaccatcctcacctgaaaagatgacaaagaaagagcgaaaaaaacacgagctcagccagatgctgaaaaaagtgtgttcccgctggcccgggctgtggccagaatggaaaaaacggaagttccgtccagtagctcttggcgtgggtcaggagatgcatgaccagctgaaggcgaatcccgatcctgacctgacccatcaggatattgccagggttatgttttatgtcacgggaagtctgagttacctggagcaggttaaagcaggttcctaccgctataacctggacggccaccccgtccagcaagtgacggcagagggcgagaaatactctcttctgcgtatcaaggaaacgcatcagcgtataaaagcgcgcgccgccaggaaagctgctgatcagaggatttctgaaaggacaggttcaccatga

SEQ ID NO: 120919 - DNA, 1053 bp, Enterobacter cloacae; identical to SEQ ID NO: 94647

SEQ ID NO: 120920 - DNA, 201 bp, Enterobacter cloacae; identical to SEQ ID NO: 94648

SEQ ID NO: 120921 - DNA, 261 bp, Enterobacter cloacae; identical to SEQ ID NO: 94649

SEQ ID NO: 120922 - DNA, 540 bp, Enterobacter cloacae
atggatcaattctgcgcgaagcgttcaaaaatgaatattgagactgtatgtaaccaacaatggtatcttgctctctatattaccgggggcaaaaaccgcgagaacttattcgactggctacacgacaggagaataactccctggacacctttatccttaacgcaaatacggcgtgcggatgccccgcatgttttcagaaaaaggatctcggccgttttcccaggatatttcttccttaaggcagatttcgaatcacagaaaatagatatgattcgggcgcactctgcattctgcgactttgtgaaattcggcagtaaaattgcccctgtgaatacaagggtagtcgaagcgttaatgaagaaataccccgacccgactcatcaccctgctgcaagagctgaactcgaagcggcatcagatatctggctgacaaaaagccaatacaaacgccttacacagttagataaaacggatcatcccatatcccggactgcaatgctgttcgatatgatcacctatgctgatgcgtggggattttaa

SEQ ID NO: 120923 - DNA, 672 bp, Enterobacter cloacae; identical to SEQ ID NO: 94651

SEQ ID NO: 120924 - DNA, 627 bp, Enterobacter cloacae; identical to SEQ ID NO: 94652

SEQ ID NO: 120925 - DNA, 507 bp, Enterobacter cloacae; identical to SEQ ID NO: 94653

SEQ ID NO: 120926 - DNA, 1098 bp, Enterobacter cloacae
atgaaaaaacttgccctgcccctgttaataccgtcgctgttaagcagttgcgcgggatttaataaccgtaacattgctcctgacacacctgcgctcgtgtttgtcgacggccagatcagcgatagtgccgatatcattacacagacacagcggcgaattgcgcctccggcggccactcccgttcccgtacgccagccgacatctgtagcggtaacatcgcagacctccccgctgccgcaaccaacaatgatggcctcctccgcaaaacaagtcagctcagtgagccccatcatgaatccagcgctgccggcactcacatttaccggcacaccaggtcccgttgccgttctgtcattatcaccggtgcgtaacctcactttcgaacagtgggtcaggcgcatcattccgactggctggacgctgaactatgagaatgccctgcgacctgtactgaatacccgtatcgtctcggtcgacaccaatgaccagtggaccagggtgctcaaccgtctgctgacagagcaatccatccagggtcagctggactgggatcgtcatgccgtcacattgcagcgaaaggggcaaaccgctcagatgaccgtccctgcactgtccactggaaacctccctgctccaccacaggcgtctggcgcgccgagaaatccgttcagcggaccggaggtgacccaacccataccgccggcagcggttaaaaccagcacatcctctgtaacaacaaaaccggtgaaggcaccaacagcggtaattaaagcacaaccagccaccggggaaccagtcgcacctgtggttcagggtaaaacctggctggcgccatcgggaacgactcttcgggaaatgttgatgaaatgggctcaggatacccgctgtgaatcaggcgcatcatcgcactggacggttatctggccagtatccgtgacggattatcggcttgacgcaccactgaccttccgcggctcatttgaaaccatgctcggtcagatattcgacctttaccgttcagcacagaaaccgctttatgctgaagcttcccgcatgcagtgcgtggtatctgtcacagacactccggcaggtcggtga

SEQ ID NO: 120927 - DNA, 438 bp, Enterobacter cloacae; identical to SEQ ID NO: 94655

SEQ ID NO: 120928 - DNA, 1677 bp, Enterobacter cloacae; identical to SEQ ID NO: 94656

SEQ ID NO: 120929 - DNA, 1305 bp, Enterobacter cloacae
atgaaggatgaggattacctgtttacaatccgggatggaaaatcccgcagccgttactggctggcggggatggactgggcgccaacggaaaaacagaaatttcggctgccgtcatttcaactaagaaaatcacgttccggaagaacagacggcgttggcgtccacacctcaaccggacaattcaatacacgggaaaaagggcaatcagtcgcagggagtggcagattgcccgtccgttatcgacgtcaccagctcttttcgctggcactcgcgttctgtgccagcacacgaaatggatacggcatttatcggctgagtagtaccgacttcgtgtttctggccagtattaatggtgtgcctgccgtcactgccgataaaacagggagtgcggacaaaatgcaggagctgctgacactgttcctgagcatgaacgaaccgcccccagaaggctgggactgtctggcatcagtggaaaccccccttgatgctaacagtctctttgccggactatctgcacgcaggcgacagcaatgccgtgtgcatgtagatgggctccggagacagcgctggttactggcttgcgcgatactgctgctcggctcaggcgccattgcctggtggcagacgaccacaccaccggaggaaccggtactcaccgctgaagaaatacaggccagggcgcgcgcaatgttcgccagtcaggcaaaacctaaggttttgcctcatccctgggcacgcgaggtaacagcccaggctctgatcgaggattgtcagagaaagaccgatccggcgctacatgttctggggagctggaaactggcatccgggacctgctctcctgacgggataacccttttgtaccagattatgcccggtggcacagttgaagggtttctcgctcgcagtcaggaggtcttcggtgtcacgccattattcaatctcaaggagggggggcgggaagcccgaatttcattaccgccaccggacagaccactcagagatgaagcagtgcctgacagttcattgcagctcatccccatcctctcctggttccagcgtcagcaaatcacactcaacatcatcgatgtagccatgcctccagtcctgccggggtcgaacggagaaccgcctcctgtgcaggactggcaggaatacgcgtttagtttttccgcgcccctccccgccatcatcttattcgacggtctggatgaaactggtatccgacttacccgtttaacattcgagctgaacggaagtgcgttcagctataccactgaaggtaaaatttatgcgtcagcaaagtaa

SEQ ID NO: 120930 - DNA, 516 bp, Enterobacter cloacae; identical to SEQ ID NO: 94658

SEQ ID NO: 120931 - DNA, 1560 bp, Enterobacter cloacae; identical to SEQ ID NO: 94659

SEQ ID NO: 120932 - DNA, 1095 bp, Enterobacter cloacae; identical to SEQ ID NO: 94660

SEQ ID NO: 120933 - DNA, 615 bp, Enterobacter cloacae
atgcaatttaattctgaaccaacttctcagccatacaaaccaactaaggcgctttcgcaacaccgcggctggggcttcctggagcagggcagcatcgcgctaatcgtactggtcgtcatcgggatcgtcctggcgggatacttcgccctcaaaaataacgtcaacgtaggtaaggagtcgtcgaacattcagtcgctcatcacaagcacccaaaacatgatgaaaggaggagatggatacacattcacttccggtgccaaaatgatgggctcgcttatccagatgaaacttcagcctaaaagtatgactgtacgtggtaccccctcttccgggactgccacgctttataatggatggggtggagccgtgacactgtcacctgtcacagtctccgggttctcaaatgggttctctttgacctacgaaatggttcctcagggcgcctgcgtctcgctagtcacacaactcagtcgcgccaaaattgctgatgcgatcaccgtcaactccacggcgcacagtgatggggtcgtgacaactgaagaagccagcgcgcaatgcacagctgacaatggcagcacaggtaccaacaagctgatcttcacgatgaacagctaa

SEQ ID NO: 120934 - DNA, 558 bp, Enterobacter cloacae; identical to SEQ ID NO: 94662

SEQ ID NO: 120935 - DNA, 675 bp, Enterobacter cloacae; identical to SEQ ID NO: 94663

SEQ ID NO: 120936 - DNA, 1242 bp, Enterobacter cloacae
atgaaaaagcatgatcgtggctgggcaaatcttgatgtcgctctgtcgctcctggttgtgatggcaatggccgtctttgggctcactaaatacaaggactggcaacaggagaaaaactggcaggttgaagcagcccatatcagtacctacgcagcagcagcgcgtggctacgtcgggcgaaactatgcgacgctgttaagtgcaaccagcactaccgcgccgacagtgatcaccacagccatgcttaaaaataccggttttctgccgtccggttttaccgaaacaaacagccagggccagcgtatgaacacgtacctggtcagaaacgggcaaaacacggaattgttgcagggaatggtggtatcaagcggtggaagtgtatatccggccaaagcattgaggctgatatcgcgggatatcaaaaccggattcggaggatacatcgatgacggtaaaactgccactggtgccttacggacgtggaaaatcccgctgagtagctacggagctagttccggaaacgggcatatcgtcgtgcttctctcaacagatgagttatctggtgcacaggaggataacgacaggttgtaccgttttcaggttaatggccgccccgacctgaacaagatgcacacagccatcgatatgggtggaaataacctgaacagcgttggcaccattaatggacagacaggagcattcagtggaaatgtaagtggttcaaacggaatattcaccagtaacgtcagcggagcgaacggtaatttcacccaaaatattacagcgggagcacaagtaaaaggagctacggtacgtgccgaaagcgacatcagcgcaggacgaaatattacggcaacaaacgaggtatctggtgccacagttaaagcgtcaggcaacctttcggctggcggtgttttgcaactgggtcaggtcaacgttgcaggcatggcctgttaccctaacgggctgataagccgtgatgccaatggcggcgtactttcctgtcaatccggtacttggagttcttctgcaggtaaaccaaaaatgacggaatacacgtatacaaactacaactcgtcacacaactattacggtatcggagttcacgatttctgtacttctcagtacggtaatgaaaacgaccgcgatgacagttggagaggtgttgagagattgtctgacgggtcttggcgaatcaacgttaaggacggcagtgagactgcaatgtgtctggattggtaa

SEQ ID NO: 120937 - DNA, 753 bp, Enterobacter cloacae; identical to SEQ ID NO: 95287

SEQ ID NO: 120938 - DNA, 870 bp, Enterobacter cloacae; identical to SEQ ID NO: 95286

SEQ ID NO: 120939 - DNA, 621 bp, Enterobacter cloacae; identical to SEQ ID NO: 95285

SEQ ID NO: 120940 - DNA, 267 bp, Enterobacter cloacae; identical to SEQ ID NO: 95284

SEQ ID NO: 120941 - DNA, 477 bp, Enterobacter cloacae; identical to SEQ ID NO: 95283

SEQ ID NO: 120942 - DNA, 561 bp, Enterobacter cloacae
atggctttttacggttatgcccgggtttcaaccaacgaccaggatctggatttgcaaatacagacgcttcgcgccgctggctgcgaaatcatccgttcagaaaaagcgagcgggaccagccgcgatggacgaactgagctgcaactgttgctggattttctgcgtaagggagacacgctgattgtcacgcgagtcgatcgcctggcccgtagcattaaagatttgcaggatatcgtgtatgccctgaatcagcagggcattaccctcaaggcaacagaacaacctgtggatacgcgcaccgcagcaggtaaggcgtttctggatatgctgggtgtcttcgctgagtttgaaaccaacctgcgccgtgaacgccagttggaaggtatcgctgccgcaaaagcccgcggggtttatcaggggcgcaaaccgcgcatcgatcctgttgaggtccgtcggttgtacgttgaagagaaaatgggcgcaacggcgatttctcgccaactggggatcggtcgagcctcggtctatcgtgtgctggaccgcgatgagcagccggcgtaa

SEQ ID NO: 120943 - DNA, 1662 bp, Enterobacter cloacae; identical to SEQ ID NO: 104011

SEQ ID NO: 120944 - DNA, 969 bp, Enterobacter cloacae
atgcgggttgaggtaatggaacattatggactggcgcaaccaatcgatcaggccggttactatgagacggctcaccataagcagcttatcaaggatatccgcggtgctatccacgaaggccggttaattgccgtttgtggtgtggttggcagcggcaagacagtcactctgcggcgtttgcagcagcgtctcagggaggaaaataaaattaccgtagctcgctccctgtcgattgaaaagcacaatattaaactggccacgctcatcaacgcgctcttttacgatttgacgcaggataaacaggttcagatccccaaacagggcgaacgacgcgagcgtgagttacaggaactggtcaaaaaaggaaagcggccagtggcattgtttgttgatgaagcgcatgacctgaacgggcatacactgatcggactcaaaaggctgatggaagttgtggaggacggtggcggccggctgtcggttgttctggccggtcaccccaaactgcgcaatgacctgcgacgcccgactatggaggagatcggttatcgcacggatatctttacgctggatgggatcaccggtagccaacgggaatatattcagtggctactgaaaaccagtatggggaaaggcaagccggaagacattctgaccgccgacgccctcgacctgctggcgatgaaactacgtaccccacttcaggttcaactacatctgacgctggccctggaggccggttatcagacgggagaaaagccgataaccgccgccctggttgaatcggtactttcccgccagcttgacgatttggagccgacattaacgcgtcatggttatcgactgaaagacatggtggagcagtttgatgccaaaccggcagaaatcagggccatgttcaaccatcagctcgaccctgctcgaacagcagaactgcgggacaggatgctggcggtggggctcccgatatga

SEQ ID NO: 120945 - DNA, 1077 bp, Enterobacter cloacae; identical to SEQ ID NO: 104013

SEQ ID NO: 120946 - DNA, 774 bp, Enterobacter cloacae; identical to SEQ ID NO: 104014

SEQ ID NO: 120947 - DNA, 702 bp, Enterobacter cloacae; identical to SEQ ID NO: 104015

SEQ ID NO: 120948 - DNA, 1107 bp, Enterobacter cloacae; identical to SEQ ID NO: 104016

SEQ ID NO: 120949 - DNA, 330 bp, Enterobacter cloacae; identical to SEQ ID NO: 19372

SEQ ID NO: 120950 - DNA, 339 bp, Enterobacter cloacae; identical to SEQ ID NO: 104059

SEQ ID NO: 120951 - DNA, 582 bp, Enterobacter cloacae; identical to SEQ ID NO: 104060

SEQ ID NO: 120952 - DNA, 558 bp, Enterobacter cloacae
atgtctactaccgttaaaccttctgcagacgcagctgcgatccacaatacccgtgaagcagttcgcagccagcctggcctgggtaacctgactttccagatgaaagcccgttccagcggcggattaaccgttcgcacagagaccggcgccacaatccagaacggcgttatcgataccagccgtgtggggaaattttctaatatcggtgatgaacccgcaggtttactcggcaccgataccggcatgagcccgactgaatacatcatgcaggcgctggctggctgttataccgccacccttaccatgatggctgctgaaaaagggatcgacctggacggtatcgagctggatcttaatttcgatatcaacctcaacggcttccttgggctggacagcaacgtgcgtaaaggtgcgaaatctattcgcgtcgatgttcaccttacgagcaagaccgccagtcgcgaggagttagaagcgctggtcagcgaaatgcaaaagaattcgccaatccacgatactctggctaatccggttgaaatgattacacgcctggcgtga

SEQ ID NO: 120953 - DNA, 525 bp, Enterobacter cloacae
atgaataatccgtcagttattccggccttcgacttccgcgaaatggttttgccatccaacggaaaggtcatcacgacgtccatgaagatcgcccgctatttcggaaaggcgcataaaaacgttcttcgcactatcaagcggctggagtcagattgctcccctgattttaaccggctcaattttgagcccgttgaatacctcgataagaaaggcgaaatgcgcctgatgtacaacatcacgaaagatggctggatgatgcttgtaatgggtttcaccgggaagatggcgaccgcgattaaagagcaatacatcgccgcctttaactggatggccgagcagctaaaccgacgcatggccatgggtgaagaaatgcagcaccgctacgccatcaaagaaacgcgctcaaagctgaaaggcacgatcggaagccgtttgatgaacgagcggaagaaagagaagcgcgttctggagctcgagcatgagcacatcatgcaggtaacgcagccagaattgctgattggctga

SEQ ID NO: 120954 - DNA, 219 bp, Enterobacter cloacae
atgtccgacatctaccaaatcacgctaaccacccaaacaggcgaaaccttcacaggcaagatgtcacgacgtcagcctgagttggttaacggctttgtaccgctggcgaacgagacgggcgagtggttgtactttgctccagcggatgtgaaacgcgtgcagttcacgccagtgcaggcagagcagaccgagcagccagaagaacaagcaacggagtaa

SEQ ID NO: 120955 - DNA, 150 bp, Enterobacter cloacae
atgagcaaaacagtaacattcacctcaaaagtatctcttcgtccatacatgaagccgatcctggtgctgtcagccttacttcgctgggactggttgactaacaagtgcttcaaaatcgaaaccgttaccagcgacacggtgcagctttaa

SEQ ID NO: 120956 - DNA, 639 bp, Enterobacter cloacae
atggttaacgatgacgagcgcaggccatatccgccagttaacttcatcacctccgacaactggcagccatacaccaggctaatacctgccaatgaagtgcatgagtgggtaagccgccaaatcctcagtgataccggaagcatccacaaccctgaccatgagcacctgcttgaagctaacctctgctttatgtgggcgtctgactctttcgcgaagaaaggacggtatgtcctcggtcaggccgagcaggtaatgctgcgcgccggtggttggcagaaagccagaatggaacagcagatgcatgaatggttcgggcgaataccgaagttcatcatcacgctggcggctgattactgctcacaatgcagtgacctcgaattctgcgcactggtagagcatgagctttaccacattgcccaggccaccgatgatttcggcgcacctaagttcaacaaagagaccggacagccagtgctaacactgcgcggccacgacgtcgaagaattcactggtgtcgtacgtcgatacggtgccagcaaagaagtgcaggagctcgttgatgctgccaatgcgccagcagaagtggctcacatcgatatagccaggtcatgcgggacgtgcatgttaaagctggcgtaa

SEQ ID NO: 120957 - DNA, 1323 bp, Enterobacter cloacae
atgaaattccaggtaaaccacgaagcaaagcgtccaatcccggcaccgcaaaatggtgagcatattcaggtcaacatcaccacgaaggtgaacagccagtctatccggcgcgaaacacataacggtcgtgagcatctggtgctgcctagctatacgctgccggcgaacgtcgtcatgaatggcgggctgtacacagaagatgaaatcaacgcccactatcaggggctggaaggcacgctcgcgccgctgggtcatccacaggttaacggtcagttcgtgtcggccttctctcctgaaggccttaacgtcggctacgtaggtgcgtggaaccgtaacgttaagaagtccggcaatcgtatctacgtagaaaaatgggtggatgtggctcgagctgaagagtcggagggcggtcgagaactacttgagcgcgtcgcagctattgagcgtggcgatgacgttccgcccattcataccagtgtcgccgctttcctcgaccagcttgagcctaacgaacaacagagagctacgggcgccgagtgggtggcgaagattcacagcatggaccatgacgccattctgctgcatgaggttggcgcggcgacaccagagcagggcgttggcctgatggttaacgctgatctggcgcagccgcttaaggcgaactcaggcgcgctggttggcgaatcctaccgggagcgcgagcagcgtctcgatcgcgcagccaaagcgaagtttgcggcgggcgcggatgaatacgcatgggttgctgatttcactgactcgcaagctgtaatcatccgcaacggcggcagcgctgaggtgtttggctacaagtctgagggcggcgtaatcaccttcgacgataccggcaccgcagtagcgcgccaggagtcgtgggtcgcagtcgtcgctaacaaattcaaagctctattcacaccgcaggaacagcctgcaccaaaccacaaaacggagggcgacatgcctttaaccaaagaagaactggaacaaatcggcagcatgatcggccaggctgttgcgaccaatacagaagctgctattaagcctctcgcggaaaaggttgatgcgctacatgccaaccagaagcaactcgctgacaccctgaccgccaattcacgcgctgaagagaaagccaagcgtgatgcggttgctaaggtccatggcgacatcgtggccaacgcgctttctggcgatgccctggacgcaatgttcaagtcgctgggcgaagctgctcctctgggcaccaacaatgctcaacagcacaaagaaaccggcgcacctgccgcagacgaacacttcaagtaa

SEQ ID NO: 120958 - DNA, 450 bp, Enterobacter cloacae
atgccacgttatcgtcgcgttaatatcgacggtcagtctctgtacaagaccgaaacccgcactacggccgccgcactgcttccgggcaccgccgcaatcatcaactcatccgataaattcgctcaggccaccgcgctagccggccgcctgtacatcatcgatgtcggttatcaccagggcctgaccatcacagaggcaattcctgctggtgattctgctgtcggcaattacgtcgaagaagggcgtgagctggcgctgctgtgcgtgcctggggcgtacaagaaagacagcccgatcaaactgggtacggctggtcagtttaccctggcaaccgatgacactgattcagtgatcggctacagccaggatgaacacaccatcgcagccagcaccaccgacttcattcgcgtgcgcatgcgcgttggcactgtcgccgcagctggcgcgtaa

SEQ ID NO: 120959 - DNA, 1077 bp, Enterobacter cloacae
atgtacttctcaaaagagacgctggcgactaactcccgccttggcgggcactggagtgagctgtgggcaaaccgcaacatgtggaacctacagaacgattccatcattgcagctaaccgcgcgatgatgaccgctgacatgctggcttgtaacgcagtgggcggtttttcccgtgacttctgggctgagattgacaaccaggtgctgcaactgcgggatcaggaagttggcatggaaatcgtgaacgacctgatcggcgttcagacggtgctgccggtcggtaaaaccgccaagctgtataacgtggttggcgacatcgctgatgacgtgtcagtaagcatcgatggccaggcgccgttctccttcgaccacactgactacgcgagcgacggtgacccgattccggtgttcactgctggctacggtgttaactggcgtcatgctgctggccttaactctgtaggcattgatctggtgctggattcgcagatggcgaagatgcgcaagttcaaccagaagcgcgttaactactacctcaacggcgattcaaaaattcaggttcagtcctatcctgcgcagggtattaagaaccaccgaaacaccaagaagatcaacctcggttccggtgctggtggcgcgaatatcgaccttactactgccgacatgacagcgctctttgcgttcttcggtaaaggcgcattcggtaccaccgcacgcacgaacaaagtcgccgcatacgatgtgatgtgggtttccccggaaatctgggcaaacctggcgcagccgtacgtggtgaatggcgttgtaagcggcactgtattgcaggcggttctgccgttcgcgccggtgaaagaaatccgcatgagcttcgcgctgaccggtaacgagtttatcgcgtacgttcgtcgtcgtgacgtaatctccccactggtgggtatggctgtcggggttgttccgctgccgcgtccactgccaaacgttaactacaacttccagatcatgtctgctgaaggtctgcaaatcaccgcagacgatcagggcctgtctggcgttgtctacggcgctgacctggcgtaa

SEQ ID NO: 120960 - DNA, 294 bp, Enterobacter cloacae
atggctaaatacgaagttgtgcgcccatggttcggcgtgaagattggcgacgtggtggagttgaaagatcttcacccggcgctgaggtctaacgtccgtctgatgaaaggtgaggctggtggtgagctgaaacctgaaacacctgatgccggtaccggtgaaaaatctcgcaaagagatcattcaggagcgcctgacccagctgggcattgagttcaaaggcaatctgggcgctgaaaagctcagtgagctgttaccggatggcgaactcgaaaagcttttccctgctgaataa

SEQ ID NO: 120961 - DNA, 402 bp, Enterobacter cloacae
atggtaactctcggacaggcgaaggagtatctggagagccagggaattaccattcccgattttgttcttcaggctctcgtcgaccaggccaacagcattcaggagtgtcttgatgcgcattatcctgcatcgaccgcgctgctgattcagctctatctgctggcgcttatggggctcgggcagggggataaatacatctccagccagacagctccgagtggtgcgtctcgctcgttccgataccagtcgttcaccgatcgctggaaggcctcggttaacctgttgcgggggctggataaatacggttgtgccactgctcttattcctgccgaccctaccgccaccccggcattcgctggtatctggatcggtaagggcggctgcatgtgcggggataagtga

SEQ ID NO: 120962 - DNA, 171 bp, Enterobacter cloacae
atgacgtacaaatcagttaagcacggtctgccgcgctcgttcacccgcgtctgggtgatgaccgacaccgggcgggagactaccggctacgtgaaatcggacggcgagtggcatatcaactgtgagcgcatccgggcgaccggcgcgaaggtgttgcgctggaaggagtga

SEQ ID NO: 120963 - DNA, 237 bp, Enterobacter cloacae
atggcgactgtaacaaacatggttagcgcgttgaatgtgaaggtagttttccgcgttgctggagaagctaaaactttcagcgagacagtgatttcaccaatcgtcattgagcggtatttgcaactggaatgcggtgatgtcataggtcttttcgtgccggtcggtaaaggccagcaggtcaatgcgctgaatatcgagtggtttgagattgagcgcattccggcgctgaaggagtaa

SEQ ID NO: 120964 - DNA, 351 bp, Enterobacter cloacae
gtgtcgagtgttgcaaactggtcatataccgccaccgctactatctggcgcaagctggaaggtaatgacgaatacggcgatccgcttggctatgccgaacctgagcaaatcctctgtgattacgagggcgggctcagcaagaagttagccagcctgggcgctgaaatcgtcgtgaagaacaccgtttggacggagtttgcgctggcggccgcgggtgattatctgctgattggcgtatcgaccgaagccgacccggttgtggccggcgccgacgaggtgcggcaggttatccgctatgccgatacgttcgagcgactggcggatgattacgccatcctgacgggagtgtag

SEQ ID NO: 120965 - DNA, 384 bp, Enterobacter cloacae
atgaatcctcctatgtatcagcgagtcaggaacatgtttggcgaagccgggcttactaacggtttcctggttcagcttcttaatttcaatgacccgaaggacctttcgaaagcgattatggtgttcagaccaaatggcggaacccccatcagaaatgacctcgggaacgataactatgtcctggtcgatgtgattggtgcaaaggataaaaaccaggcggcggcaacggcagctcagtcaatccttgattacgttcaggcaaatcctcacgcagacgaatgcgtgggtaagatcgaaaacatgggcgcttacccaactcctgtgacgacggaggagggaaggattgtcctaagattacagtttgcctgcacttttggggactga

SEQ ID NO: 120966 - DNA, 780 bp, Enterobacter cloacae
atggctaattgccaaaactccaacgaaagggtattcggctcggcaactgtactggagctggcctatggatgcccagacgcgcggcctacagaagacgactggaaggctctcggtgcgggaaccagtaaggggctggatttcgctccaaactctgtcacttctgatgcagacgatactgcgggatgggtagaaaacatcatcaccaacgcagacgcgacaatcagttttgatggtgaagtgcggaaacacgacaaacttgaccagttcggttatggcaatctggtgaagtacttcaccgatgagatcaatgccaagcgccagccgacgctgtgggcacgtatcgctatcggtccaatcgagttctcgggctatatggtgatttctaaccttacgccagcagatggcggaagtaacgacatcatcacgtttaccgttgagttcaaagtatctgatggcactactgttcaggttgttaatacggacgccacgccttcaacgccgttggcattctccaaagatttgccagcgactaaagctgccgatgcagacaacgacgtcgttcttgatgttgacgtaacaggcggtcgcccaacttacagctacaaatggttccttggcagcactcagatcgattcaactgcaaaccctacggcggcaacagccacgctcctgctgcttggcgttacaaccgcatcgagtggtagctatcgctgtgaggtcacggatagcgacggaaataaaatcacctcaacaacctgcgtgctcactgttaccgcatag

SEQ ID NO: 120967 - DNA, 672 bp, Enterobacter cloacae
atgaccgctttgagagaaattggcgagataggcataagtgacagccgtgaaggcggaaaagattacttgttacgaccgtcttttgaggcaatgacaaggatcggtgagccgcatgaaattgttgagatatacgctgatattcatggtcgcgaggcggacaaattaatctcggtctgtgccgatgcttttggcggtttacctgactggatggggccagcgatgcgcagggtttcagatcgcctgctagcaaaagccatggatgttttacaggcgtgctcagatgaagatttaacgccgattgttggccaatgggatgaggttgaaggaaagctttcttattcgcccggtctcatgccccagtcagatattgtcatctttgctcagcatcttttacagcatggcgtaacagggaaagcgaagacgcgaaaactccagcgccatgaatcgtctggaggcactacagaatttaacgccattgaatacatcaacgcagcaaggatccacttcagtataagcctggatgaagcgcgccgtctgaccatgactgaatttcaggcgttgctgtcagagaaatatccggaccagaaaggcctgaccaaagaagaatacagcgcagttgctgatgattttctggctaaacaggcggcaagaagggccgcagcgaagaaataa

SEQ ID NO: 120968 - DNA, 1503 bp, Enterobacter cloacae
atgcttcgtttcaatttagacaaaaagcttttttcaatgatattgcttatgtcattgatattcttcttaccaattatcttatcaagtcactattacgttgatgatttaggtcgttctatttacggatattcaaagtggtctgataacggcaggcctcttgctgatcttttattcctatctttgagctttgggcctcagttgccagacatatctccactaccgcaattgcttgccttgggcatcttatcgctgagcgtttacttttctgcaaaagcatttctcactgaatttgatgggtacgttgctgccatcatttcaatggttgcaatttcaagcccattcttgttggagaatatatcatataaatacgatgctttcccaatgtcgatatccgtattgtgtgcaataattccttttgcattcaaatcggtagaattaaaaaaacaatttctatattgcttcacttctgtaattttaattttgtgcatctatcaggcatcaattaacatatatataatattcgctattttatacgtattaaatatattcagattaggtgaaactcgcaatggattgttatcaatagtagcatccattggcggattaggtattagttatattatatattcaactttcatttcaccatattttttagttggtagttataatttaaggcatagtgaacttgcaacttcaggaataaatgatgccttaacggttctatcacgcaatattaccgaatttggaaaattgataagtcttgttgttaccacgccatttataatattttgtgtagtggtgttaacattatctttaattgcgttaattaagatctcgcttgttaaatgcagttactctaagcctgagaaaataatgaagcttttagtcattgtattttctccatttgcagttttgtgcatgataacaggacccatgatgctcctgagggacccagtactatctcccagggttctaatggcatttggaactgcgtgcttcttctttgcggttctttccacctgggccttctctcgcacaaagctttataaatcattatgcggtattttatttacagtctacgccctatactctttaggggttgcctatgcttacgcgaactcacttaacaatcaagaaaagtatgagaatgcgataattcaattaatgatgtctgacttaaacagccttggcttgagcagttatgaatttattgctttcaaaggtggagtgtcgttgtcaccagaagttaggatggcagcaaaaaaatacccaataatttcaaaacttatacagccgacaataaataatcaatgggtgtggggccatacccaaatgatgcatttcgatttggataaaaaatttcaaagctttgattatcacatgtcgcttaaatcgagtttatgtacatttgaaaatatcagaaactctaataactataacattttaattgataaaaaaagctcaactattgtgtttgatttcacgaagacagagtgtaaatag

SEQ ID NO: 120969 - DNA, 2478 bp, Enterobacter cloacae
atggcgctggttgagatatcgaattttccaggaacgcctaagctgcgttgcagggtgccaaacggcgcccttttttatgactggctggtggccaatgacgctactttccaccgcgacctgctgattgtccgcaatggtgtgaggctgggcgacgatgacgagctggcgtttgagctgagtgagctggaccacatccagatattcgaccagccaaagggcattgtcggcgacatcctgagcccgatctttaaagtggtgggccaggtgttttcgttcctggcgccgaagccagcgatcgcgaacaacggcggtaataccgtcgactcgccgaacaatagcctgaccggtcagacaaacactgcgcgcgtttacaaggccaagccggacatttacgggcaaattcgttcgttcccggatctgattcaggagtcggtgttcgaatacgttcaccagacgtccaccgacggcggcctgaagtacgttacagagtggatgtgcatcgggatcggcaaatacgattacgagtccgtgcgctactcagaatccagcctgggctctcttgcaggcgccgaattccagttcttccagcctggagaagtcatcccgcagatcgttgagggatacgggttcgatgacgttgacgggcaggaggtacccgggcagaacgaagcgagtgattttccggtagagagcgccaccgctaacaccgtggttagcggaacgtattccggcggacagatagccatgaaaattattaagcagtcagatttcgactatttcatggggctggtgctgccgcacgccgtcacgttcacaatcaacgtcacgtacaacaccgcttccggcagcgttactaccgacgcgacattctccggcacgctgatctccgccgttgagacaaacgacggcgcagtggtgaatccggttcgctggtacacgtttacgatgaaccaactggatgggccgcaggacatccctgcgaatgcgacgatcaacaccacaaagtttatcctcaacgacaacgaggcgctggtggttgggccgttcttctcccctgtcgagtcaacgcagctgtggctgcatacacagtccagcctcggtgggaagaaggagaccaactggaaagtggtcatctggaaaatcgacgatgattataaccaggtcccgggaacgcagcagacgtttacgtaccggcagacgacgccgcaccagtcgacaagcgaagttttctatcgcaccgacaaattaacgccgtcaggcggctttggcaaatacgcggtcagcttccagcgcaccgataactccagcgatgccagcctgctcaaggttgaggaaatccacagcattaacatccggaccaatgtcgttcacccgacagacacgctggtgcgggtaaaggtgagggcgactgagaacgcccttggcagccgcgagcgcaaatataacgctctggtgacacgccataccatcacatacgacctcgacactcagactgttgattacacgctgcgtccatctcgctcattcgccgatgcagtagcgcatacctggatgatcatgggcgagcagccggtcagcagcattgacctgtacggcctgtactctatcgctgaaagcctgcctgacgagcgcctgggttacttcgactacacgtttgatgacgagaacgactctctcggcgaccgcgtgcaggcgatctgcaatgcggcctcagtggttgcttactgggacgacggcgtgctgacgtttacccgtgatcagaaggttgactacccggcggccgtattcaaccgggcaaacatgaagacggacgagtacaaaatgacgtacgaagcgacgctgccaggaggttatgacggcgtgcaagtgtcctacgttcacccaaccacgaacaacaagacgtacattaattaccgcgtgcttaacggcgctatcgtcgagcaggaagctgagaacccgaacaaactggagatcgtcggtttccgcaacgagtaccaggcgcgggagcgcgcgctgcgcgaaactaaacgtctgatctactcccgggtgaagatgaacgccaaagtgtttgaagacggcattatccaggtcggtagtgttatccagatgccagacatctacgacagcaaccagcagcagggttacataaccggtcgtgccgggaataacttcgataccagcgagccgatcacgtttactggttcgatgtatgtgctggtgaccgacagcctgggtaatcccacgctgcgctatccagcaaccgcacgcagcgatacgaagtacgggtttaccgcagcaatacccgacattcagctcaacatatggaacggagacactgtgcagctcccgtcgcgctacctcattgcgagcgtggaggaactggacagccaactctggacagtaaacagcatcaagccaaacaccgacaacactgtgtcattgactgtcgctgagtacagcgacgccatctaccaataa

SEQ ID NO: 120970 - DNA, 393 bp, Enterobacter cloacae
atgactacctctaattttatcagcaggatgatcggcgtgccatggtcgaaccgggcctgcacttttgaaaaggtcgattgctggggtctggtggtgttgtacttccgccacgtcctgggcaccgaactgcaccagacgccggactacgaagccggggctgacttcttcacctgctatcagggtgatgtgacgttctggcgcccggttgacaagccggttgagggcgggattttcgtcggctatcagggatcgcagcctgcgcatgtcggcctggtgctgaaccgccaggcgttgcacgcgcggggcgagggcggcagcgtgcgtatggactcgttgctggtcattcagcgggcattcaccaaagtggagtttttcgaatatggcgctggttga

SEQ ID NO: 120971 - DNA, 465 bp, Enterobacter cloacae
atgaattggcatgaacttttcagatatgatgatggaaagatatattggaatataagaaggagtggtgtcagatacggaaggtcaccaaacaagactactacacaaggatatctctctgtaatcgttgatggaaagcaattgcttgttcataggattatttatgagatgcaccatggtgaaatacctaacggtcatgaaattgatcatattgatggtgataaaaaaaataacaacatagataacctcagggcggttagcagagctgtcaactcaaggaataaaagaaaactaactggtaatacatcaggtgttactggcgtggatttcttgaagagaaggaatgagtggcgcgcaagattggcaaatgctcatcttggttggtttcctgacttcccttcagcttgtgaggcgagaattattgctgaagtgagaagcggcgatgtaactggtaggcacggcacatga

SEQ ID NO: 120972 - DNA, 1542 bp, Enterobacter cloacae
ttgaaagtccagtctgatttgtgggccgagtatgcatcaagagaggtcacccgctgggaacatctggctgaactctaccgctacctggaattatccccttttaaccgggcgctgcaaaaaacctgtattcgccacctttatccccacgccatgcggacagacagaggttttttacttgcggaggaaatgctctcctggctccacaataataaggttattttcccctctgttgaagtgatcgaacgaaccctggccgaagcaacaacacttgccgacagggcggttttttctgcgcttaccgcgcagcttgaaccagggcataaagcggcactggaccgtctgttggtatctgagggtgagcaaccttcacggctggcctggctgctccagcctccgggaaaaattaatggtaaaaatgtcctgcaacatatcgaccggttaaatgcgattgagtcgctggcactccctgacggcattgcactttccgttcaccagaaccgactcctgaaactcgcacgcgaaggcaggaaaatgagtagccgggatctggcaagattcacggatgttcgccgttatgcctcgctggtttgtatcatatcggaggccagatccaccctgactgacgaagttattgatctgcacgagcgtattctgagtagtctgttcagcagggcaaaacgtactcaggccgagcggctccagcaaacgggaaagctgattcagagtaaactgaagcaatacgttaccgtcggacaggcattacttaacgccagagagtccggggaagatccctgggccgcaatagaagacgtccttccctggcaggaattcatcaacagcgtggaagagacgcggttcctgtcacgtaaggacaacttcgacccgttgcatctgatcacagaaaaatacagtacgttgcgtaaatacgccccccggatgctgtccgtgttgcagttcagggctgcacccgccgcaatgcagctcagtgacgcattggataccgtcagagatatgtatagaaaacaactccgaaaagtaccgccttccgcgccaatcgggttcatcccggaaagctggagaaaggttgtgatcacccccaccggcattgaccgaaaatattacgaattttgcgtgctgaatgaactgaagggagccttacgttcaggtgacacctgggtaaaggggtcacgccgctacaggaatttcgatgattatctgatcccgtcagacgattttgaaaaatcactccgggataaccagttaccccttgctgttccggccgattgccatgaatacatcaagagccgtttgacgcttcttgcatcgcgtctggaagaagttaacgcgatggcgctggccggtgatttacccgatgttgatatatcggataaaggcgtgaaaattaccccgctggataacagtgtcccttcagcagcatccccttttggcgatctggtttatggcatgctccctcaccctaaaagggggccgcttggaaaacggaatctatggtcactcccgtttttgcaacaccgattttga

SEQ ID NO: 120973 - DNA, 2016 bp, Enterobacter cloacae
atggctactacacctaccaacctgcctgttccaagcgaatcaccacgcgatctgaagtataacgccgggaaaattgacgagttcgtcacttcgatggggtggacttatatcgatcgatttggtcagaagcactacacaatcgagggaatcaattacatcgcgcagcaggcaatgaacgccttcggttacgttatcctttcagggaaaacattcaccaccggcgcgactatcaacaaccctaatgaggtgctgctgaacacctccgacggcgaatattacaaatggactggtacgtttgcatccggcccgaaagttgttccggaaaactctacccctgccagcactggtggcgttggtcctggttcatgggttggtgtcggtgatgcatctcttcgtgcagcactggccgcgatggatggcgagaagttaattggtgagtgtccagacattgctacgcttcgaactatagagccatctttcgacaagcagcgcatcaccgtgcgggagcacaccgcaaataccggctatggtggaggaaagtttagggcggtgctcaatggcatagggtataccgacaacaacggtacgattatcaaaacatcgggcggatcggcgtggataagaactaactcagaagtcatcaaccctcttatgtttggcgcggttccaaggatagatgacactacaccctcataccattcaaatattaacgctgctatcgctgctgcatctggtaagtcatttgacggcctttgcatggatttcaacatctcaggtgaaatcctttacaacaatgcattggcaacaaaagggcgaaatctctacctgaatgctatcaaagctgctgcaatagcaaacatagttcgtgtaaatggagccgcgcatagtattaatggatttaggattaaaggaaatagtacagatgccgcagcaggaatagttcaaagtaataccgcggccgggacagtgattgaaaattgtatcattgttgatgttggacgaaatggaattatcacagcaggaaaagagtgcattgtaagaaataataaaaccgataattgtgggtacgctggctcaggtaactttcgatgctccattcagatgaatgagggagaacattgtgtgatggaaggtaatacctgccttcacgcaaattggggaatccttatgcgtaatgagataggggtaacccaagggttctataacacaatcaggaacaatatcgttgttgcttcttcatcggctgcaagtgatagtcagggcatctctgcggcagctcaatttcatcttacaacttctggtaatattgtaagaaactttgttgataacgggatagaccatcaaaactgctttggacttctgataacaaataatcagattgcaggctgcaaagatgctgtattcatcggtgatagatcttgcggaaggattgttatctcacataataatatagagggttgccaacaaggtgttagatattacaacccatcatcaaatccttttactggacagactttctctgatgttgttatatccaataactcaatccttggctctctcaattacgggatatgggttattatggctggtacatcaagcgccaactacaacacaaatattgtgaataacatcgtcgatggaaacgggtcaggcggacttgggattgtactggacaatgtacagcaaggtacatgcagcgataattcagtaaggagagttaacggacatggaatctcactggcatcatgcgaaagcataaagctaattggcaataccattacagatgctggatttggtacgaccgggacatataatggaatcaacatatcaagcagtaataggtgtcaggcgataggcaatagcgcaacaggcacaacaatgctttacgcaatcgtaattggtgctggttcattcaatatggcacatatgaatgaagcgcgctcaacctcaggagcgacggcagttagcatttccggtggtactgggaacgtagaatcattgaatattaagtcataa

SEQ ID NO: 120974 - DNA, 402 bp, Enterobacter cloacae
atgatagatatccaaaaactgatatcttggcttggcgttgagggagctaaagctggcttggataaaagtgaaatgactaatgccgagctaattgaatcctttggtaatttacttccaaagaacccaagcaaattaaaacgatccgatctcgttgaggagattattttagcaacaaggagaatgacacataaatcagttgaagaactgatggaaatgtcaaaagaagatctgtattcatatttccacgatcagaaatatagcagaaaagaacttcttgatttgttatatactcttgaaatcagaccggggagctcagcaaagaaaaatctaaccgagttcacaataagtgagataagtgatattggcatgtatcgtcgcgtagcgaaagggaatcatgcataa

SEQ ID NO: 120975 - DNA, 885 bp, Enterobacter cloacae
atggctgtgacagttgggtttattagtgagaaaggtggggttggtaaaactacgtcctgttatcacattgccgaaggacttagtcgttttcatgaaaaacgtgttttagttatagatgcagattatcaacgcggaggtataactggaagatttttccctaaactgatcgaaaattttggaaatcaagcaccgcaaggaacaacgttatttaacaagtatcagcaattatatagcgcagcacaacaaacgactgacatagacataattaaatttaatagtggcatcgatgtcattccagccgaccctcgcttatcaaccgtttcaactgataagctacctagtacaaacaatataagatcgaacaatgccattcttttacagcatttaaaaaccataagcgctgtattatcacctattgcagataattatgactatatattgattgattcacaccccgaagtttctgatgtcatgcgctctataatctacgcatcagattattgtgtatcaccggtaaaactagacaggcaatcatctattggtgtggccacagtcataggtgagataaataatgtaaatgaagatattgaaatgctaagaaaggcactgcaagtcggcgattcatataaggacacagttttcgccggagcgatgggaatgatggccagagaatatgcagaagaactgaagcaaacagagcaatatgaatacaacaggcttcggcaagcaggtgacatcttcaagcactacataacggaaggtgatgggctaagagtagctgcagcagagcgcgtttcagtgtatgatgtacagataagtaacgcttacaaacaagcgtcacagtttaagaacttgacgattgagtttatgaggacttgtcgatga

SEQ ID NO: 120976 - DNA, 564 bp, Enterobacter cloacae
gtggcccaccaaatcttccggtcatcctgttcaattacaccgctagccgtacccaggaggtgccgcagcgcctcctggaggcagaaaggcgtcgagcgtataggttgctgggcatgcgcggcgcaagttcatcagaaaactcaatccaagggcaagatcggccgagcggagatggcactgactcttatcaacaagctctacggcatcgagcgcgacatggaagaggcgggcgatgcccagcgataccagacgcgccagtcgcaaagccaggctttcctggagcaactgaaagctaggctggacaaaacccctccccaggtcacgtcgtcaaagtgccttgggcaagcaatcaattgccttgcgagcaactggttaaagctgatccgctacatcgaaagggggacacctgcccatcgacaacaaccctgccgagcgggcgagccaccttctcatgtacatatgaccaaagcgtcgcccgtctcctcccgttatgtcatgcctacccacgacggagtattgacggtctctgtgcgccagagcatagttttcccgaagggcgcttag

SEQ ID NO: 120977 - DNA, 189 bp, Enterobacter cloacae
atgggaagctatttcctgcccagggtgggcgtgccaaacaacgacgacagagtcattggtttccagaacaaccgaacgaatcggttcgccgttagacggacgaacatattcatccaccgaaaaaatccgcgattcagtttctgctctcatgttcacacccatttaaaactgattggacacgtactctaa

SEQ ID NO: 120978 - DNA, 564 bp, Enterobacter cloacae; identical to SEQ ID NO: 95289

SEQ ID NO: 120979 - DNA, 1104 bp, Enterobacter cloacae
gtgcccaccgttgaacgtcacatccggggcaaatgggcctgcgacagctgcgagacgttgatccaggcaccggtgccaccgcaggtgatcgacaaaggcatccccaccgctggcctgctggcccaggtgctggtggccaagtatgccgaccatctgccgctgtaccgtcaggaacgcatgttcggccgtgccggcctggaaatcccgcgctccaccctggccgaatgggtgggtgcctgtggtgtgcagttgcagccgctggtggatgcgttgagaaatactctgctggaacacagtgttctgcatgccgatgaaaccccggtcagcatgctggccccgggcaagaagaaaacccacaaggcctacgtatgggcctactgcaccacaccgtttgccgacctgaaggcagctatttacgacttcgcacccagccgtgcaggcgaacacgcccgaaccttcctgggtgactggcggggcaagctggtctgtgatgattacgctggctacaaggccgggttcggcaacggcattaccgaaatcggctgtatggcccacgcccggcgcaagttctatgacctgcacgaggccaacaagagcgaattggcggccaaggccttggaatacatcggtggactctacgagatcgagcgggaaaccaaagatctgccaccggatatgcggcgggaaatccggcaaaccaaagccaaaccccttgccgatgcgctgcatcagtggatgctggcccatcgccagaaagtgccggatggctccggcacggccaaagccctggattacagcctcaaacgttgggaagcgctgacgcgctacctggacgatggcgctgtgcccatcgacaacaactgggtggaaaaccagatccgaccctgggcgctggggcgcagcaattggctgtttgcgggttcactgcgcagtggtcaacgtgcggctgcggtcatgaccctaatacagtcagcgaagctgaatcggcatgatccctatgcctacctgaaggatgtgctgactcgcctgccgacacagaagaacaacgccatcgacgagctattgccccacaactggaaaccggccatacctaacaaggtgtag

SEQ ID NO: 120980 - DNA, 267 bp, Enterobacter cloacae; identical to SEQ ID NO: 95291

SEQ ID NO: 120981 - DNA, 558 bp, Enterobacter cloacae; identical to SEQ ID NO: 95292

SEQ ID NO: 120982 - DNA, 261 bp, Enterobacter cloacae; identical to SEQ ID NO: 95293

SEQ ID NO: 120983 - DNA, 507 bp, Enterobacter cloacae; identical to SEQ ID NO: 95294

SEQ ID NO: 120984 - DNA, 150 bp, Enterobacter cloacae
atggtgagaggcatggaagccgcctttcgggcggggatcactccccgctactttttagagcgctacctggaaaataagtcgctccccgccaacccggactttgaaaaacactatctggatcttattcatgagcaggacccgtcccggtga

SEQ ID NO: 120985 - DNA, 462 bp, Enterobacter cloacae; identical to SEQ ID NO: 95296

SEQ ID NO: 120986 - DNA, 495 bp, Enterobacter cloacae; identical to SEQ ID NO: 95297

SEQ ID NO: 120987 - DNA, 222 bp, Enterobacter cloacae; identical to SEQ ID NO: 95298

SEQ ID NO: 120988 - DNA, 1710 bp, Enterobacter cloacae; identical to SEQ ID NO: 95281

SEQ ID NO: 120989 - DNA, 1536 bp, Enterobacter cloacae; identical to SEQ ID NO: 120275

SEQ ID NO: 120990 - DNA, 540 bp, Enterobacter cloacae
atggacggcgtggttaaaggtgagtcacaggaaaacctgttcctgacacgctggcttgccactgcgatgaagcaaaaacgtttctcgcgtgaagtggcgccggatatagagtggctgctgaaacaggggcgcctctacggtgtcagggcgaagcttgccagtaaactggaatacctctggcacgcctgtacgggggaaatttcagcgcagagcgatctgttccggctgacctacgccattgagaccgcaaagagcatgcaatggacataccggctgctcagcgagcgcgaatggagtggccgccgtgccttgccgctgaatcacgttataaactgcctttatctgtctaaatcttctctcgatgcagcgtttgatgaagacggcagacaggaaggtgagcttctggccagaatcaccggtaatatcgccggtctttcaactctgctgttacgctttggctggaaagtggtacccacagagaccgcagggactgacttcctttttcatttccgtgccgaaacgcgctgcacgtttgaataa

SEQ ID NO: 120991 - DNA, 606 bp, Enterobacter cloacae; identical to SEQ ID NO: 94644

SEQ ID NO: 120992 - DNA, 531 bp, Enterobacter cloacae
atgcagctttttcacggaacaagacagcgttttgataagtttgatgtggcatacaaaggaactggtgagtctggaaacatcgctgccagctggtttacggataattttaaaggggccagcaatcatgcgttattaaaaaacagaaatcccggactgccactggtttatcggtgtgaactgaaagccggggcgattatcgctaatcaccgccagccgctcacagagcaacccgaaattgtggatcgttttaaatcaggattacctgtggacatcgagttcggaaatggactaaaccgatttgtcctaaaaaaaccttgttatacaaagtacaaagggaagatggtttactccggacacactcctgtggaaactgatgaacttattcgtctttatcttacctgcggtattcagggggtttatgactgggagggggagtttacggacagctatctccacgggacaactacagtgatatttgaggcactgttgcaaatagtcggtggtgataaacttatcatccccttttgctga

SEQ ID NO: 120993 - DNA, 198 bp, Enterobacter cloacae; identical to SEQ ID NO: 94790

SEQ ID NO: 120994 - DNA, 198 bp, Enterobacter cloacae; identical to SEQ ID NO: 94790

SEQ ID NO: 120995 - DNA, 165 bp, Enterobacter cloacae
atggccgccggagtccatgccgccgtagtagccgctgccgctgccgtcgaagtcgccgtcgtggttgcgatgcctgctgcctgtgccgtggtggatgctgcaaccgccgcggtagtggccgtctggcccataatggccgacttaacccactcaatgcccatctga

SEQ ID NO: 120996 - DNA, 165 bp, Enterobacter cloacae
atggccgccggagtccatgctgccgttgtggccgccgccgccgcggtagatgtcgccgtcgtggttgcgatgcctgctgcctgtgccgcggtggatgctgcaaccgccgaggtagtggccgtctggcccataatggccgacttaacccactcgacgcccatctga

SEQ ID NO: 120997 - DNA, 693 bp, Enterobacter cloacae
atgccacggcgacagatactgagcagcgaagagcaggaacgcttactggttataccagatgatgaaattattctgacccgaatgtgttttctgaacgaaccggatattgcgctcattaataagcaccgaaggccagcgaatcgcctgggctttgctgtattactctgttatctgcgtggacctggatttattccggacaaaagcagtgctcctcacaatggcgttgtatccagggttgcttcccgactgaaacttcagcctgatttatggccggaatatgcatccagagagcaaacccgctgggaacatctgaccgaactttatcgctacctggagctatccccgttcagccggtcaatgcaaaaagactgtatccgtcatctgcacccctatgccatgcgaactgacaaaggatttatgctggcggaagaaatgctcagctggctacataacaataatgttattttcccttctgttgaagtgatcgaacggacgcttgccgaagtcgtcacgctcgctaacagatcggtattttcgacacttaccgcgcaactggaaaagcagcataaatcagcactcgacagcctgctcatatcaggggtcgtctcagaaaacggaatctatggtcactcccgtttttgcaacaccgattttgacgacaagttggcttgcttgaatctatccggcgtctga

SEQ ID NO: 120998 - DNA, 300 bp, Enterobacter cloacae
atgtcacgtgtttttgcctactgcagggtctcaactctggaacagaccacagaaaaccagcgtcgtgaaattgaagcggcgggttttgccatcagatcccaacgacttattgaggagcatatcagtggctcggttgctgccagcgaacgccccggatttatccggttgctagatcgcatggaaaatggggatgtactgattgtcaccaaacttgaccgtctgggtcgtaatgcgatggatatccgaaaaacagtagagcaactggcggctttagatattcgggcactgttgcaaagttag

SEQ ID NO: 120999 - DNA, 153 bp, Enterobacter cloacae; identical to SEQ ID NO: 120277

SEQ ID NO: 121000 - DNA, 198 bp, Enterobacter cloacae; identical to SEQ ID NO: 94790

SEQ ID NO: 121001 - DNA, 447 bp, Enterobacter cloacae
atgacgctcgataccgggttccagaccgaccagccagcggtcggcccggctatcttccagaaccttaccgacgacctgaaagtgacctggtctctgacgtggatcttcaccttggcggaagaccgagcatttcagcaatggttacgtagtcccaactatcttcacggcggtatttattggttcagaatgccgataaatcttggcggtagtggcttgcaagttcaggagcttcactttacgaaagatggtttccctgtccagaccaatatttctggcggagtggtgacctggacgggaaccgttattgccaaccacctgtacaacgccgatgacgagtttgacgacatcattgttgaactgccgccgccgtgggattcgtggctggatatcgttgtcacgggttatccggacgggcgcgatccggaatcactaccgagggcgccgtaa

SEQ ID NO: 121002 - DNA, 441 bp, Enterobacter cloacae
atgactctcgataccgggttccagaccgatcagccagcggtcggcccggctatcttcgagaatcaaaccgacgacctgaaagtgacctggtcgctgacgtggatcttcactctggctgaggagcgcgcattccagcaatggctacgcagcccgaactatctcaaccggggcctgaactggttccggatgaatatcaatcttggcggcagtggcctgcaattgcaggagcttcacttcacgcagatgccagtccaaaccagtatcgacggcggggtggtgacctggacggggacggttattgcgaactacctctacaacgccgacgacgagttcgacgacatcattgttgagctgccgccaccgtgggattcatggctggatatcgttgtcacgggttatccggacgggcgcgatccggaatctttgccgagggtgccgtaa

SEQ ID NO: 121003 - DNA, 705 bp, Enterobacter cloacae; identical to SEQ ID NO: 8686

SEQ ID NO: 121004 - DNA, 504 bp, Enterobacter cloacae; identical to SEQ ID NO: 52325

SEQ ID NO: 121005 - DNA, 198 bp, Enterobacter cloacae; identical to SEQ ID NO: 94790

SEQ ID NO: 121006 - DNA, 276 bp, Enterobacter cloacae
atgacatggcagcttcttctgatggatgcaaacgccatagtttgcctgttaatcatggtcaggctgatgtttttccggaaagagggaaagcgtcatcgccttagtgtcgcggtgctggcctacctggtcatccttgccgccggattcaacgccttcaacattctgctcggccactacgtacaggttaacctcggcgacctgctgctgaactccgtcatctgcatggcggtgtggctggcgcgcgggaacctggcgaaggtcgtcattacggaatag

SEQ ID NO: 121007 - DNA, 198 bp, Enterobacter cloacae; identical to SEQ ID NO: 94790

SEQ ID NO: 121008 - DNA, 279 bp, Enterobacter cloacae
atggggccatcggtgcaggttaaatggttccagcgctggctgaacgttttcaataaccagcagcagttctatccggatctgatcgccgacgggcaaatcggcccacgtagcatcagcgcgctaaagtccttcctggagaaacgaggcggcgaaggggaaatcgtattgcttcgcgcactgaactgtagccagggccagcgttatcttgagttggcagaacagcggccggctaacgaatcattcgtttatggctggatgcgcgagcgggtgagcctatga

SEQ ID NO: 121009 - DNA, 279 bp, Enterobacter cloacae
atgccagagatttaccaggccagtaccggtaagcagtacatgataccaggcgacaatggcagggtgatcagcaacaaggagatgacttctggcggcggaggggtagttatcaacatccagaactacacgtcatcgtccgttgatgcacaggctggcactgatgcaaatggaggacttaccgttgatgtcattgttgcagacctgaacaacggcgggccaatcagcagcggtataaccagtaacttcaatgttaaacgcacgccaagggggcagggctga

SEQ ID NO: 121010 - DNA, 225 bp, Enterobacter cloacae; identical to SEQ ID NO: 120290

SEQ ID NO: 121011 - DNA, 2208 bp, Enterobacter cloacae
atggatacacttaaatggaccgggagaaaacagcttcctctcacccgacagacagagtcagcggaatgtggtctggcatgcctggtcatgatggcctgctggcatggtctgcaaacagacttacccacactgcgcgaacgtttcagtatcagctcacaagggatgaccctgcagagactgactgaatgtgcggccggtatcggattatccagccgggcagttcggctggagcttgaggacttaagatccctttctctcccgtgtattctccactggaacatgaatcattttgttgtgctacataaagttcgcggaagcaggctggttattcatgatccggaaaagggaaaagtaacgctctccctacaggatgctggaaaacatttcaccggcgtcgcgctggagctgatgccagccagtgattttaccgctcgggatgaaaggaaaaaaatccatctgcgccaactgacaggtaaaacaccgggtctgttgtcggcaatgtcgcgaattatcgtttttgccgtggcactcgaaatcctgacactgggaagcccgcttctcaaccagctggtgattgatgaagtcctggtggctgccgaccagagtttgttgaccgtcattattattgcgcttctgctgatgtcactgacccagatgctgctgtcactggcccgccagtgggcgagtattacactgtccgtcaattttaacatgcagtggacagcacgggttttccatcatctggtccatcttcctctggcctggtttgatgcacgcagtaaggggagtattaatgctcgttttgaggcggtagataccatccagcaggcgctgactacgcaagtgctggaaggtattctggatgtgttgctcgtggtgactgcgctttgcatgatgctgctgtacagtcctgaaatgacattgatcgccgtacttgcagccattttctatggtgtgttgagggcactgtggtatccgtcccttcgacagtcggcagaagatgcctgggatgcaggtgccaaggagtccgggcattttcttgaaacactcaacgggatcctcagcctgagaattaacggtgtgacggcacatcgtgaggccgcctggctgaatctcaacgtagcccgcagaaatacgcagttgcgtcagagccgtctgctgatgtgctatgacattgctcacactcttaccggcagcgtggtatcagcaatcattttgtggaaaggcgccggggaggtattgaatggaaccttcaccgtcggcatgctggttgcttatttatcctatcagacgcgtttttcttccagtatcagtagcctgactgataagtttttttcctggcgtatgctcgatgtttacaacgaacgactggctgatattgtactgaccccgacagaaggccttcagcaacagccttttcgtgagcataacaacgcttcgcacattccttctgtatcccgcagggagatggatgaatatgctcatgctcctctagtacttgagcacatcatcttcagccacaagggaggggaaaatccgataatcggcggggtgtcgctgacactcaatcccggagaagtcgttgccattacaggtaaatccggatgcgggaaaacgacactggtgaagcttatccttgggatccacatccctgatgagggcaggatcagggcatttggcatattgcatacgcatccggattattttcaggttcgtcagcgtatcggtaccgtactgcaggatgaccatcttttcaaaggttctgtagcagataacattatttttttcagtgatgaccgaaattatgaacgaatgatccagtgcgcaagactggcacttatcgacagcgatgttatggcaatgccgatggggtatcagacgctgattggtgaaaccggcggagggctttccggaggacaaaaacaacgcattctgctggcaagggcgttgtacaagaaaccgggattcctgttactggatgaagcgaccagccaccttgatgttgagagtgaaatccggataagccagaccttacgtcaactggggcttcctgttctgctgatagcccatcgcccggaaaccatagcctctgcagaccgggttttgtatctggcagacggctacttaacggagctgaatctccagcatacagtcaataatggcgagtctgtttgtgaatatactaatgacgtgatggcaaaaaattaa

SEQ ID NO: 121012 - DNA, 177 bp, Enterobacter cloacae
atgcggttttattgcatacctgtgtatgtatcacagacgcagatacagtgtgatacaaacccaggtatgaaacgactaaagcgagattcggtaccggacgtaatcgtcggcttcaccatagtggtcatacagcttacgcgccggattgtgcatgcgggttacccagtagagttttga

SEQ ID NO: 121013 - DNA, 585 bp, Enterobacter cloacae; identical to SEQ ID NO: 117295

SEQ ID NO: 121014 - DNA, 1269 bp, Enterobacter cloacae; identical to SEQ ID NO: 83373

SEQ ID NO: 121015 - DNA, 393 bp, Enterobacter cloacae; identical to SEQ ID NO: 83372

SEQ ID NO: 121016 - DNA, 324 bp, Enterobacter cloacae; identical to SEQ ID NO: 83371

SEQ ID NO: 121017 - DNA, 618 bp, Enterobacter cloacae; identical to SEQ ID NO: 83370

SEQ ID NO: 121018 - DNA, 1998 bp, Enterobacter cloacae; identical to SEQ ID NO: 83369

SEQ ID NO: 121019 - DNA, 927 bp, Enterobacter cloacae; identical to SEQ ID NO: 83368

SEQ ID NO: 121020 - DNA, 1533 bp, Enterobacter cloacae; identical to SEQ ID NO: 100206

SEQ ID NO: 121021 - DNA, 1200 bp, Enterobacter cloacae; identical to SEQ ID NO: 83366

SEQ ID NO: 121022 - DNA, 1275 bp, Enterobacter cloacae; identical to SEQ ID NO: 100204

SEQ ID NO: 121023 - DNA, 675 bp, Enterobacter cloacae; identical to SEQ ID NO: 83364

SEQ ID NO: 121024 - DNA, 447 bp, Enterobacter cloacae
atgttcgaccctactctgctcatacttctggccctggctgctctgggttttgtcagccacaacaccaccgtcgcgatttccattctggtcctgatcatcgttcgcgtcacaccattgaataccttcttcccgtggatagaaaaacaggggcttaccatcgggatcattattttgaccatcggcgtgatggccccgattgccagcggaacgctaccggcctcaacgctgctgcactcctttgtaaactggaaatcgctggtggcgattgcggtgggcgtttttgtctcatggcttggcgggcgcggcgtgacgctgatgagcagccagccttcactggtggccgggctgctggtgggcaccgtgttaggcgtggcgctgtttcgtggcgtgccggttggcccgctgattgctgccggactggtttcgctgtttatcgggaagtcgtag

SEQ ID NO: 121025 - DNA, 2037 bp, Enterobacter cloacae
atgagtgagctgatccaacattccaacagtatcgaatggcgttttgaacgccagaccctgcgtattgaaccgtggggtgaaaacagcctgcgcgtcagggccacctgctccccggcttttgatgacgccttacaggcactgttgcccgccgccccttgccaggctgagattgtcgccgaagcggaaagcctgacgctgcgcaacggcaatattaccgcgacgctgaatcttaaaggtcagctggccttctacaatcagcgcggcgaactgctgctggaagagatgtggcgccagcgttcaacggtgggtatcggtgccagcgagaagagccaggataaatatgtcagcgccctgaagctggatggccgcgaatttaagccgctaatgggggggaaatatcagctcaccgtccggtttgaatcgcgtccggatgaacgcatctatggcatgggtcagtatcaacagccgtggctggatctgaaaggctgtacgctggaactggcgcagcgcaactcccaggccagcgtgccctttatgcagtccagccttggctatggcctgctttggaacaacccggcgattggtgaagccagctttgcaaaaaatcagacggaatggcgcgcccgcgtgacgggagaaatggactactggatcaccgccgctgatacggtggcggatatcacccgccagtatgtgaaagccaccggtactccgccctccgccccggcgtttatcagcgggctgtggcagtgcaaattacgctaccgcacccagcaggaggtgctggaggttgcgcgggagtatcgccgccgtaatctgccgctgtcggtgatggtcatcgactttttccactggccgaatcagggcacctggtgcttcgaccccgtagactggcccgatcctgaagggatggtcgacgagctgcgcgaaatgggtattgcgctgatggtgtcggtgtggccaacggtagaggcgcgcagccctctctacccgctgatgaaagccaaaggctggctggtcagcagtgaacgtggcgtgcaggtcaacctcgattttatgggcaataccaccttctttgatgcgacccatcctgaggcgcggaaattcgtctgggatacggtgaagaaaaattactacgacatgggcattaagctgttctggctggacgaagcggagccggaataccgcgcctatgattttgacaactatcgctaccacgccggtccggtgctggaagtgggcaatcgctacccgcgtgactttgcgcagggctttttcgatgggctccaggcaaatggtgaaaccgacattgttaacctggtacgctgtgcctgggcaggcagccagcgcttcggcgtgctggcgtggtcgggtgatgtccactcctcgttccatgcttttcgcaatcaactcgccgcgggactgaatatggggctggcggggatcccatggtggacaaccgatatcggtggcttccagggagggaacgttaacgacccggcgttccacgaattgctgatccgttggttccagtgggcggtgtttacaccggttctgcgcatgcacggctatcgcgaaccgcagatccagcccccggagcgctaccgtgacggcattcctcagtgtaacagcggttcgcctaatgagctgtggagttacggagaagagaattacgccatcatgcagcactggcttaccgtgcgcgaaaccctgcgcccctatattgacgcgttgtaccagcaggctcatctgcacggagaccctctcatgcgtccgctgctctggcactatccgcaggataagcagagctggacgtgtgaagatcagtatctgtttggcgaagatcttctggtggcgccggttatgcaggccggtcagcgtgagcgcgatgtctggctgccgacgggcaatagctggatcgctctcaacggtgagcgctacgccggtggggagcatatccgggtgcctgcggcgctggaaaccatcccggtgtttatccgcgaaggaagtccacttatccagcagctggtggactga

SEQ ID NO: 121026 - DNA, 1143 bp, Enterobacter cloacae
atggcagctcgccccagaaaacataatgtcaaaatacccaacctttactgtaagttagataagcgtacttcgaaaatttattggcaatatcgccaccctgtaacaggttcatttattggattcggaacagatgatgaagcggcaaaagctgctgcaatcgagatgaaccgtataaccgcagaacaagaaactcagcaatcttatgctctgattgatatggcaatgaagagctcagggaaaaaggatcaaggtatacgtgtttctgagtggattaaaaaatacatcgaaattcagatggaaaggttgcgtgacggtgagataaaaaaccctactgtaaaatccagacgattatgttctcagattctcgcagatagagtgccaaaccttcgcctgaaggatgttgatacaagactcattgcaaaaattattgatgaatataaggcagagggaaagcacagaatgggccaactgataagaagcgtactgaacgacgtgttcaaagaggcgcagcatgctggcgaggttgatcctggctacaacccagccttagctgtaaaaaatccaatagccaaagtgaaacgaagcagacttaacattgaacaatggaaattgatttttgaaagcgcaggctctttgccgccttgcgctcaaaattctatgcttttggctttagtaaccgggcaaaggacaggtgacatagtcgagatgaagtttagtgacatttgggataatcaccttcatgttacccaaaataaaaccggaatgaagttagctatccccttaaatttaaggtgcgatgcaatcgggttgactctggctgatgttattagtaagtgtcgcgatagagtagtaagcccttatctgatccaccatgttaagcatcacgcttacggtaaagcgggatctcacgttccagaaaaaacgatatcaagatattttaaggaggcaagagataaagcaaatattacctggcctaaggattgcactgcccttccgccgtttcatgaacagcgctcgctttcatcaagaacatacaaagatcagggtatagatgtcaaaactcttttaggacataaaaccgaagcaatgagcgtaatgtatggagatgatcgtggtctagaatggaaaaaagttgtgatttaa

SEQ ID NO: 121027 - DNA, 282 bp, Enterobacter cloacae
atggtaacaagtgatccgagtgcgatggcaaacgcaattatctctgctgttatcgttattgcactgatgttctaccagcgcggcggggcaagacatcgccctctgatatcgctgatggcttatttgacggtgctggtttatgccagcgtcccgttccgttacctgttcggcctgtatcacgaatcacactggtttgtggtgctggtgaatgtcctgatttgcgcagctcttctctgggcacggggaaacttggcgcgcctggttgatgcactgaggcactaa

SEQ ID NO: 121028 - DNA, 630 bp, Enterobacter cloacae
atgaaccaaacacaatttcagaaggcggctggtatcagcgccgggttagctgcgcgctggtttcagcatatcgacgccgctatgaaggaatacggcatcaccgcaccgcttgatcaggccatgtttattgcccagatggggcatgaaagcaccagatttacccgactggtggaaaacctgaattatgcggcagaaaacctggtaccgacgttcggcagccaccgcatcacgcaacagcaggccgccgcacttggcagaacggcaacgcaaccggcaaaccagaaagcgatcgccaatctggtttatggcggtgagtggggaaaagaacaccttggcaatcaggtttccggtgatggctggaaatatcgcggtcgcggcctgaagcaaatcaccgggctcagcaattatcgcaactgtggccacgcgctgaagctggaccttgtaacccagcctgaattgcttgaacaggatgaatacgccgcgcgctcagccgcatggttctatgtctctcgcggttgcctgcttcattccggcgacgttgagcgtgtgaccctgcttatcaatggtggcagaaacgggctggataaacgccgcgcgctgtttaacctggcgaaatccgttctggtgtga

SEQ ID NO: 121029 - DNA, 270 bp, Enterobacter cloacae
gtgggtatcgaaacgataatcgggctggccgcactggtgatttccgccattgcaggcgcttttggcctgggccatattcgcggcaccagcaaagcggaagcgaaagccggccagcagcgcactgaagataacgcagcggcaacggtcacagcagccgaacgccgggtagaagcaacgaaagaggccagcaatgtacagcagactgttaaccatatgcctgatgacgatgttgatcgcgagctgcgcacaaactggacccgtaagggttga

SEQ ID NO: 121030 - DNA, 273 bp, Enterobacter cloacae
atgcaggtcactattgatggtgtcccgtttgtgcctgcctgcgcttcagcgtcacggattggcattgccattactacccacaaccggtcagacgttttaaaccgcgctattgagcagcacattaaacatctgcccgccggggcgctggtggtggttatcgacgatggctctaaacctgccgcagtagtgcctgacggcgtgcagctgcttcgccatgaaacatcactcggcattgttgcttcgaagaacgccagtttaaccctcttgacgtaa

SEQ ID NO: 121031 - DNA, 2232 bp, Enterobacter cloacae
atgacagtagagatgttcgttgttctgggtcgaggaagattctcattcggtaacggagacatcagggttggctcaacaccgtcgacatctctggatgatggatttagctataccaagtacgaaccaggcgcagacgtcagtggggaccgcaggactgagaactggttcaactccacagaggtcggcggcacagcatctggctcaggcctggatatggctcaaacagccccagattcagatgatattgttgctcagtctttaactgtttctggaacaactattacttttaatggacttagcaatgaagagggaaccacaaccgacactctacctgattcgtgggttgttggtgcaattgtcgaagtaatagttccagattcatatgtcgtaacgaatgatggtccttacagcagaattaccagtgatgcacttgaagagattgcaccctacgtaggcatgcctgtaactctctggtacaacagcgtcgactatcaactattcatctctgaatacatacctcattctgagccaccaggagaggatgtgataacggcatcaatcacgctggcatacgacagcgccacaggaacagcgtttactgggattcctgagggatatgtacgtctttccatttcagatgcgggaagtgagtacaaaatactcgatgttgatgctggtacggtgacattagaacgtatggtggatggtgaagaagacccgtcatggcctggattctctcctcgtaccgtgcttgattttgatgcaaacagcctgaatgaaaatgactcatggatgggtccgtttcttgcttgtccagagaatgaaaccgtagatatgttcgaggttaatttcttcttcccaaacggaatctgcggatacaaggatagtgggagcaaaaagaacagaactgtaacatgggaaattcagtaccgagtctatggctctggttctggatggacaagcaaaaccggctcgtacaacatgaaaaacattaacgggcttgggtttactgaacgtgtaacacttggagcgcctgggctggttgaagtgcgttgcagaaggacgaatgagcagggtgaaggtaactcccgagataacatgtactggcagtcattgcgaggccgtttgttgtcacgcccatcatcgtattctggcgtaactacaatggcggtgacggtggaaactggagggaaactcgctgcgcagtctgatcgccgggtaaatattgttgctacacgtatttatgacaccggaggaaccagaactatatctggcgccctctatcacattggtgatgagctagggttggcgatggactatgaagccattgactcgctagaagcgacatactggacacctgacagcgaatttttcgactatgccactacggattctgtttctgcactggaaatgcttcagaaggttactaacgcagggaaaagctattttctccttacagacgggcttgcatctgtagcaagggagggcgttaaaacgtggacaggaataatcagcccacaggagatgacagaacctctacagacggcctttgttgcaccatcagcagatgattatgatggtgttgatgtgacatacatcaacggcacaacatgggcagaggaaactgtgcagtgcaggactccaggcaatcctactcctgtaaaaattgaggactataccttagacggagttttggatcaggatcgtgcttatcagataggtatgcgacgcctgatgaagtacaggcagcagcgactcacacataccactactacagagctggacgctctttgctacaacgtcggtgaccgcatcgtgttcactgacgatataccaggaagcaagactatcagcacgttgatagagagcatgtccagttccggaggagtaacaacaatctcgatttctgagaagcttaactgggatttcagcaatccacgtgcactgatacgctatcaggatggatcggcgtcagggctgcttgttgcgacaagagcaggtgagtatgagctaacggtgccagaacagcctgagttcagcggcattatccttaatgacccagcaattgaacctccgcggcttattttctgcgagtcatcacgcgttggatatagcgcgttaatctcagagattgcgcctcaatctgacggaacgtgccaggtcacagccaaagaatatcgcgactcattctatcaatacgacaattcctcctaccccggcaatgtagcttaa

SEQ ID NO: 121032 - DNA, 2376 bp, Enterobacter cloacae
atgacgacttataacaccggcaatccgctggggtcagctgctgcaaaagatttgtatgataacgctgaaaaccttgatcatcttgtaaatgatcaagctaatgaatcctatcctgaccgctttggggcgccaaggaaaacatggtatggtatagagaaaagtgcgaatcaggcaattctgaattatggctatatcacgaaggattcttttgaagatggcagcaccattagccttgctaacgagtgcctgcgctggaagagcaacggggaatattacagatgggacggaatcctccccaaagtagttcccccaggatctactcccgatagcactggcggtattggtgacgggaagtgggtcagtgttggggatgccgctttaaggacagagctaagcaacggtaaataccgcagtgacgcattagctgtaaaatatgttccaggggtcgtcattgatagcacgacagataaccgcgcagcaatatacgcttacacaggacaaatttatgttccgaagggtgtccagctacgctgtaaattcctgccagatgatgatgtaaccaaattcactggtgaaggaaaaattcttactcgcgacccatggggtaacgagcatgtgtttgacgtttcactggcaactcatggcagcaaatacactgcattcaacgtaataaaccagttcgctcgccgcaatacgcaatgtcgtgttggtatcgttggtgactcgatcacagacggtgcatacggaactgggtgggttgctaacccaacggattcaaacggggacctgtcctcgactaattacgaccacaatggcaatggtggcgcgggttcctggttccgtactttcactgactggcttaaccgttttaccaaaaatggcgccttcattttcaaagccgagaactgcgcatcatcaggaaagcgtctcattgatggctgggctaatcgtaactttgaccatggctttttcaaaaacactgcatacgggaatgttccgccagacgtttgcttcatgtccatgggcgttaacgataacgggcaactggatacgttagggttcgatcagtatttgttccgctttgagcagtttattcgcaaggcttggggttatggatgtgctgtctgcgttgtttcaatgaaccagaatggctcacagtgggcggcactagaagcatcaatcaagaagcatattgaacgcctgttccctgcggtcgagttccttgatctgtctcagccagtaactgagatgtacagagacctcggaagctatacgcttgaagatattgcgcggcgcccgacagatggcacttttgatagcacgcattatgctcctctggggcatcaatatattggcgcatatgcagcaaaggctgttatgccgtatagagtccatactgcgaaaaaagggaataacttcgtaccaacagttgataatgatatccagccatttggtttcccgtctggtagcacgtacagcgttggtatggagcggttgagtggaaacacgtatcttaatggtttaactggctggggcgtggtttccccagctactgaaaatttaaccatacgatattttgtctggtgtgaaacttctgatatatcaatggttatttttgaaccgtataatccaacatatgttgcagcaggtcgcgctaactccatctctatccgacaacaagataaccgtaatgcagcattcttttcgggtaatatcgcgagtaatggcgtctcatcgtttacgaacaaactaaccactcgaactggaatccttaaaaaaggactgaatcagattgagattgtttacgatggtacaccgtcaaaagtataccctcctgctctgttattcagaggagaactgaacgaatcatgttctcagagcgcctctgtattcctggctgcaaatgcgataaagggtgtttacgggcaggtaagagataaagcagatctcttattagcatatggtgcagaaacagcaaatgatgaagcgcctgatatgtatggtgccactaaatcatcaaatgttcagaatgttgtcctgtcagctttgcctgttgattgtggtgttgttttttactacaaacccacgtcacaaagtggagttgttgccaagagagtggcgaccggcattgagatctcgactatgcttttcggcgctcttactgttgtcggcacattgacttgcgatgtgacaggtgaggtcacgctcacagctggcctgtcaggaacaactccgaccattacagttaagccaactagtggagcgaccgttacgcaacaagtcgctggtttctctggagggaagattggattgataaataaaggaacaagcggacaaacattatctgttagatctactgcgcattatgttatttaa

SEQ ID NO: 121033 - DNA, 1446 bp, Enterobacter cloacae
atgagatttcataagtcagataaacttatatttttgctagccgctttattcagccttccatttttgttgaatgctgaattatttaaggacgacttgtatagggctgtttctggcgatccgagctattgggataaagatagccgaccgctaacaacagtactaatgaaggtgttaaatttaggggatatgataactgatgtgtctccgctatcctttattcttggcatggtgtgcatgataatatccgccattataatttcaagggccatatcatctaacagaccttcatatttctcatcagcattcgcatcgctaatatttttaaatcctatgtttataggtaatgcagtattttcatttgatagcgcaaccatgggtgcgtctatagtagttgcgatttcttcagcatatttcttttacaatagaagttatatcgatgtcgtctggaaaatcgtcgcagtaacttctgtcatgtcaatgtatcagccttcttctgctctttttgttacaatgacagcctttattgttattgtaaaaatacttgaacatgagagcgggtatatcaagggattgatattaaatgccatttcttttgttgccggtttcacgatttacacccaagtggtgcaaaaaatttatccgccaaatgaatatgccttgagaaattctcagtttattgattttgataatggaattcttaccggattacatgatgcttttagtcgcaatcttgatcctgtgataggctcaatgccttctattgttaaggctactttagtaattactttggcaatatcggtagcttgtgtaatcaggtacgctttttcacgtgattacaaaatacaagatcgtatattattagtagttagtttttctttctcactgataatgttctctggtttttctctagccgtgaaatcagactatgttatgcctcgcgtgctaatgtcacttggcttaacgctatgccttgtattcttcatggcacacagactaataggatttaaaaaaatatcatatctggcatatgttatatttgcagccaactcaattaatatatcctattcattcaacaatgctataaagcatcagaataaatttgactcagttattctgacttcaatatcttccgcgctgcatcaaaacggtataaagaccattgacaacataaatatttcaggatggcctccagtttctcttcctactaaagttgcctttagaaaatacccattctttaaaactatcatgccgcaatatctttcaagtacttggggtatcggagcggtagctccttactatgacattacatataaaaataggttctctaacaatttagagttaaaggaaaagattatttcgaatggtgttaagatatttacttcttgttcggtagatgtcttttctgatagaaaagatgttcttttagactttacaaataaatgttaa

SEQ ID NO: 121034 - DNA, 918 bp, Enterobacter cloacae
atgaaaatttctctggtcgttcccgtcttcaacgaagaagacgcgatacctattttttataaaacggttcgggaatttgaaggacttcagcagcatgaagttgagatagtcttcatcaatgacggcagcaaggactccacagaatctattatttacgcacttgccgttgccgatcctcttgtggtgccgctgtcgttcactcgcaactttgggaaagagcctgcgctattcgctggtctagatcacgccaccggtgaagcaattatccccattgatgttgacttgcaggaccctatcgaagtcattccgcacctgatagagaaatggcaggctggggccgatatggttctggctaagcgatctgaccgctctactgacgggcgcctgaagcgaaagaccgctgagtggttctataagctgcacaacaaaatcagcaatccaaagatcgaagaaaacgttggtgacttccgtctgatgtctcgcgaggtagtggaaaacattaagctaatgcctgaacgcaatctgttcatgaagggggttcttagctgggtcggtggtcgtactgatgtagttgagtatgccagggccgagcgagtggccggcagcacgaaatttaatggctggaaactgtggaaccttgccctagaggggattaccagcttctctactttcccgcttcgcatgtggacgtacatcggcctgttagttgccggtgctgcgtttttgtatggcgcatggatgattttcgacacgctggtattcggaaatgcagtacgcggatatccttcattgctggtttctgtacttttccttggtggcatacagttaatcgggataggagttcttggtgagtatattggcagaatctatgtagaagttaagaaaagaccgagatatattcttaagggaaaaaaatga

SEQ ID NO: 121035 - DNA, 363 bp, Enterobacter cloacae
atgttaaagctctttgctaagtacacatcaatcggcgtcattaacacgctcattcactgggttgtgtttgctatctgcatatacgcgtttcacacaggtcaggcgcttggtaacttcgccggattcgtcgtggcagtgtcattcagtttctttgcaaacgccaggttcacctttaagtcctcgacaagtacgatgcgctacatgctgtatgtcgggtttatgggaaccttgagcgcagctgttggttgggctgccgataagtctggcatggctccgatcgtgactctcattctcttctccgccatcagtctggtgtgtggatttatctattcaaagttcattgtctttagggatgcgaaatga

SEQ ID NO: 121036 - DNA, 321 bp, Enterobacter cloacae
atgggattcgcatcaccagctgctgattatgttgagcgtcaactttccccagcaatcctgtgcaacatcggggcggatagtaggttgctcgaaactgatatggggtttgcggtcatagagccagcaacaaaaaagacgcctggagatgtgttgttaattttgtgcgacggccacacacaatttgcaaaactcatgggcaaggcgctcattacggatgatggtgaagcgattgagggatcagcgcttgaagaagtggaagtgctgggtagggtgacgttcttcatcaatcgtgcattagatgatgattgccctgcaatatag

SEQ ID NO: 121037 - DNA, 453 bp, Enterobacter cloacae
atgaaaaaaataattctggcgatcctgcttctgcccactctcgcatccgctgcacagaagttcccccctgaggtatccgctgcccttcagtttaataagtggtacatctcgcaaattattatcgggaaagagcccctgaaaaactatgaagcgctgaggccatatgtaacccgcgaaactatcagcaaactcaaagccatggataagctggattcagatgaatatgacgtgcctgacgtcgatatgttcatcaaggctcagggatatgaagatgactggggcatcgtcagtgcgcgggcgctggattacgatgccgcctgtatgcaggtttatatctcattcggcaaaaagcgggatcacaccgtgattgactgcatggtcaaggaagatggcgtgtggaaagttgaatccgtggccagtatgaatatttcagacaacctgatgatggaataa

SEQ ID NO: 121038 - DNA, 177 bp, Enterobacter cloacae
atgacgctttaccactccgtcaccgaactgattggccgtacgccgctcatccagctgcacaagctggacaccggcccctgctcgctgtttctgaagctggaaaaccagaatcccggcggctcgattaaagaccgcgtcgcgttgtcgatgattaatgaagccgagcgtacgggctag

SEQ ID NO: 121039 - DNA, 1281 bp, Enterobacter cloacae
atgaaaagaataatattttactcttggcaatccgatttaccgtcaaaatcgaatagaaatataattgagggcgctttaaaaaaagctttatctgcgataaaaaaagatgcaagtgaaaccgttgaacctgtgctggatcgagatactgctggaacccctggctcgccatcaataagcgatacgatttttaaaaaaatatcgacatcagatgtttttatagcagacgtttcgattattaatgcttctgagagtagcaaaaaaacttcaaacccaaatgttttaattgagctaggattcgctatttctcaattagggtgggatagaataattcttatacaaaacacattttttggtgggccagaagaattaccttttgatttacgagggcgcagagttgtcacttatagttacgatccagaagatgataccaagtctgaagtaagaggtatattacaaggcagacttgaacatgctttaaaatatgcactgaaagactcaagcgtcggttcgttacaaagcggttcaagtgcccctgtatggtggggcgaatggattaattacaaccataatagaagctatggaggacatttattcataagagaaacatcctcagctggttttttatttgacttatcagtttatagtggttctcattctggtaaaataacatcacaagctgtctttgtctcaagagatatggcgtatgcaaaaatacaaaaccagaatagtgaatatggtgaaatcagtttcagacgcaacatagttgatgggaaaaaatttctatctatagatgaaacagctgattgttcaagccatagaggtatgggcgtaatatttagtggtgaattccaatggtccagtgataacctttttgaactaggttttttaaacgaacttgacttacaaagaatatacagtgttttaggctcatattattttgattttaaaaagagaatggaaggtatcggtgaaggcgaaaatctagatacttttgaggccaaagttttttatggtggtgttagaggaatgtatacctatatggaagggataataatgctctcttcagaaggagggatatggctggcatatttagatgacaatgatattaaatacttcaccaatgacattaactggaaaaccaaaacacctaggacaattgataattggcgtagtcgatttcaacaggtagaaataaaatacatatcagatacaagtactttaccacatgatgccttaggcgaaatactcaaaaatttagaagatgaaatgacagaagaatag

SEQ ID NO: 121040 - DNA, 705 bp, Enterobacter cloacae
atgaaaattaaaaatgagatctcagcagccacaatcctttcaataatgatgttcatttcagtttatgctttcaaaagtggcgaagctatgttttttggctatccgtcatattatatttatttagatacaaatgaggtcattaacaccttacttaaactatcagttgtaataataacgcttatcacactaactctatttatacgcatccccaccaaattttttattttatttgttgctgtagcgcttatcacaaaattcataagaattgctgttttaagccatcaccagcccttaaatgtcatggctgtaataaatcttggcactagtcatattctttttatatgtttgttattcttaattccaaaagcaattaagcaagaaactgtatattactcattgaatgctaagccatgtatgttggcagtcctagccttccttagcttctcctatttcttcggacttaattaccatagttttttccctggtggaatttggcaaacagatgatgaaaaagttgtagttggacgataccaagacaaattcatcttgagacaatgcaacaatggcaaggctttattctatatagatgaaattagtaaaagtaagtttgagaaatttaaaattgacacccgtagcgttcttcttcttagatgtcaaacagaactcgatgagatgaaaaaaacagaaccaatggtaaactggtaa

SEQ ID NO: 121041 - DNA, 144 bp, Enterobacter cloacae
atgcaggtgcatgaacagcctcagggccggccagtgctggcgctggcgggcgattcagtgtcggtaaaacgcatgcaaaaccatgcaccttatgaatgcatggcttttatacgtaaaaataaagggattttcgtggatttttaa

SEQ ID NO: 121042 - DNA, 564 bp, Enterobacter cloacae
gtgaccacactgacgctacagaaagcctttgagacctgtcaggcaaacaaaaccgcctggctgcaacgcagggaagaactgacgcaggccgaacaggcataccgcgaacagcttgccggcagcgggcacagcggccggagcctgcaaacgctgagtgagattatcgacgtgaaaaagtgggaaattaatcaggctgccggtcgctacatccgctcgcatgaggaggtgcagcgcatcagcatccgcgaccgattaaatgattttatgcaggcgcacggcgcggagctggccgccgccctcgccccggagctgatgaattatcccgggcaacaccccgccattcagcgctgcgccatgcagcactcactcgactgtctgcgtgaggcgctacaggtctggctggccgccggtgaaaaaattaattattcggcgcaggacaatgacattttaacggccatcggattcaggcctgaagcggcttcgcgcgatgataatcgtgaaaaattcacacctgcacagaacctgaattacacccgccgccgtgcagaactggccgtgcagtag

SEQ ID NO: 121043 - DNA, 219 bp, Enterobacter cloacae
atgtttcactgcccgttctgcaaaaccagcgcgcattcccgcaccagtcgctatctgtccgataacgtcaaacagcgctatcaccagtgcatgaacatcgagtgctcggccacgttccgcacgcttgaatccatcgacggggttattcgttcaccggtaacagagccggtcatccctgtacccgcaccggcggccaccgttaaccgtgccggtgcgtaa

SEQ ID NO: 121044 - DNA, 267 bp, Enterobacter cloacae
atgcacactgctttttcttctccgtcttctgcccctgccgcgccactgatgccggtttctgatgccgttcaggagcgctttatccgcctgcccgaagtgatgcacatgtgcggtctgtcgcggtcgactatttacgacctcatcagccgggaggctttcccgaaacaaatctccctcggcggtaaaaacgtggcatgggcgcagtctgaaatcaccgcatggatggcagatcgcattgccgaacgcaaccggggctgtgacgcatga

SEQ ID NO: 121045 - DNA, 195 bp, Enterobacter cloacae
atggctacaaccctcaccccgtcacacccgcagtttgtctttgtgtttgccgccgttcgtcgcgcagaccgtaaaccccgtatctgtatgctccgcaccgttgccggtgatgaacacgccgcacgcctttcactcgttcgcgattacgtcctctcgtttgccggtcgtctgccggttgcggaggtgcgtgcatga

SEQ ID NO: 121046 - DNA, 228 bp, Enterobacter cloacae
atgagacacaccaccattacctcccgtgacctcgaatgccttgagcacatgcgcaacgtcggccagctcgtcaatgagctgatgcaggttcaggactgcaccaccgttcgtcgtgaccctgcgcagcagtcgcaactcacctccgtgatttaccttatgaccgcccagctcgacggcgtggtagagcgctgcaatcagcgctggctgaccggggagggcaacgtatga

SEQ ID NO: 121047 - DNA, 1143 bp, Enterobacter cloacae
atgccatcttcttggtctgcagaaatcgatcgttttacatgtggtgttgacgaagatatcagtaggttattcgttatctccgcaggtaacaaccgtgatgtcagacatgactcagattactgggatcaggttgccctttcgcccatcgaagatcctgcgcaatcctggaatgcgcttaccgttggtgcttatacagagttgtctacaattgatgaccccgcttttgatggctggacagcatttgcaatgcctggagatgtttctccatcaagccgatcttctgtgaactggtcatggcgaaaacaggctcctcataaacctgatgtcgttgccgagggtggaaatcatgttatttctcccgacaggactgcggttgataactgctctgatgtatctttgcttaccacatcgggtaaaacggcaggttctgcttttgaaagtcatggggacacaagttctgcatgtgcgctgataaccagagatgcagctcttctgcgcacacaatacccggagctatggcctgagactattcgaggcttgattgttcattcagcagaatggacaccccggatgatgatgcgctttggacagctatgcagtcagcattctccgagtgtggcaaaagattgccttctgcgtactgtaggccacggtgttcctgatattaatcgggcaagatacagcgctgatcacgctctgacattgatagctgaaagcgagctacagccgttcatcaaagagagcaatgcggctgcatcggctgatccaaaaaacaacatgatgaatctgcatcaattgccatggcctgtagctgctttacaattactttcaccggaaactccggtgaaaatgcgagttacgctttcatacttcatcgaacctaatccaggccgtcgagggtatcggtcaagatacagctaccaatctcatgggctgcgatttacgaccatacgtccaggacaaaccttggaaaactttcgatctatggtgaatggattagctataacagacgattatactggtccggagggtgataatgagggatggttccttggcccacaattaagaacaagaggttcagtgcactcagaccggtggaatggttcggtatctggggttaaaggggtaaggtgtgtgcattga

SEQ ID NO: 121048 - DNA, 918 bp, Enterobacter cloacae
atgttgcattacgatatgatccgctacgagataatgtacttaaaaacgcttgatgggtttttaaatactgatcactcgttactgtgcagtacttatgatacgccggatcagtttcgacatttgatctctcagatacttgaacggcatttttctggcgatcaggacagaatcaaagctgcgcggaaaacacttaaagaatgggccgacctgcaactgattgataaagattattttgattgtttcaaaggtacaccaagagcatcgtggtttgctcaccattatatttttgaatatccagtattacctgcagggttgacacttggtgggttggggaatgacgccggttgttcaggtggttttaattctcttttaatggacgataatatcttcaccaattttgatttctctaatttgaatatcgatttggatgatattgattgggatctgataacaaatccacaggccactgcttcgaaaaaaccgaaacgcgttttctcccgattttatctgaacgcgggagcttgtaccgctctgtacaaccccactccggtaactgagcgtgaactcatcaatggtatgatgaggtacattgatgaagctccatactcacttggagataagatctcttatttcaaaaaactgcatgagcgctggcttgagcaatatgatttttttctaacagattttgactggatgtcacgtgatgatgaaactcagttagtatatctctgggactatctcaaaggaaagggacgaatagcgagctatcttcgcccttataatacctctatgcgttatgacatgattattgcggctatggatgtgtggaacgcccaacctgaagagaagctggagtttattgagaagatgaaacatgcctggcaggcagcgaaatcttaccggaaatctactaaatag

SEQ ID NO: 121049 - DNA, 909 bp, Enterobacter cloacae
atggcacagacgtttactcataatttacttcatcctcgccactggcttacctggtctggtttgggtctgctgtggcttctcgttcagcttccttacccggttttacatattctgggttctggccttggaaaaatatccagaccctttctgaaacgtcgggaaggaattgcgattagaaatatcgaactgtgcttccccgagatgacaccgtttgcccggagccagatggttaataaaaactttgtttctcttgggctgggactgatggaaacaggaatggcctggttctggagcgatgcgagagtcaaaaaatggtttgatgttgaagggcttgaaaacctgaccggcgcgacaagaggagtaatggttgtcgggattcattttatgtcccttgagttgtgtggaagggtaatggggttatgtcatcctatgatggcaacgtatcgcccacacaatgatccattaatggaatgggtacagacaaaagggcgtatgcgttcaaataaagctatgattaatcgccgtaatttatctggttttgttcatgcgctaaaagctggtgaagccgtttggtttgcaccagaccaggattatgggtctaaaggaagcgtttttgcaccttttttctcggtaaaaaaagcagcaacgacgaacggaacgtatgctctgtcaaagctcgctggtgcacacttaatcacacttagcatgattcgacgtagcgataaaaaaggttatcacatgtatatcagcaatccgttgtcaggctatccaggggaagacaaggtcgccgcagcggcttatatgaataagatcatcgagcatgaaattctccgtgctcctgagcaatacctgtggatgcatcgcaggttcaaaacgcgtcctgaaggcgaagtctctttatacaaatga

SEQ ID NO: 121050 - DNA, 189 bp, Enterobacter cloacae
atggtaaatatgcgattatccgggtggcttcagggatatgtttcaaaccaggcgaaagtattcaacgaaacgattgcgagtggttttataaacttaccaaaattcggcttctttcttttgagtaccttgatgatgatgaatcaagaagacaatttcttgagtatcaatgataaaaccatggatttataa

SEQ ID NO: 121051 - DNA, 288 bp, Enterobacter cloacae
ttgaaaattgaacatcttatttatgatacactacccttccgtgagaaatttaagatgaaatcagaagacacccttgactggtatccggcacaactaccgcctgtgaaaattattcttggcgaagccgtgctggctgtgggtaaacagggccgaccgattaatacccgcaccttgctggaataccttcaggtcatgcaggacaaacaaaaaaggcgggatgacaaaatcgccatgcagactgcgattgatgttctcagggataatcagcgcattaacggcagacgttaa

SEQ ID NO: 121052 - DNA, 8583 bp, Enterobacter cloacae
atgaaaatgatccccagagcgtggtttaaccgctcccgtattccgaagaatgctgccgaaaacataacgttttcggcgaacgatcctgccggtgaaagctcgccgcggtcagaactcttttcgaccgtccagatggaacgctacggccagaagctggcgcgaactcataaagtatcaccggataggcatccttattatcttctgaaacggcttggcgacaatgaggccgtcattacccaaaactgctatgagcttaacgcgggtaaaaagaccagtatcatgcccgccggtgaatggctgctggacaattattatctgattgaggaacaaatccgcactgtccgccagcatctgccgaaaagctttggcaaaggtcttccgtcgcttgtatcgccgttgaattgcccacgaatttatcatattgcatcagaggccattgctcacggcgatggccgctgggatgccgccagcctgaccagctatctcactgcctatcaacaggtgacgccgctgacgctgggtgaagtctgggcgttaccgggaatgctgcgccttgcactgattgaaaatcttcgtcgtatcagtatggaagtgataaaagcgcagcaggacagaaaccttgctgatacgtggataacaaggattgtcgaatgcgcagagagtgcgcctggtgatttaatcatggtggttgccgatatggcgcgctcccgacctccgttaaccagtgcgtttgtcgcagagctggtgcggcgcctgcaggggcatggcaacgcgctgtcgttacctctgacctgggttgatcagtgccttcgggaacaggggatcaccactgacgttctcatacatagtttcaatcagcagcttgccgccagccagctgtccgtcagtaacagcatcgcgggcctgcgtttattgagtgaaacggactgggctgatttcgccgaaacgataagcgttgtcgaacaggcattacgcaatgatcctgccggcatctatccccggatgcacttcaatacccgggatcattaccggcacgtagttgaggttctggccagggacagcggtctcagcgagcctgaggttgctgagaaggtgctggcgctttcagaggaaaaagcgcccgatacaccggaacatcatgttggttattatcttgcgggcgaaggtcgacaggcgctggatattcatctcctggcagacgcctcaaggctcatacgcttgcggcacagtttcaacagaataaccctgctgtcatggcttggaagcctggcgttgctgacaaccgcagcgaccgcagcaatattgcacgaaaccgccatgcagggcgcagactggctattgatcgcggtgatattacctctgattatcgcattaactcagttaatgagcgatttgctcagtgatgcaaccacccgttttcgcgttcctcgacccttaccggggatggatttttcagccggtattcccgctgacagtgccaccatgttagtcattccctgcatgttgaccagccacgaaagtttcagccagctcctcaccagtcttgaagtctgctggttggggaatgaaaacgaaaatctcaggttcgcgctgctcactgattttgctgattctgaaaatgaaccctcgccggaaagtcacgcgctgctcagacaggctatcgccgatacgcaggcgcttaatcgccgctacccctccggccgaccacgtttttatctgttacatcgccagcctgaatggaacccctcggaaggagcgtggatgggctatgaacgcaagcggggaaaactggcgttactgaacagctggttgcgccatcccggaacgcaattcgtcagcgttgcagagatgcctgcccaccttttaccgggtcacataaaatacgtcattaccctggacagcgatacggtgctcccgcgcgatacggcacacaaactcgtcgcgacgatggcgcatccgctgaatacgcctgagtatgatccggtacgccagagggttgtcaaaggattcggtattttacagcccggtcttgcggaggagataccacgcaacggtcaggggcgttacgcagccctgcgcagcagcgtaccgggcaataacccttattcgatgatgtcttcggatatttatcaggatctctttggggaaggctcgtttgtgggcaaagggatttacgatgttgatatttttatgcaggccactaccaacatctgcccggaaaatctggtactcagccacgatctgcttgaaggatgctatgcacgttcgggtctgctgagcgaggtgttactgtacgaacagtaccctaataattatctgtcggatgttgcacgacgttcacgctggatccggggtgactggcaactgcttaactggctaaaaccacgcgtcagaaaagccgatggaacccgggtcaggaatccgctgaccgcgctttcttactggaaattactcgataatctacgtcgcagtctggtcgccccctccttactgatattgctgttcttcgctctgctttgggtacccaacccggtttactggctgggcatactgttgctgatatggctgttgccagccatcctctgcattagccacgaccttctgcataaacctctgcgtcgccgcgtgaagccgcatctgttaatggtgggggcgggcgcgctaaagcgtctgtcaggtatcagccttaattttgcgatactgccgcacgaagccggatattcgctgaaagcgatcgccgtgacgctatggcgactggggataagcaggcgtcacctcagccagtgggtcagccacagccaggacagcagtcaggccagacccactgttgcacgtttttatcaggcgatgtggctgaacgttgccggtggcgtggcgctgacaatactgaccggacaatttgccccacagctgctggggattgcgttaccgatcggtttggtatggtgtgtggcaccgctgctgatgagctggctgagtcgccagcccgtgcgtaaggttttttcgcctaatcaggaacaaaaacagctgttacgccagacaagccgtgaaatctgggctttttttgaaacatttgccacagcaaaagagaactggcttccgcctgataattatcaggaaataccacaaccgacggtggcacaccgaacttctcctaccaatattggtctttcacttatggctaacctgacggcatgggactttggctacctgcccggcggagaggtgctccggcgcgtgtcgctcacgctcgacacgatggataaaatggagcactaccggggccatctctacaactggtatgacacccgtacgctggcccccctaagtccacgctatatctccagcgtcgacagcggcaatatggccgggcatttattgaccctgcgtgcaggcctgtccgccatgcgtcatcagcctgttttaagcaaccaacagatactggcaggactgaacgatacgctggatattctggaaaaacagtggggtaagaacccacctgacagcctgagactgctgcgcaagcattgcctgaacgcggtgtcgctctctccgcaggcgcttttcagcgaactgaaaagcatgcgcacccagtgcaaccatctgaccagcgcatgtcatcagggatctcctcttcagatgcgctgggctggacatctggagcatcaactggttcagctttgccatgagtggtctctgttgcttggctggttgcctgcatcctggaatgaacagacgctgccgacgctgagcgagcttgcccgtccgacattaaccggtacaggaacgcctccggcgtcagtggcggagcaggcccgaatgcgactcaatattatcaccgagctggaacagcggctggatgagcatgcccggatggatttcgcctttctgtacagtgaagcaaccagtctgctcagcgtcggttataactgtgacaccaatatgcctgacaaaagccactacgatctcctgccgtctgaaatccgcctgaccagttttcttgccattgcgactaatcagctgcctcttaaaagctggtacgcgctgggtcgattgtttaccacgattgataatgaaactgccctgatgtcatggagcggatcgatgtttgaatatctgatgccgaatctggtgatgcccacctggcccggcagcctgctcgatgaaatgagtcagtcggcggttatgcgccagattcactgggggaaagaacgcggggtaccatggggtgtttcagagtctggctatcatgcttttgatgttcagcataattatcagtatcaggcatttggcgtaccggggctcggtctacgcagggggcttgccgatgacatggttgtcgctccttacgccacgctgctggcgctgatggtttccccgcagaaagcctgtgagaacctgttcaggctgcaaaaaaatggtgcatgcggagaatacggtttttatgaagcgctggactataccccctcacgtcttgcaaccggtcagctctatgcggtggtacagtcctggatggcgcatcaccagggtatggcatttcaggcgctggctcatgtgctgcttgatgcccccatgactgaacgctttatgtccagtacggtattccggtcagcgagtctgctgttacaggagcgcgtgccggatgcggtcgatctgtacagtccgcgccgtcattttgaatctcatgagggcatggtcaaacccgttcgctatgaaccccgtattttctatagcgtggatacccccgccccggatattcaactcctgtccaacggccattatcatctgatgttgaccgcgggcggcggcggttacagtcgctggaatgatattgcactaacgcgctggcgcagtgataccacccgtgataactggggagcattctgctacatccgcgatacccagacgggagatgtgtggagcaatacctggcaaccaacaggctacaccagcggacaagacgaggaagtgttgttcaccgatgcgggggcagaattcagacgcagcttagggggactcagcgtcaaaactcaggtggtgatctctccggaggatgatgttgaattgcgacggctcacactgattcatcgtggtcgcaagcctcgctctctggagctgacaacctatgctgaagtggtactggcacctgatgccagcgatctggcacacccggcattcagcaatttgtttattcagactgagctggctcctgagcgtgacgctattctttgccaccggcgcccgcgctcaccgaatgaaccgggcccttgcctgtttcacatgatggtggtgcacggcgataaccgacataacgtgtcgtttgaaacggacagggcaaggtttattggacgtggcagaaaccctgcgaatgcacaggcaatagagacgggagggatgctaggcaacacgtcgggctcggtgctggatccgatactggcaattcgcaacgccattattctgcagccggggcagccggttacgattgatatcatttatggcatcagcgagacccgtcagcagagcctggcgttgctggagaaatatcgcgattaccctatcgccgatcgcgtctttgaactggcctggtctcacagtctggtggtattgcgccagatgaacgccagtgaagatgatgccacgttgttcaatagtctcgccagcgctgtgctttaccctgtccaggagctgcgcgccgaaggccaggcgatcggccgcaaccggcgtggccagtccggactgtggggctgggcaatttcaggggatctgccgatagtgctgctgagtataaccagcgaggaaagtatcacctcagtgaccacactgattcaggcacaccgttactggagacagaaagggctggatgttgatttagttatcctgaataacagccccggcggctaccagcagggattacaaaatcaggttatggagttaatttatgccgggtctgaagccagtctgctggataaaaaaggcgggctttttgtccgcaacggtgagcatctctccgctgaggataagttgcttttgatgagcgtggcctgtctttatcttgatgaccgcgcagggggtattaatgagcagcttaaccagcgtattcataccctgaaatcgccggcaagggcattcattccgcgtgctgtgcgcgagcgtaatcaacatacggactggagccctgataccagtcagttatgccatttcaacggatacggtggattttctcaggatgggcgggagtatcagatcgtccttcgggaaaatgcgcttacaccggctccctggtcgaacatactggcaaattctcgttttggcagtgtgatctcagaggcagggcaggcctatacctggtatgagaatgcccatgaataccggttgacgccgtgggagaacgatccggtgagcgatcgcagcggcgaggcattttacctgcgcgatgaagagagcggggagtgctggtcgccgacggctttacctgttcgcggacacggtgattacctgacccgccatggttttggctacagcgtttttgcccatcgtgagagtggtatagacagcgagttgacggtcctggttgctgaagaagatccggttaaactggtgctcctgacgctcagtaactcttcgggacggacacgtcaactttccgtcacaggctatgtagagtggacgctcggagaaacacgaacgcgctcagcccctcacattgtgacacatgtggccagaacgcccggcggctgcgggatacttgcgaataacttttatggtgataatggtggcggccgaactgcattttttgccgtcagcggtaatgactgttctctgacaggggaccgccgggagtttattggccgtaatggttcccttcacgccccttcggctatgaaactgcaaaagctttctggtaagacgggggccggtctggatccctgcggagcggtgcaatcggcggttacattaattgacggggaccagaggacgtttatttttatcctcggtgcagaggagaatgatgtttgtgctcaggagacgctggcccgctacatgaacgaggatacggtccgccaggagctgaaccggattcataatcactggcacaatgttctcgataaaatcgtagttaacacccccgacacgtccgtaaatttactggttaatggctggctgttgtatcagacggtcgcctgccgtcttatggcccggagtggctactatcagtctggcggtgcatttggttttcgcgatcagctgcaggatacgctggctctgagccacgctgctccggaccggatgcgtgaacagataatactctgtgcatcacggcagtttatcgagggggatgtgcagcactggtggcacccgcctcacggcaacggtgtgcgtacccgctgttccgatgactatctttggctgccgcttgctgtttgccactatgttgaaacgacgggggatatggatgcactggaaatacgcattccttatctggagggacgctcgcttcagcctggtgaagagtctgtctatgacacgccggtcatcagcggcaccgaagagacactctggttacactgcgtcaaagctattcactatggacttcgcttcggggagcatggcctgccgctgatgggggctggtgactggaatgacgggatgaaccgggtgggtatcgaaggcaaaggtgaaagcgtctggctgggcttcttcctgtacgacattttgcagcggtttgcagcgctggcggagcgcaggctggatgaaagcgtcgccgcgatgtgccgttcacaggctctgcgcctgcaaagtaatctcgaagcccacgcctgggatggggaatggtaccggcgcgggtattttgacgatggtactcccctgggatcgaaaacctcacaggactgccggattgatgcgattgcgcagagctggtctgtattgtccggcgccgcgagcccgggacggtgcgcaaaggccatgcaggcgctggataagcaccttgtggataacgaaggagggctgatcaaactgttaacgcctcctttcgacggacacggtccaaatccgggctacatacaggggtacctgcccggcgtgcgggaaaacggagggcagtatacgcatggcgccatctgggcagtgatggcctttgcccgaatggggaatgccggacgagcctggcaactctggtcaatgctcaaccctataaatcataccctgaatgcggactctgtcgggatttataaagctgagccttatgtcatgagtgctgatgtctacagcgtcgctccccataccggacgtgcagggtggagctggtataccggttccgcaggctgggcctggcgtttacttaccgaggaattactggggataaaacgttccggcactgactttagtgttcatgccaggttaccggatgagtggtcgtctttttctatggcatatcaatatggtgaaagccattatcagattagtgtttcacgcggcgatgcagaatattgcgtgacgctggatggtgttctcctccctgatgacagaataccgctgaaggatgatggacaaaaccatacggttgagatcattcagaactga

SEQ ID NO: 121053 - DNA, 219 bp, Enterobacter cloacae
atgacctctagaattatgggcctggttaaatggtttaacgaagacaaaggttttggcttcatctctcctcttgatggcagcaaagatatctttgtccatttgtctgcacttgatggcgacaactttaaaactttatttgaaggtcagaaagttgaattcgccattcaccgcggagacaagggtcctgctgctgcaaacgtaacactttgcgataaataa

SEQ ID NO: 121054 - DNA, 405 bp, Enterobacter cloacae
atgtcagatgctctaacacagttaaacaatatccgtaccttacgttctcagactcgtgaaatgtcattagatgtactggaagatgttctggaaaagtttaaaattattcttatagaacgacgagaagaagagacattacgtcttgcaaatgaaagtcagcgccgcgataaactggaaacacttcgtcagatgatgcttgatgagggtatcgacccctccgaacttttagctgctattggctctccgggtaaggctaaaaggacgcgctccccccgccccgcgaagtatcgatatactaacgaaactggagagtcaaaaacatggtcaggtcaggggcgaatgccgaagcggatctcaaatctgattgctgaaggtggggaattaaaagattttgaaatcagctaa

SEQ ID NO: 121055 - DNA, 876 bp, Enterobacter cloacae
atgaataaacctgatggccttcaggcctttgaacaaccgcttgcgtcgcttccgtacacgcttcgccagcttattcttgaacgtatccagaacctgactcactacgagccggtgattggcatcatgggcaaaagtggtgctggtaaatcctctctctgcaacgaacttttccggggcgaggtgtccccggtgagtgacgtgaacgcctgtactcgcgacgtactgcgcttccggctgcgcagcggttgtcacagtctggtgattgtcgatttaccgggtgtaggtgaaagcgggcgacgggatcatgaataccgggccctgtaccgtcgaatcctgccggagctggatctggtgctgtggctcattaaggccgatgatagggcactgaccgtggacgagcagttctggcacggcgtaatgcaaccttacaggcaaaaggtacagtttgtgattaaccagtccgacaaaatcgaaccctgtcatgaatgggataccctcaccagcaaaccttcaccgcaccaactgggaaatcttaaagcaaagcaggctgcgattatggcgatgtttaaaccgtatcatccggtctgtgtggtgtcagccagcactggctggggtattgaggagatggtggcaaccatgatgcgctgtctgcctgaccgcgccaccagcccggtagcgacacaactgcacgggagactctgcacagagccggtaaagtcgcaggcccgtaacaatttcggtgaagctgtgggccgggttttcgataccgcagaatcatcttcgttcatgcctgcatcgctgaaaacggtgattcgtagcgtgcgtgatgcggtggtgtcggtcgcacgggccgtctgggactggatattcttctga

SEQ ID NO: 121056 - DNA, 1116 bp, Enterobacter cloacae
atgggctaccgttccacgaactacggccgcggtcaggcgctgcacggcgacagaacgaccaccggcgcaatatgttgtagcaccctgcccaactgcaccgagcacgggcgcggcgttatccgcgttggcgataaaactacggcatgccctaaatgcggcaaacagggcgttgttgcagacggcgaacctcgcgttaactggatgggacaaacctcagccgtcgatggttctgtcgtcatttgtggctgcccgcacggaaccaaccgcgtgatcgccccatcgggagagtggctcggctccggtccctctcctgaacagatcgcacaggaaaagcatcaggccatgctcgcagcacgcctaaaagagcaagaggccgaagcgcagcgacaagcagaagaacgcgatcgcaaccgggtatttgcgaaatcctgcctgcgcggtgaaggctgtaacgatgcaggcaccggaagagagccccacaccaatttcggcgaaatggcattttaccaggccatgcccaacgacgccccgcagcacgcccaggcggcaaagcgtaaggcgattccaaagccgaagcaacgcagcgcgctttatctctggtggaacgggcatcacgaggagatggactaccaggctgccgttgcggccgaagaaagggcctggaccgcgcggaccgcgatcgccgatgccagcgaactcgcactcgttggcgggcgcaccatcacttccggcacatgggccgtgcgcggcgctgcacttggcgagatagctacgggaggccttggtgcacctgtcgcagggctgctgatagggatgtatcccggcaagctgaacgacggcgaacaggatttcatcgacaggatgcgcgccgaacagatgcgggaagcccctacccgcgttcgcttcacctgggagaacgacgccagcggcaatccgacaccgcgcggctggcatacgccgccgggcaaagatagcgtgcgcgttcgcaggatggagtgggatagccgacgccaggcgtatacctttatccgagcgcagactgcactgcccctggtagtaatccaggtcgagatacatcagacgttcccgaaagtcacgacgcagcgtgcgctctga

SEQ ID NO: 121057 - DNA, 171 bp, Enterobacter cloacae
atgcaaaacgggtattcccgtttttgtactgactatttacaaaaaaatacctgtgcatccctacatatgactaatcaggtaattagcataactatccatatagctgaaacgcgtaaagcgatcgttatcgcacaattaatcacagccgtgacgatcctgtgtctggtttag

SEQ ID NO: 121058 - DNA, 1212 bp, Enterobacter cloacae
atggaaaaaataaaaccacggctatatcaactgacgatcgctttaagcctcatctccttgatactggctttagtcagttctgggaagcaaagagaatttttctatatcgctatttacgccagtattattggcctggctttcgaatataaaaaaatcactctgcgaccttttactatagcactgcccattctgctgattggattacttaacctcggctggtacttactctatgagtatcataacgagggcctcaacctttacagcgactacctcggtgccagcaaaaagttaattttagcgagtgtcctgattttctatatcgaccgctttaagttttatatcgataaggataccttcaggaaattcttcttcttcgcaacggccctggggtttgtgctcgccacagggtatggcttgtggcaggcctcgcaaggtatgactcgcgttgagatggcaattaaccgtgccaccgtttcagcttatgtttattctgtcctgtcactggctttcgtatacagtctttaccttcaacagaacgtgaatctgtatgttgttgcgggcttcactatattaatctcttacttcgtcatactgttgacggggacccgcgctgcgatgggtttatatctgcttctggcgattgtgctcacgctttatcatttcagaaagattcatcttaaatcagccctcatctttttatgcattgttgcaggcgttgtaatcgttagctacaagccattgatttcgccaaaaatacaacaaacccaacgtgaggttgaacgttatcaacaaggttttgaccgcacctcactcggcgcacgtttttcgatgtggactatcgggatcgagaatggtcttgcccatccgttagggcaatcgctggaagagcgtgaagcgtggacccgacactacattaaagacggccatcctcaccttggcagtgcactcgaatacatcaaagtccacctgcataatgaatttattgagaaatactctttgcaggggatccccggcgtagcggtaatgctctttttcttcgtttcgatgattgtgtatgccctacgaaacagaaatgcactgctgctgacgtcgatgcttcttttgcttttgtatggactgacagatgtcatactgctcagttcagaagccttaatcttctttatgattttgtttgcgctaagtacacctttctcacaaacaaaacagcaataa

SEQ ID NO: 121059 - DNA, 714 bp, Enterobacter cloacae
atgaacaaactttttttactgagcggccttgctctggcgatctcttctgcctgccacgcggaactgcgtacctggcccgatccgaccggaccttcacagtccgactttggcggcaccggcctgatgcaaatgcccgacgcgcgctttggtcgggaaggggaattcagcgtcaactaccgcgataacgaccagtatcgtttttactcctcttcggtcgtgctctttccgtggctggaagggacgattcgttataccgacgtccgcacccgcaaatatagcagcgacgaggatttcagcggcgatcaaagctacaaggataagtcgttcgattttaaggttcgtctgtgggaagaggactatagcctgccgcaggtggcgctcggcaagcgcgatattgcgggcaccggcctgttcgacggtgaatatctggttgccagtaaaatggccggaccggtcgattttacctttggaatagcctggggatatcccggtaatagcgacaacgtgggtaacccgctgtgccacgacaacaataagtattgcacccgcggcgaatcacatgatgccggggatatcagctttagcgatatgtttcgtggtccgacgtcgctgtttggcggcctccagtatcagacgccctggcagcccctgcgcctgaagctcaagtatgacggcaacaattatgccgatgattttgccggctccattaagtag

SEQ ID NO: 121060 - DNA, 738 bp, Enterobacter cloacae
atgaacagactcagaaaatggttacctggcgtagggctatctctcttcagcctgcccgccttatgcgcaagcgtcgttaccgtgcatcagccgggcaaaacgtggtctgctggacaggccgatacgctctcccggctggtcacccagccgcagctgaacaacgtctggtggcagggcgctgtcatcgcaaccccttccgccacgcggcgagcgcaacagacgcaacagcaggtgctggcgtcgctttcagcctggcagaatcgcgccgatgacgagcggatcgcgaccattcgcgctgtcgctacacagacccgctccctgcggatcgtcgggcgacagtttatcagcctcgatccagacgccgtgcgtaccgacgcccgcggcgatcgttcccttgagggccgttacgatctgtgggtctcgcctgcgccccgcaccgtcacgctgatgggggcggtcgccacaccggggaaactggcctggcgtccgggcgcaagcatcagggattacttacaggggcagctgcggctggctggcgccgacaggaataacgtgaccgttatcgatcctgacggcagtacggttgttgcgccggtggcgtactggaacgcacgccatattgaagcagagccgggcgctgttctgtgggtggggtttgatccccgggcggtgccggacgattttaccggtctgaatgagcaaatcgttgcgctcctgacgcggcggatacctgactga

SEQ ID NO: 121061 - DNA, 1671 bp, Enterobacter cloacae; identical to SEQ ID NO: 117009

SEQ ID NO: 121062 - DNA, 1185 bp, Enterobacter cloacae
atgccactcacagacattcaaattaaacgagcaaagccccaagacaagccctacacattgaacgatggtcaaggcctgtcattactcatcaatccagacggctcaaagggctggcgcttccgctttcgttttgccggtaaagcacggctaatgtcatttggcagctacgaccttgtgagccttgcagaagcacgtgagaaacgcgatacagctcgtaagcaggtagcaaacggcatagacccagtagaagaacgtaaagcccaaaagctggcacagcaactctcaacagagaattcattcgaagccatatgtcgagaatggcacaccaacaaagctgaccgctggacagtggcctatcgcgaagaaatcattaagacatttgaacaagatgtgttcccgttcattggtaaacgccctatcagtgaaatcaaaccgttagaactgcttgaagtattgagacgaatagagaagcgtggagcactagagaagaccagaaaagtgcgccaaagatgcggcgaggtctatcgctatgcaatcataactggccgcgcagaatacaatcctgctcctgatttggctattgctttgaccgttccgaagcaaaagcatcatccatttttatccgctgaagagttacctcattttattcgtgatcttgaagcgtataccggcagcatcatcactaagaatgcgacaaaaatagttatgctaactggtgttcgaacacaagagatgcgctttgctacgtgggatgaagttgaccttgagaaaggtatttgggaaatcccagcagaaaggatgaaaatgcgcaggcctcacatagtgccgctttctactcaggtaatcgaccttttcaagcaactcaagcctattactggtcactacccttatatttttattggcaggaacaaccgtagtaaaccgatctcaaaagaaagtgtgtcacaggtaattgagttgcttggttacaaaggacgtgctaccggtcacggttttagacatacaatgtcgacaattttacatgaacaggggtttgatagtgcatggattgaaatgcagttagcacatgctgataaaaacagtatacgaggcatttataatcatgcgctatattttgaaaaacgcagtgaaatgatgcaatggtatgctgacaacttatatgcatattataaattgccagcatga

SEQ ID NO: 121063 - DNA, 1365 bp, Enterobacter cloacae
atggataaaaatttaatagattttcttttgcaaagtcaattatatgacgatattgattcctcacaggtatattcgaatgttcctgattcagattttgtgaggttgttagaggagtattacagttattcttcagaagtggatgctcaagctaagtattttctggaggatgatgggtttttgaatttatatatgacggatataaatgattctagtttttattacaaggctcttcttagcattgataatataataattaatgatgaaattattgagtgctattaccaagctaaacgcacggatatcgatgaaacgatgagtaatatgctttgggaaaaggattcaaacatcattccaaagttaaagtctcaggtggcaaattttataaattttataagaaaaaacaaagatcttattgctataggttctatacagattgttgggagaaaatcgagcgcgtatcactatgttacaaagcaagctgtgcttctgaatgatgccgatgaggaaaagttgcatgaaatgatatccaatccggctattgtcagcgaatatttaaatgctgcaagttataggagttgtaagcgcctatctgctgaagggcatataaaaatactagacgctcaagaaataagtgattttattattattaatttgagtgattgtactagtgactatgtgaattgttataactactctacaatggaggttattgattatgatcaaagtagcgggttgttgagattccaaataaaaaaagacacacctcctgagactgaagaaattttcaagaactgggtcaaatcctccattcacagaacaatttctcagcattacaatagtttttctatagattatggatttgcctattatctaaattcatcattcacaactacatgtccttttattaataaaatacttccttatctaaatgacggttcaagtgttattcaaaaaatggttgaagttgattctccaatattgaataatctttcaattgattatatcgcaaatgtcaaaaaagactatggtgagagttttaatgcttataagttaatccttaaagatatagctagacggattcaatttgcaagtagtgaaaacgagataataggattacatcaagagcttaaagagaaaattatagatgaaggtatgcctgaagttaaaaaggcaataaaagatatgaaaaagaatgttgttttaaattcagcttttgattttgggttgctggcggttgggttaactacaatgccagcaagttttcttgcagtagctttgcaagcaggaaaaacagtttatgattataataatagaatggcggcgattaaaaaccacccatcctattttatactcaaatcaaaatga

SEQ ID NO: 121064 - DNA, 564 bp, Enterobacter cloacae
gtgaccacactgacgctacagaaagcctttgaggcctgtcaggcaaacaaatccgcctggctgcaacgccgggatgaactgaagcaggccgaacaggcataccgcgaacagcttgccggtaacggccgcagcggccggagcctgcaaaccctgcgcgaaattatcgacgtgaaaaagtgggaaattaaccaggctgccgggcgttatattcgctcgcatgaggaggtgcagcgaatcagcatccgtaaccgtctgaatgattttatgcaggcacatggcgcggagctggccgccgcccttgccccggagctgatgaattattccgggcagcattccgccattcagcgctgcgccatgcagcattcactcgactatctgcgtgaggcgctgcaggtctggctggccgccggtgaaaaaattaattattcggcgcaggataatgacattttaacggccatcggattcaggcctgacgcggcttcgcgcgatgataatcgtgaaaaattcacacccgcacagaacctgaattacacccgccgacgcgcagagctggccgcgcagtag

SEQ ID NO: 121065 - DNA, 219 bp, Enterobacter cloacae
atgtttcactgcccgttctgcaaaaccagtgcgcacgcccgcaccagtcgctatctgtctgagaacgtcaaacaacgctatcaccagtgcgtgaacgtcgagtgctcggcaaccttccgtacacttgaatccgttgacggtattatccgttcaccggttactgagccggttatccctgtacccgcaccggcggccaccgttaaccgtgccggtgcgtga

SEQ ID NO: 121066 - DNA, 744 bp, Enterobacter cloacae
atgaaacccgaaacagtcattacccccctgcagaatgtagccgcccaacagtccgcagagagcagccagcgcatcacagacaagctgagcgcattcactgcggccagaaacacacatgcggccagcatgaaggaactgaaagagattgatacgtccattgaacgctgtaagcaggagcggcagaccgccctaagtgagagtgcagaggcggagcaggactggcgcagtcgcttccgaactctgcgcggcaatctcacccctgaaatgaaagctgagcacagcaggcgtatcgccagtcgcgagctggccgacgagttcaccggcctgattgcggagctggaaactgaccggacacgcgccatgctgaatgcctgctcgaccgccagtaaatacctgtcagcgcatgatgatgcctttaccacttatgccggtgcggaatgggctcaggcggtcaacacgctccccgccgcgctcattcgtgctttcctgctgcgcattcgcgccctcgaaatgcagggtgacagtgcaccccagtccgttgtcgtcggcgagctgcgcgatgcgctgagccgtcagggcagtctgtatcacttcgatatgaagcaggagccggtattgtctgtgacgggcatgcaccggccgcagattaacggtgtggatatggagctgttacgcagcccggcgaagagaatgatgctcgccagaaaactggctgataatggcgagacaaaagcggaggcataa

SEQ ID NO: 121067 - DNA, 267 bp, Enterobacter cloacae
atgcacaccgatttttcttccccgtcttctgcccctgtcgcgccgctgatgtcggtctctgatgccgttcaggagcgctttatccgcctgcctgaagtgatgcatctgtgcggcctgtcccggtcgaccatttacgacctcatcagccgggaggctttcccgaaacaaatcagcctgggcggaaaaaacgtggcgtgggcgcagtctgaaattactgcatggatggcggatcgcattgccgaacgtaaccggggctatgacgcatga

SEQ ID NO: 121068 - DNA, 558 bp, Enterobacter cloacae
atgatgatgaccgttcagcaaaccccccctttttctggcttgcttcctgtcgccgtttccaggtatagttttcccgctgtcgcaaaatcggcagccggaattggcgttccgtgtaacttattggcgacttcagacgcgccttgcgtctttttttacgtcgtagctcaggcacacccattttccgggctgtggtgtctatgtgtacaccattgttccagcaagataatggtagtccgggcggggcagccttcgggctggccggtttccaataaggccggttacgccaaccccgttcgggctgccaccagtgaaattggcgtttccggtggtagcagcaaccgctacttattggaggctgccatcatggctactatcctcaccccatcacacccgcaatttgtctttgtgtttgccgccgttcgtcgcgcagaccgtaaaccccgtatctgtatgctccgcaccgttgccggtgatgaacacgctgcacgtcgttccctcgttcgcgattacgtcctctcgtttgctggccgtctgccggttgtggaggtgcgcgcatga

SEQ ID NO: 121069 - DNA, 228 bp, Enterobacter cloacae
atgagacacaccaccattaccgcccgtgacctcgaatgccttgagcatatgcgcaatgtcggccagctcgtcaacgaactgatgcaggtgcaggactgcgccaccgttcgtcgtgaccctgcgcagcagttaaagctcacctccgtgatttaccttatgaccgcccagctcgacggcgtggtcgaacgctgcaatcagcgctggctgaccggggagggcaacgtatga

SEQ ID NO: 121070 - DNA, 321 bp, Enterobacter cloacae
atgaaaaagcctctttcacccgtattacgcgccgcgctctatcgccgcgccgtggcctgtgcatggctgacggtatgcaagcgtcagcgccgctacccaaacctcaccctcgacgcgctggaaagtgcgattgccgacgagctggagggcttctacctgcgccagcacggcgaggaaaaaggccgtcagattgcctgtgcactgctggaagatttgatggaagacggaccactcaaggccgcgccctcactgtcctttctcgggctcgcagtaatggatgaactctgcgcccgtcacattcaatcgcctgttgtgcactga

SEQ ID NO: 121071 - DNA, 2334 bp, Enterobacter cloacae
atgaaaatgaacgtaacggaaaccgtaaaacaggcgtgcggccactggccgaacattctccctgcactgggcgtgaaggtgattaaaaatcgccatcagtcctgcccggtgtgcggtggctctgaccgtttccgctttgacgataaagaggggcgaggcacatggttctgcaaccagtgcggtgcgggtgatgggcttaagctggtcgagaaagtgttcggcgtgaccgcatcagaggctgccgggaaggtgaacgccgtgaccggcaacctgccgccggttgccccggaaatgattgcggccgcagaggctgaaacggaggctgaacgcaaggcggcggccgcactggccgtcaggctcatggggaaaacccgcacggccagcggcaacgcctatctgacccgcaagggcttccccgaccgggaatgtccggtactgtcggttatgcaaaaaaccggcggcgtgacgttccgcgccggtgatgtggttgtcccgctgtatgacgattccggtgcgctggttaaccttcagcttatcaattctgagggtctcaaacgcaccctgaaaggcggtcaggttaaaggggcatgtcatgtcatcgaagggaaaaaacaggccggaaaacgcctgtggatagcggagggctatgcgaccgcgctcaccgtgcatcacctgaccggtgaaactgtcatggtggcgctgtcgtccgtgaacctcctttctctggcgagccttgcccgtcagaaacacccggcctgtcagattgtcctcgctgctgaccgtgaccttagcggcgatggccagacaaaagccaccgcggccgcagaagcctgtgagggcattgtcgccctgcctccggtgttcggtgactggaatgatgcgtttatgcagcacggcggggaggccacgcgaaaagcgatttatgacgccatccggccaccggcacaaagcccgttcgacaccatgagcgaggcggaatttaccgccatgagtgccagcgacaaggcctggcgggtacatgagcattacggcgaagcgctggcggtggatgcgaacggccagctcctgtcccgttatgaagcagggatatggaaagtcgttcagccgtccagtttcgaacgcgacgtagccgggcttttccagcgcctgcgcgctccgttctcgtcggggagaatcacctcagtggtagagacgctgaagctgattattcctcagcaggccgcaccggcacgccgtctgattggttttcgcaacggggtactcgatacccggagcggcctgttcagcccgcacagcaaatcgtactggctgcgcacgctgtgcgacgtggattttaccccgcctgttgagggggaaacactggagacccatgccccgaatttctggcgctggctcgaccgtgctgccggtagcagaccagaaaaacgcgacgtgattctggccgcgctgtttatggtgctggcgaaccgctacgactggcagctctttctcgaagtcaccggtcccggcgggagcgggaaaagtattctggccgaaatcgcgaccctgctcgccggggaggataacgccacgtcggccgacatcgacacgctggaagacccgcgcaagcgtgcctccctgattggcttctcgctgatccgtctgccagaccaggaaaaatggagcggtgacggcgcaggactcaaggccatcaccggcggtgatgcagtttcagttgacccgaaataccagaatccgtactcaacgcatattccggcggtgattctggccgtgaacaataacccaatgcgcttcactgaccgcagtggcggtgtgtcgcgtcgccgggtgattattcatttcccggagcagattgccccggaggaacgcgacccgcaactcagggataaaattgcgcgcgagctggccgttatcgtgcgccagcttatgcagaaattcagcgacccgatggcagcgcgcgcactgctccagtcgcagcagaactccgacgaggcgctcagcatcaagcgcgatgctgacccgacgtttgatttttgcggctatctggaaatgctgccgcagaccaacgggatgtttatgggtaatgccagcatcgtcccgcgcaattatcgtaaatatctctatcacgcgtatctggcctatatggaggctaacgggtacaggaacgtgctcagcctgaaaatgttcgggctggggctgcccatgatgctgaaagagtacggcctgaattatgagaagcggcacacaaagcaggggatacagactaacctgtcactgaaagaggaaagctacggcgactggctgccgaaatgcgacgaacccgcagcgacttaa

SEQ ID NO: 121072 - DNA, 699 bp, Enterobacter cloacae
atggataagactagagactttattcttggagggctttctcgctttggcttggctgatttgcccggcagaccttacgattctgcttttgaattaatagcctccccacctatacgcaaacgcctcattgtgatgggcttcaatggttcgtcagctgattcccatatgaccaacagccagtctattattcaggatcattcaaagccttttgtctcgaatgtccatttagggacgcagggggaatggggaattactcacctagctaagcgactacaacagatacctatcagcctcggttacagatgggaagacgtagtatttactaatgctataatgatgtgctcaaccaatgcctcagcactcaaacaggaggcgagtcgacacaaactaactgtagaacaactcgtaaaatactccgcaagattttttgagaatgtcacaatccctctgtgtaagcctgaactgattatcgcttatagcaacagtctacaatccctttcagcagcaaatattttgctaaaacacttcggtgacccaagcactctcatctatacgcagcagaagggttattacacaactttcgctttctcagccgtactaaatgatgtgaaaatccctgtaatatgtgtccgtcatatgtctagatttaaaccttcagaagagttaattgaaacagctctagagatgatgaagggactttag

SEQ ID NO: 121073 - DNA, 840 bp, Enterobacter cloacae
atgtataaatatcttccctcagaaagaatcgatatacttgaaaataacttaatatgttttaataaccctttaaattttaacgacccatttgaattcaatacttcttttaactttagtagctttgaatccaatttatacgattcgttaagcactgtagaccttctcaaagaatttccagctgaattattaaatcagattgaaaaactgcctaaagaaattgtcagtaatttacttaaagatgcaaaaaaaacaatgctctcgatgtataaaaaagaaagaggaaatataataagagcagcagatactacaatgcaaagttttaactctaagttgataggaataacgaggattctatcattaacagaaacccctacgaatattttgatgtggggacactacgcacaggcccacagtgggtttatcattgaatttgatatcactcatccatttttctcacaacgtcgcggccaaaaagatgaatttggttatttacgaaaagttatatatcagaaagaatatccattcttggatccattctcagacgatcaaataaatcatttcctaataaaaagcaaagactgggaatatgaacatgaatggcgaatgttgttaccacaggccaattctggtaaaacaattaatgtatgtgaaaaagaatttgatctctatgaactaccatccgatgctatcaaaacgataatttttggttgcaatacctcagaacattttaaaactaaaatgttcaggttaataagttcacgaaccgactatgaacatatcagttttatacaggctaaaaaatcaaattcaagatttgagattgtattagacccgttatga

SEQ ID NO: 121074 - DNA, 429 bp, Enterobacter cloacae
atgaaacgcacacccttctaccgcaggcccgggcgaaccgggcaattctccggcctccgtgagcgcgttatctggatgattcagacgcgtggccgcccggtaaccggcagcgaaatcgccgagaagtttggcgtaacgctcatcgagtttaaccgggtcgccaacggcattacccgcggcaccgggcagatagcgcagatagttgagtcggaaaagtggatcaacgaggacggcatctgcgaccggactttcgacctggtcacgaagccaaaagtcgtaacaccacagggtaaatcgcggctattcacccggcgcgcaatagagcagtcgcaggaaggtagacggaaggaatgcattgaacgtgcagcccgccgtcgccgcctgattgctcagggcctctacatcgacgaaatggagtcagtgctatga

SEQ ID NO: 121075 - DNA, 624 bp, Enterobacter cloacae
atgatctggcacgacgtcgagcaaaatggtgaagagtgggatgctcttcgcctgggtaaggccaccgcttcaaacttcggcctgattatggctaacgatggaaaggcgtttggtgagccagccaagcgttatgcccttcagttggctcttgagcagattaagggatgcaagtctgagttcggcttctcaaacgaacacatggaacgcgggcacgaacaggagcccattgcccgcatgctctacgaagagatgaacttcgtcgacgtggataacggcgggttctttgatcacgaaacgtacggcgacagccctgacggcctcgttggccaggacgggctcgttgagattaagtcagtcattgccgccactcactactccaccctcacccgcggctccttcgatccagcatacagatggcaactggtcggtcaccttgattgctccggcagggattgggtggacttcatcagctactgctcagacttcccggacggtaagcagctcatcgtctatcgccttacagctgctgaatgtgaatcagaaatagcccggctacaagcgcgccgaaaagacttcctcgaacttgttgcggacacgaagcgccgcattctggagctcgaatga

SEQ ID NO: 121076 - DNA, 426 bp, Enterobacter cloacae
gtgctgacgatcgcccgcgcaacgttagaaaacgacaaaacaaaaaaatccaaagacgtttttaacaccgcttattttgaagagcgcgagctgcgccccggcgaaaagctcaagccgatgattctgaatgccaccaacagcaagatgctgaaaagcattactggatcgccattccttgaagattgggttggcgtgaaggtcacggtctacgtcgataagaatgtccggttcggaaaggaatcggttgaaggtctccgcttaagcccggcgcgcgtcacaaagccggtgctttcgccggaaaaaacgcaggcttggaataacgccaaggcagccttcaaacgcgatggcaaccttgatgcagtgctggcgagaatggacatttctccagaacatcgccgccagcttgagcaggagtgttcatcatga

SEQ ID NO: 121077 - DNA, 645 bp, Enterobacter cloacae
atggctgacattctcctcaaatacctaactgatttacctgccgccacagaggctaatgacgaagacctcatgcatataaatcagggtggaaatgataaatccataacaatcagctctctcattttatcgatggtaaatggagtgtatccgcccggaattaccatctggtttaatacatcagccaatcctaacgccctgttcccggggacattgtgggcgagagttccaggcgctggtagagtggtaagaattgcgaattcatcgggttctgacatttcagaaaccggtggcagcaacaaagtcagtataacgacttcaaatctccctgctcataatcacgaattttccggaaaaacagaaacgttcgactatggcacaaaatcgacaactactaatggtagccacacccactcgttaacggcttatcacggagagtggaagacggataacggcaggatatccgatggtgctctaggcacgtcatttacagccaccacagcggcttcaggttcacacaaccaccaaacgaatatcggcgctcaccagcataacttccagggtagcactagcgataccggtggaggcgctcttcttgacgtgacaaaccaatacattactcaagcggcatggtacagggtttcttaa

SEQ ID NO: 121078 - DNA, 2406 bp, Enterobacter cloacae
atggcagagcaaaaagtaaagttaacggacttaccatcggcaacagatacggtagataccgcgcagcttttgattaatcaaaacagtacagatcaaaaactacctgttacccacttcctgcgcgccaaaaacaacctttctgacattactaacgcagaacaggcacgtgcgaatattaacgccccgtcagttgatgaagtcaataataagctaactagttatataaatggttcttatacatttaatgcgggtgctaatatttcttccagaaaagattatatctgggatgaagaaagtaaatcgtggtactactggactggagatttaccaaaggatgttcctgccgcctcttcacctgagtcaacagggggcataggaaagggggagtgggctttaattggagctacacaaccaacaattaaaactccatttgacttcggcgctaaaggggatggagttacagacgacacactggcattacaggcatatattgatggtgtggatggcgacattgacttatacggaaaaacatatctagttagcaaaaacccagcacttgcaactacctatcccacggaacctgatttagccaacaatggatacaacttctgtccatgccttgcattggttggaaagaagggtatcaaaattcacaatggagcattgctggttaagacgcatggccttgatgcgttaagcctcatagcctgtgaacatgttactgttgatttaactatcaatggcccgggagtcttccctgcaattgataccccgactgggtatgcagagaaaggagaagccagattcgggtacgattctgctctagttcttgcaccaaacaatgcccttgataccagcgcatatactggtggcgcatacgcaggtgttacaggtcaatttcctaaatacaatgcagacggcagccaagcttcaggttggcagaacacatggggcaagttccttggcggcaacatcggtagctgggcttgcggtgtgaaggttcaacgtgcatgccgtggtattctcatcaacaattgtgacatctctggatttaactttggtgcggtaggtattggtatccgtaacacggcagcggcctatggagcaagtgattacaccacggatgcagatgtacctgatggcgtgatggttattaacacacgtattcgcaagtgctacagtgcaggtatctacgtcctctctggatatcgcctgaactacatggcgaataacatcgaagacatcggtcatcctgatggggatgatgcattgaacgcaagttacgacccaggctacggtatcacacatggtcgaaatcgaagaatccgtaatgtaacaattacagaaaatatgattcgtaactgccgacgcaagtgtattgacttccatggtggaggtcaggctatcatcgcaaacaaccattgccttgaacatggggttgtaggtatctacgctaagtgtggacccggttgggcacccaactatgaaccatataacctgattgtcgctgataactatgtccggtctcgtgatgtacctgccagtgaaactacaggtctactgatcggcgctaagtatacacgatgcattgatgttggtggtggtggcgaagccacgcaagccacttacccagaaccttttataaagatacacaataattactgtgaactccgtgcatacgatggggtagcaataaatacaggtgctggtgacgacaactatgcagttttccaagatattgatatcagccacaatagtgttgtaatgaagtgcaacacagtcaacaatacgacagaaggcatagctgtgaacgctggagcggaatccaacaaggtttacagagggcagcgcatacgcatggtgggaaatagcgttaagcaatttaataatctgtcacttaattaccgtgttattggctataaaatatctggcattccaaagtcaattatcgcccacggaaacactgtggatttaaacacgttaagccaggcaggattgctatcatcatttgttttagatgggagaacgtacatctcattttctggaaaccaagcattaagtatcggttctcgtagtacaatgtcagcctctgacctaattttctacgacaatgcaagaatctctattccagcaggggcggcgtcaacttcaattccagccagcttatttagaggggtttggcaggcaaccattgcagggtctggagatgcatttggagcaagacaggttcaacttgcaagcactgggtcctcaggcgtttctacggaggtagttcggtcttcatcaaccggtgttctggctaatattgccataggttactctggggttaccataccagcagtaacaaaccaaactgatgttactataagcatcaagccactcattcaatacgactccgtgccataa

SEQ ID NO: 121079 - DNA, 1458 bp, Enterobacter cloacae
atgataagaaatctgaaaaatgataagtctatatttttaatatctctggctctatcatttgtatacatattgccttttatcattaataacaactacgttgtagatgattggctcaggactgatactggtgttactgcttgggagggcaacgggaggcctctttcctctgttataatggctgcgattagcatgtttggcggaggtttaaatttctttggggatggtgttttatatgatattttcccgcttaccattatattatgtgcttttgtgatgactttttgcgggtatcttatctctgctgagcttggcatgaaatccccaattgctaaagctgcatgcatgttactaccactgacttcaactttattcataggtaatatttacttcaggtttgactctttaataatgtcattatcttgtcttggtgctattttacaggcaaggatgagtgcagagagaggtattgtctgctggattagttcggtggtgattgggtttatttcaatatcaatatatcaggcatcgataccatttgttttatcatatcttgcattaatgtgctttatgaggtactgcaatgaaaataaaaatgatgtaattaacttaatcataaaggtgttttcatctcttttcttttcgttcttgatttataaagtaatgatgctagcgttctttgatggagattcctatacatctggatacacggacacccactctcagttaataccactttcagttgatggactaaagataattgtaaataacttctcattatttataagcatgctttacaaggttactgcttttgctccttgtattatcttattaacattactgattgttatgttggcaatttcattcatagaaagaaatatgaaaattgcattttcagtatttgcatttatagcaataatagttctagggtttgctccatatctagttttgagaagccctatagtagagcctagggtgatgatagccgctggattatcattgtgcgcattattgaagggcgtagaaatgatgagtaaattaggtgtgttatcaaaatcattgattgtagtttttattgctttcaattttagccaagcatatggagtatcgaatgcgttcaatatttatcagcgcatagacagagtggtcgctcagaatatagcattcaatcttattgaatacggatacaggactggtgataagttagttatttctggcttcccttcttatcctgactctgtcaagagaatatactctgccatacctgtctcgcaatatcttgttggctctgcctttgctaattatagatttaaatatagcctcatgaaacagtatggaatatcatcttctatacctaaagacgagcgtttcaatggtgatggtgtgattatgaaagataataaccttatcaagttaataaaatatgataacggatatagagtatacatcaaaagaatgtaa

SEQ ID NO: 121080 - DNA, 918 bp, Enterobacter cloacae
atgaaaatttctcttgtcgttccggtatttaatgaagaagaagcaattcctatcttctataaaaccgttcgggaatttgaagggctaaaacagcatgaagtagagatagtcttcatcaatgacggcagcaaagatgcgacagaatcaattattaacgcgcttgctgttgcagacccacttgtagttccgctgtcattcacaagaaacttcggtaaagagcccgctctgttcgccggccttgaccacgcgaccggtgaagcgattatcccgatcgacgtagacttgcaggaccctatcgaagtcattcctcacctgatagagaaatggcagaccggggctgatatggttctggctaagcgctctgaccgttccactgatagccgactaaaacgaaaatctgctgagtggttctataagctacacaacaaaattagcaacccgaagatcgaggaaaacgttggcgacttccgactgatgtctcgagaggtagtggaaaatattaagcttatgccagagcgtaacctctttatgaagggcgtattaagctgggtcggtggccgcactgatgtcgtggaatatgccagggcagagcgcgtggcgggtaacacgaagtttaacggctggaagttgtggaaccttgctcttgaggggatcaccagtttctctaccttccccctgcggatgtggacttacatcggcctgttcgtcgccggtgctgcgttcctgtatggcgcatggatgattttggataccatcatttttgggaatgctgttcgcggatatccttccctgcttgtttcaatacttttcttgggaggaatacagttgataggaattggagtccttggtgagtatatcggtaggatttacgttgaagttaaaaatagacctcgttatgtgctgaagggacgaaaatga

SEQ ID NO: 121081 - DNA, 363 bp, Enterobacter cloacae
atgttaaagttattcgccaagtacacatctataggtgttatcaatacgctcattcactgggttgtgttcgccgtttgcatttacgcattccatacaggtcaggcacttggcaactttgccggattcgttgtggctgtgtctttcagcttctttgcaaacgccaggttcacgtttaagtcctcgactaccactctgcgctacatgctctacgttggctttatgggaacgcttagcgctgctgttgggtggtgtgctgacaggtctggcatggcaccaattatcactctaattattttctccgccatcagcctggtgtgcggattcatttattcaaagttcattgtctttagggatgcgaaatga

SEQ ID NO: 121082 - DNA, 384 bp, Enterobacter cloacae
atgggattcccgagcccggctgctgattacgttgagaaccgcctgtcgcttgatgagcgattcatccacaaaccgtctgctacgtactacatgaaagcgtcagagactatctatcgatgcggcattatgaaagatgcgctgcttgtcatcgactcgtcactaaacccttgcgatggctccttgcttgtctgtgagataggaggtgagttcaaggtgaagatttaccggacatatcctcagcctcaccttgagaacgcgctgaacggacgaaaggaaaagttacctggtcactttgaaggtatagagagtccggtatttggggttatcacgtacatcatcaacgatgcgcggacaggtgagtttgatgattgcccggtgatgtga

SEQ ID NO: 121083 - DNA, 393 bp, Enterobacter cloacae
gtgcgcagcggcggtatttatgccgggcacgataaccatttttatggccaccggaagatcctgaaaccagaccatcttggctggcgcgaatacgccatgctgctactcgacagcatgccgcaaaatacggcggaacattaccgcaataaaatcgcggtttatctccactggtatcaaaagcgaggcatgaacgatattcccgatacgcaggagggtgacattggtgcaaaagatatcccctcctggcgacgcatttgtaaggttttactcaacaatgactattggtgccgggcactttcgtttagcccaaataagcccaaacactatcagcgctacagcgacagagtgaaagcaaaacgcaaggaatgggggattttatgcaacaacgaataa

SEQ ID NO: 121084 - DNA, 921 bp, Enterobacter cloacae
atggccaacctctacgacctaaaaaaattcgatctcaatctgttagtcatcttcgaatgcatttaccaacatctcagtatcagtaaggctgccgagacactttatatcacgccatccaccgtgagccagtcgctgcaacgtctgcgtggccagctcaatgaccccctgttcatccgctcaggtaagggaattacgccgaccacggtgggcaccaacctgcatcatcatcttgaacagaatctcaaccaaattgagcagacgatcaacatgatgcatcactcggacatcaagaaaaagttcgttatctattgctctcaaatgatgtcgcccggctatatgctcgaaccaatgaagctgctaatgtcagaggaaaattacgagatagaacaacgagatatgcttatctctccggaatccgcagaggacctgctcgcctaccgtaaagccgacctgatctttactattgccccaattaagaatcgctctgtggtgtgttctcactttgccacggtgccaatagcgttaatctgccgagaaaaccatccaagactcgccgatacggtcagtcttgaagcgttataccgggaaaaattcaccttttaccagagtgcgcacccgggcgttaaagagttccagaatcgtgccaatgaccttttcccggaaagagatattgcttttcgcacggactccatcatttcgctaatctccatggtcagttcatctgatctgttaggctttatacccgtatcaatctatgaagcctataaagagacgttaaaaataaaacggatcgccgacccatttgaattgcccgaaatacatgtctatatgctttacagccgttcatcgctgaacagcagcgttttttcaacgttcattgagaaaatgcataaactctgtctttccgctccatctgcgtaa

SEQ ID NO: 121085 - DNA, 1182 bp, Enterobacter cloacae
atgtttcagatcttcgtcccgaagtacctcagatttttatatccgtgccggatgtggcgcaaaaccacctcaacccgcgatctcaatgaggctcgacggttcagaaactacctcttattagaatgggaagagcttaagcggaagtacaatccgagcaaccccgatcagtggttgcagcagtcaatagccgccttgcataccgaagggaagaagaacaagagccgccctcaacctgtaacgcgatcctgttcgattcccactctgtgcctattacgggacgaatacgccgaaagctataaaaaccgccgctcttattcaacgttaagcaaatcagcgcgagccgttgaactattccttgaaagtgccaaacaaccggacattgccttagaaaggataggccgccgcctggtgacggagttcctcgatacacaaaaggagaaaggagccgccgatcaatctcgtcaaaactggctaacgtgtttagggagcctctacgagtttgcaaagcgccgctacgatggcataccagaccgcaacccttttcacggtcataacctcgaagcacgccgcacgatagagagttatcagccgtttgaacctgaccagatgcaaaagctacttgatgcagcagagccggagatcaggaacatcataatcatggggctgttttcaggatgccgccttgatgaactggcaagcctcaagaagtcagagatccaaacggtggaatgtgtacgctgtttctacatttcgaaatcaaagactaaggcgggggtacggtacgtccctattcattcccggctatctgcgattgtcgatgaatacctgaaccacagttacggcgaatacctgttcccacaagctaacaagattaacaggaaggatggtaagaaagggccgtactactctcaaaacttcaccaggttgcgtgacaaggttttgcctaccgctacagatcgtcaatgcttccacagcttgcgcgggatgttcatcacatgcttagaccgtgccggagtgcaggaaacaagaataggcagtatcaccggacacactgaacagaaagctaaaacggaagcgttccgcacctattcccaaggagcaagcatggaagagttagcagggtatgtggagattgtggattatgaacaaatagcgatcaataaagccagcgttatcacctga

SEQ ID NO: 121086 - DNA, 1461 bp, Enterobacter cloacae
atgaccgaaaagaaaccagtagtaaactttgttaatgcgatttgcggctcaggaaagagccaccgtctgaaagagttcattctcagcttcaatcgcgaagctgtcccagaaaagttcttaatcgtagtaccaacccacgctttagccgagcagttcaagcaagaactaaatcgtttgagaatcccaaatcatcacatttgcgttgaaggtgcgactctcaacctgaaaagtactctggcgaacagcttccagacgaatgtggtgataaccacccacgaatgtttcaccaactactgccacctcgctacgttcaatcctgagatgcgctttctactggcagaacacaacgtgatgattgacgagatccctgatggttggtttggggctgaagcgaagatccgacatgcggacagaacggcagaaaacttcccattcctggcgtggctggaagagcgaaacgggttgctctatttgcgtgatgagcactacgacaagctgtaccagtattaccatgagaagcacgctaacagcgacagcctgaagaaagtgctttacgtggcgcttgacggtggtggtgtgatgcataccgagtgcgattcttcatacagcttctttgcatacacttataacccgatactgaaggccgcaacatgggcgaagagtttcactgtgctcggcgctggtgtaaatcgtagcgggtttgtctggatggcggagaacgtcgctcagattgatattcaggaggctggtgaacaccttcagcctgatcctgagagatgcaaacataaaaacgtacctatcaagatcgtggttgttctctcggaagatatcaaaagagcggggcagtcggaactcgccaatgtctttagcaatcacctgaacgagataaagcagattgttggtaagaagtttatctttgccactaacaacgataaacccatctgcgacttccagaccattggactcgctgagctcggagatcgtatgggaggtgaagccgtttcgatgtccagctacggaatgaacagctaccaaggcattcattgtgctgtgttcctcggatgtgcaaatctgggcgacaaagaccgtaagcgatgggcagattattgcgggcgtatcggttgggattttgaaacggtgatggagaagaagcgtcaggcaatgtattttgaacgttgctatcagtttcttagccggacgtccattcgcaacacagataccgatcaccctatggtgtttgtcgttcccgacatggcggcagcggaatatctcaaaacccattacttccctggctcaaccatcgaatgccttggaatcaagaaagctggaaagcagcaggaaacgcgtttgaaggtgctggaacataaggctcaagggctaacaccgaaggaaacggttgaagcgatgggtgtgtctctgagaacagttcgaagctattggaaccaagaagtttgcgtatga

SEQ ID NO: 121087 - DNA, 159 bp, Enterobacter cloacae
atgaatatccgattcactgatgacatccacaaggcgctgattgaacgtgccaaccgtgaagacaaatcagccgccgcgctggtgagtgagttaataacagcagtcctaaaccgagaggaaccgaatgaccgaaaagaaaccagtagtaaactttgttaa

SEQ ID NO: 121088 - DNA, 135 bp, Enterobacter cloacae
atgataggttatatctatcaaatgtggttgtttatagattatttacatcctgttagtcatgaggagttttccggctttctggagtgttgtttcatgcggagcactgcgaccatgaaaagtatgctgcatgagtag

SEQ ID NO: 121089 - DNA, 138 bp, Enterobacter cloacae
atgacagatccgcagcaggaaaaaacggagaatggcaagacgctttgcacctatgagaacagccagtatgttttcacctacgtcactaaagggcagtgcccgtatgcaaagactttcaacaccagtagttcagagtaa

SEQ ID NO: 121090 - DNA, 351 bp, Enterobacter cloacae
atgaaaagattgattctcgcgtcactgatcgttctccccttcgcctcaagtgcaaccacattcacctgtaaggcgatccaggaagggcagatcgattctggtagccaaaaatcttcagtcgaaactcgccttgatgtgcaggataaaagtatgaaggtgagcatgggtggtaaaacctggcggctcggtttcttgggtgagaaaagtattgcgaagatgtacgccacgccagacggagggattgccgtcacatacatcgacaatgggagtgagcctattttcgttatgcgccccacaaacaatgatggacagactgctgtctacacgctcagcctgtgctctgagatgtaa

SEQ ID NO: 121091 - DNA, 558 bp, Enterobacter cloacae
atgacaactgtgatcggatatgtgcgagtttccaccagcgaccagaacgttgaaaaccagaagcagcagataaccgaagctggatatagtgttaaccgctggttcagtgatgaagccgtgagtggtgcagtaaaggcatcagatcgtccggggtttggtgaactactcagctatgtgcgagaaggcgatacgctgattgtgattgctatagaccgccttgggcgtaacacgattgatgttctttccaccgtggaaatgttgcaagcgaagggcgtgaaggttgtcagtttgcgagaagggttcgatctgtcaacgccggttggcaaagcgatgcttaccatgatggctggacttgccagcctggagaaagacctgatcgcagagcgtagaacggcaggtatcaaacgtgctcaatcggaaggcaaacattgcggcagaccgattaaagcaaccgctgaacaggtgagagagttattagatcaaggttgctctcctgcaatggttcaagataggctggctatcagcaaagccaccttctaccgactaaagaccttctga

SEQ ID NO: 121092 - DNA, 948 bp, Enterobacter cloacae
atggctgttagaagaattaagtatgcatattatgatcccgcatgggataaaactacgatgtctcttgcagcactgactcgtactgaggttggacctttagaatatacttctgaaatgcgggggcatcttcattgtccatcatgctatgagtcactgatacgtgttcctatagatccgtcaatcagtgtcatggctcacgaaagagaggccttgtttagacatctacctgatacagatcatacagcacctcaatgcctattaagaagcggcatcatggttggtaaaaaatataattctgaagcagaagcacttcaagccattgaagatgaagatattatcattattagtgggttcatgcaggaacgagcgaataataatgccagagatcctgtagagggtgaagatgaacaagttgagaccgactatgagagtgaagatggacctgcaatggatgttccaatatctcggcatgaggggcaaacctttaatgtacccagtaaaataaccagtgtaatgtctctttgttccaattttcggcgtaatttctatcgtgatattcacatattagtcgatggggaagtgaaacattatgtgttgagtgaatgtttaactgacgcagcagatatagcagaagaaaatgacactccaaatttttactttggagaaattgtgtcatttagaagatttgatcataccagtcatgtgtttttaagacacccacgattagcaggtaatgttgatttcaggatttcagcaagcaatgaagatttggatgcaagaggaatcaccgaagctaatgctcaacgcagaattcttgttttctttggtaaaatagaatctattggtgcaggttattggtctcaaaataaaaaatggggtgagatcgcgctcctaccagaaaaatatgaagactttttacgttctaattctgagcgtgaagaagaataa

SEQ ID NO: 121093 - DNA, 1053 bp, Enterobacter cloacae
atggctgacctcgcgcgtttgcttgagatctctcggcaagcgatttctgcgtttgagaaagggctgaaaaacccatcccatgagacattaaatcagatttcaagggtattgagtttccctgagtctttctttttagctgccgaatcttcacctggtatcaaaggcgctgtccattttcgtagtcgtgcttctgcaagtaaaaaggaacgcttgatgggcacaacgaagggaagatgggtgtcaggtatactctctaatctgcttcaatatgcaattttgcctgaattgaagctaccgcctattgatattgatgattttgaaatgcttacgccaagtgatcttgaggatatcgcaacacaaacccgtcgatattggggattgggtgatggtccgattaaaaacctcactcaactacttgaaaataacggtatcgttgtctcaaatattcatgccggagatagggttgatgcattttcattttgggctaattccgggccaatcatcgtttctgataaaaattgcacggctgttcggttgagatttactattgctcatgaattggggcatctgatattacaccgttcggttcaggatgattatcttgatgataaagagcttttcaagaaagtggagaaacaagcggattactttgcttcttgcttcttgctccctgcttctacttttggcaatgagtttttctcaccaagtttgcaaggtctgataaaacttaaacaacgctggggtgtatcgattggagcgatcaccatgcgagcggcgagcttacatctgataaatgataatcagaaagagtatgtttttagacaattggctccttatcggaaaaaagaaccattggacgacgtaataaaaagtgaagagcctaagttgataaataaaatagctcatttgcttgatgagcataatataatgtctaagagtgagctttttgaaaaatctgctttgcctgatgcagatttcattgctattactaaaatacaaaaagcggaaatatattccgagaaagaaaatgttatttcattgaaattaaaataa

SEQ ID NO: 121094 - DNA, 612 bp, Enterobacter cloacae
atgagcaattatcgaacagtattaatgaacgcttttgatgtaaatcaccgtagttccatgactcgttctatatctcaggcttacctgatgtctgccgagcgtagccgcgaatttggtgtgttttatcgtgaggcacaaccgtaccttcgttggttttattgtgaagcattactggaaaaaacagcgatcaatcttgggttggattttcacgccgcaccgaatgctgcccgtaactgccgacacttatcgattaagtctaacaactggactctcacggctcatcatgttagcggaccgggacagttaccgcgtaaggctcgctaccgagcagcatatgcacaaagcatgaattacgatcttttcgaagggttcgaagacaacgataatgtgctcccaagtgtagctggtcacgtttatctattacatgatggggttggtgcttccctggaggcgataagtttgaccattcctactccagatttgcgtgctgtgctgtatgctgaaccattagagttggtttcttcttttgaagttgaggaagaaactattgaagatgaacttgatgaaaaaatcgcccttagggtcgatgaattgctaagaaaacaaaaatga

SEQ ID NO: 121095 - DNA, 285 bp, Enterobacter cloacae
atgcgggcattactagcagcactctgtgttaaacaacggggagcaggtcaaagtatccagccaggatcgctctcaaacacgagattaaacagcctcaaatcctgcattttcagtttcacgcctacctcctttttttcacagtataacgggatgaaagtggaggaggaaatgagtcagcacctgtacaccagcattagcgtgtcccgctattggcagaacgcggccaaactaactgagcagaaggtccactgtgagcgaggagcggacgttggcagctattgttga

SEQ ID NO: 121096 - DNA, 567 bp, Enterobacter cloacae
atgaaaaagccacaacagatgtacgacctgcaaattcctgatgacgactataaaatggcagcagtcatggaacgtgataagttgaactttgagtctcccaacaaatggttttacgtgggtgctgacagccgagacctcggctttgcgaaagtaggaattacgatgggcgatttaacatcccgctcatacggcaccaacaaccctaatttctacctgttctgcgcctttcagtgccagcaaagcacaacggaagcacagctcaaaagcattgaaaaaagcgctataaactatctcgatggtgtgttctgcgccgaaaacggtcagacaaagcgggcgcgtcacatggagtcacaacgcctgtcagagtgttattacgatgtaaatttcgaggatttttttgtcgaggtgcatgaatacctattggataatcacgtcagctatttccagacttgtggtttcgaaaatgaagcaggcggtgatggaggctatgcacttgcgtgggagttcagttctctccttaaacccgaagttaaaaggtacttcctgaacaggatcctccgggggtga

SEQ ID NO: 121097 - DNA, 414 bp, Enterobacter cloacae
atgagtattcagcgacgtgaggtgtatctggtcttgaaacaactatcagatggccggttgttttatgtggaaggattgagaagcgccagcaattatttttttgatggccatgctcgggtgctcacttccccggctggttcagcgagctttattgagttcgaaccaggtgaacgccctatgcaacttttccatatgccagatgaagaaggtactcaatggcaagctgctttccatgatttcggctgctcgcctgaatttggagaacctaaattggaatacgtcatatttgttggcgcttattccgatgaccgcgagcgtaccattgagttgatgaatatgggcatgactcatgcgtgggaaattattgagggcaagtgcgaactgcgcgaaggcgagttcgaagcagaatggtaa

SEQ ID NO: 121098 - DNA, 351 bp, Enterobacter cloacae
atggaaaaattatttaccccgtttcagaccggtgatactgacctggtaaaccgcgtcgttatggcccccatgacccgctcacgggcaatgactagtgataccgctgatgaactgaccgcaaaatattatcagctgcgtgaatccgtatggggcaaaccggaggtcgtccgtgacgggctcagggatctggttcgccgcacgggcgcagatgaaattatggtgaactcatggcaaggcactcgtctttgccgctcttcagaaataatgctgagtattctaccggaaaggcaaaaggatcatttaccaaagataatgacgagaaagtcattgacgaagcggggaaggggttaa

SEQ ID NO: 121099 - DNA, 1278 bp, Enterobacter cloacae
atgatttcacgctggcaatggattctgaagcaaacatttaagaaactctggttcagagctacgttattcgcaattgtcgcgataataacggctcttttatctattctttttaaatcaatgattcctgagtcggtttcagtgaaggttggtgcggaagcagttgataacattctgaacatactggcatcgagtatgctggcagtgaccacattttcgctgagtatcatggtcacagcctacggttcagccactactaatgttactcccagagcaacgcgtttagttgtggaagacgtaaccacacaaaatgtactggccaccttcattggttcctttctcttcagtctggtaggaattattgccctcaatatgggagcctacggagaaaggggaagagtcattttattcattgtcacactcgttgtcattgccctcatcctcatcacattgcttcgttggatacagcatttgacctctctggggagggtcggtgagacaacagcaaaagtagaacaggcggccatcgaaacatttattgcgagagccagaaatccctgtctcggcggatatccatggcttgagagctatgaacagccgaaaggaacggttgcagtttatccgaagaagattggctatgttgaatatattgatatggagaaactcagcaagctgctggccaatgatcctcgtcatgtataccttgtggcgcaaccaggcagtttcattcatccgtccatgccagctttgtacctgagtcagggccaggagtcatcaatctgcgccgatttacttgagacgatcattgtctcggatgtgcgttcatttgctcaggatccccgattttgtcttagcgtcatggccgaaatagcctgcagagccctttcacccgcagtgaacgatcctggaaccgcaatcgatgtcattggcagaggtgttcgtatactttctgcttacgcgcagaataagtctcatgaaattgaagtgacctatccttcagtacacgttgcgccacttcagaacaacgatcttctggaagactttttctcacctgtcgcacgcgatggtgccagtatgagagagattcagataagagtgctcaaagggctatctatgctgagtacgggttggcctgagatgtttgctgatgccgcgcacactctggcaattgaaacattagagcatgcaaatcgcgctgaccatatagactccgatagagaattcataaaatcaatttattttgatttgttttttgatgaaaacgctaataagcaatcatag

SEQ ID NO: 121100 - DNA, 1998 bp, Enterobacter cloacae
atgagtgaaaatgaaacaatcccaaagaagtctcacagccagattaacaaagctgtattctttacatctgctttgttaatttttcttcttgtcgcttttgccgctgcattcccggatgttgctgacaaaaatttcaaactacttcagcaacaaatcttcacgaatgcaagctggttctacatccttgctgtggccctgattttattgagtgtcacgtttctgggactctcacgctacggtgatatcaagctgggtccggaccatgcgcaacctgatttcagctatcactcctggtttgcgatgcttttttcggcagggatggggatcggcctgatgttctttggcgttgctgaaccggtgatgcattatctctcacctcccgttggcgccccagagactgttgcggcagcgaaggaagcaatgcggctgaccttcttccactggggtctgcatgcctgggcaatatatgccattgtagcgctgattctggcctttttcagttaccgccacggtctacctttaacgctgcgttctgcactctatcccattattggcgatcgcatatacggacctataggccatgcggttgatatttttgccgttataggtacggtctttggcgttgcaacatcgctgggttacggtgttttgcaggtgaatgccggtttgaaccacctattcggggtgcccattaatgaaacggtgcaggtcattctgatcgtggccatcacggggttagcgacgatttctgtggtgaccggcctagacaagggaatacgtatcctgtctgagctcaatttgggcctcgcgttgttgctcctggcgctggtcctgtgtctggggccaactgtgcttctgctgaagtcatttgtggaaaataccggcggttatctttcggaactggtgagtaaaacgttcaatctttacgcatatgaacctaagtcgagcaactggctggggggctggacattactgtactggggatggtggctttcatggtcgccatttgtggggatgtttatcgcacgggtctcacgcggccgaaccattcgcgaatttgtcaccggtgtgctgtttgttccggccggctttacgctcatgtggatgacggtgtttggtaacagcgcaatctatctcattatgaaccagggggcgaccgatctcgccaataccgtccaacaggatgtctcgctggccttgttcaatttcctggagcatttcccgttctcctccgtgctgtcatttattgcaatggctatggtcatcgtcttctttgtcacatctgctgactcgggggcaatggttgtagatactctggcatcaggtggggtggcaaacacacccgtctggcagcgaatcttctgggcatcgctcatgggagttgttgcaattgcgcttctccttgcgggagggctgagcgcgctgcaaacggtgacaatagcaagtgcattacccttctccgtgatcttgctgatatccatatacgggctgttaaaagccctgcgtcgagatttgactaagcgtgaaagcctgagcatggcgactattgctcctacggctgcacgtaacccaattccctggcagagaaggttacgcaatatcgcgtatctgccgaaacgatctcttgtgaaacgttttatggacgacattatccagcctgccatgacgctggttcaggaagaactgaacaagcaggggacgataagccacattagtgacgcagccgacgatcgtattcgtcttgaagtggatttgggcaacgagctgaattttatatatgaagtgaggcttcgcgggtatagctcacccaccttcgcgctcgccgcaatggataatgatgagcagcagactgaccaacatcgatattatcgcgctgaggtttatctcaaagaaggcggtcaaaattatgatgtgatgggctggaatcaggaacagttgattaatgacatactggaccagtacgaaaaacacctgcacttcctgcacctggttcgttga

SEQ ID NO: 121101 - DNA, 1185 bp, Enterobacter cloacae
atgtccacccccaaacgcttccgttttactaatcagctcattaaatccctgccccctaacacatccgatgcacgcagtaccgatgccgaatacagcgacaccgagatttctggcctgaaatgtctggtcagcaaaggagaaggacgtaaaaagtttttgctccgctacctctaccatggaagaaaacgtgccatcgctattggtcgctggcctgaggtggatgtcaccttagcccgtaagattgccatggaacataaacgctcacttgccaccggaactgaccctaagcaggaacgcgaaaacaagagacaagagatgacatttgatgaactctttaaccagcattatctgccatgggcaaaatccgctaaacgcagttggggaaaggatgtacagcgctaccgcgatcatatccgtcccgccattggtcagaggctgctgagcgatatcacaccagcgagcattctgcgccttcagcagacgttaagtacttccctgtcagcggctacctgtaaccgtgtcatcgtactcataaaagccgtctttacatgggccggaaggcaaagcatgacctctgttcatccggcaagggtggtacagctactcagggagaacaacgcccgacagcgttattttaccgaggacgaaattcgtcgtatttttctctccgccgataacgataccagccctgtagctgcccgctatgtcaaactgctgttactgaccggccttcgtcgtgatgagctgcgtctggctaagtgggagcatgttgacccggttaaacgcaccctatggcttcctgaaaccaagaatggctatggacggattgttcatcttaattcactggcgatggacgtaatcagaacactgccaacacagcggggaaatccgtggttgtttataggtaaaaaacaaggaatgccgctgagtaacccggttaaagcctttcagcgtgtcgtgcgtcgggcgggaattttcgacaaagaagtgtgtattcatacctgccgccattcggttgccgccctcatcgtgtcctacggcggaacactgtatgacgttcaggctcaactggggcaccgcagcagtcagtcttcacaacggtatgcgcatcttcatcctcagcgcttacagaacaccagtcagttactggcggaaaggataacggctcagctaccgtccttgtga

SEQ ID NO: 121102 - DNA, 357 bp, Enterobacter cloacae
atgatttttgaatcagaccagtactatgacggttttcctcacgctatcagcagcgaaaatgaagaaaaaacctcattcaatgattacgctctggttaacacactggcggagtgcctgtatcacgacatttctcgtgaaatcttcgatggcagtgagccggcgctccgggccgtcattgccaacggtcagattaaattcctggctcgttatacgcttagaggggcctgctattatgaacccctcggcaggttccctcgtatgtctattaaagacgcgcgcgagtgtgctcgtgaactctataacagatatgatgataaccgggtgccggatgaagaatatggggccatcccgttctga

SEQ ID NO: 121103 - DNA, 1926 bp, Enterobacter cloacae
atggtaatacacatgaataaaaaagtgacaactaatgttcctaaggtttccgggattaagcgtattcgcgcttttgctgaccgcgataaaaatttcaacaaaatgtcggaagcaattatcaggcgtgctgaaaacactgaggtcggtgaagatgatatcgcttcactcggtattggtgatgggctgccacggcattatgtgaatacggctaatggccttttctacatcggtggacagaaacctgtgcaggtttgcaccacgccagttgtgcctgtcgccctgttttgtggaaaagataaggagtccggtcttgggatcagcctgatgaccggtaacgggctgggtaagtatgttaaggccctggtacgctttgaggatattgttcagagcggtgctcaggtagtaggcaaactggcagatcgtggattttgtgttggctcctctccacagcagtttgccctttttgaccgttttcttcagcgctgccggagtttaccgctgcctgtctatctgatggcagatgcgatgggattcgtttcggaggatatggcctttttacatggttatgagcccgttgtgacctctctgaccgggtttgattatctgctgccgggattccgcgtgcgtcccggactgcacaaaggtggggctctggaggagtggattaacctcatccgggaaaatgtccatggctgggcgcagacctttgcgctgagtgcgtcctttgcttcgatgcttctggttcctgccggtatggatgtgggcatgtttcattttcacggcgtatccaccaccggtaaaacgcttctcctgatgctggctgcatcggtccatggtgatggcagcgagccgggtagtggggggaatgtaaatattattcgctggaataccacgcctaacgcgatggagcgccttctcgctgactattccggtctggtcgcctgcgtcgatgaactgggtgcgagtaatcataagcaactttcctcactgctttacaacattacgtcaggtacggcaaaagagcgcctgaaccgtggcctgacggcagatgagccgtttaaatggcgcatgtttattctctccaccggtgagatgtcaatctccgaaaagctggctgaacagaaagccgtgttacagggagggcaggagcacagggccatcagtatggaactgttgcctgaggatgctcaaaaaccggatgaaccggtatcagaaacacgtgcccgtgcagatgcactgaagacggggctggcagaggcttatggtcatgccgggcctgcatttatcggcaaactgttatccgggaaaaatacggctggcggtcttcgcacctacgcagagttttcatcctggctccaggaacagacagatgattgctgtaacgcactggaagaggccctgagggatgaggggcgtgatattacccgcgttcagcggcgcggactgaaaagatttgcgctggtatggctggcaggagagaaggcgctgaaatatggccttttacctttcgaaagcgatgcggtggctgaatccgttatgtccgctgcacgacgctggctggatgataaccagaatcagtataacccggtgcgtaacatgctggaggagcttcagctgacgctggtgacaaaaagcagcaggcactttatcaccctgcgtgacgaacatgcccgatgcccgggagatatgtggggattcgtccattacaaaaccggcgacttcctgatttatgaatcggtgtttgaaaagctctgttctgaaaagggacttaagaccgttgatgtggccagaccgttagagcgttccggttatctgcttggcgaaagtgccggacactataaaaaaagagcgctgaagacgatggcgcagtcttactaccaggtcaaaaaagcgtttctgaaatgcaatgtgatgaccgaattttaa

SEQ ID NO: 121104 - DNA, 240 bp, Enterobacter cloacae
atggcgcgtatggcaacgatgaaagccagccgttgcaggcaacgtgtcaccggacagggagaacggcttatccggctgaccatggtgctgttttacggtcagacaatatctgttcgctacatcatccggcagtttgacgtctctccccgcacagcaagacgggacctcgctcaactggcctttgtgctggaatccgctggccctcaccgctggcgactggctccctcgctgaaaccctga

SEQ ID NO: 121105 - DNA, 219 bp, Enterobacter cloacae
atgcttgatcttttcactattcgttctgactttgatgacaaagctgaactgatatacgattacctcaatgaggtcattgccaaatgttatgatggcagcgttgtttatttcatgttcataattcctcaggtcagtgttaagtcttgctgttgcatctacaagtgcgtattctttatcgataatcataactttctcacttatcatgttaatgtgatttaa

SEQ ID NO: 121106 - DNA, 219 bp, Enterobacter cloacae
atgttgattttgcgctggagggtagctgatttgtatgcgcatgaactggaagtccagaattatctttttagagagctggaaggtatcatagagaaaatcacgggcctgcctgaaacctattttgtatcaagctataaatcactattgaccgatgattttagagaactcacagcagcgggggttgatgtttgtaagtttattatggaaaacaaaggttag

SEQ ID NO: 121107 - DNA, 1236 bp, Enterobacter cloacae
atgagcgttctgagctatctggaaaagttacttaatggagttgatattcaatggaagacgattggagaagttactctacgaacgagtaatataaaatggcgtgaggctacccgctcttatcgatatgtggatttaacttctgttgatattgaaacaaaaaaaatcactgagacaactgaagttacagcgaataatgccccgagtagggctcaaaaactcattgaggaaaatgatgttattttcgcaacaactcgaccaactcaacaacggttttgcctaatagacggtgagtactcagatgaagtagcaagcaccggattctgtgtcttaagagcgaaacaagatgaggttctgccaaaatggatttggcattggatttcaacaagttactttaaaaaatatgttgaagaaaatcaaagtggatcagcatacccagcgatatctgacgcaaaggtaaaggagtgctatattccagttccctgcccggaaaatcctgaaaagtctctgaccatccagtctgaaatcgtccgaattctggataaatttactgctcttacagctgagcttacagctgagcttacagctgagcttaccatgcgaaaaaatcagtacaactactatcgtgaccagttgctttgttttgacgaggccgaagttgagtggaaaacgctagctgatgtagcaatattaagacgcggaagagtcatgtctaaagggtatctcgaacagaatgcaggagactaccccgtttatagttcccaaaccgcaagaaatgggatgattggctcaatagatacttacgactttgatggtgaatttattagttggacaacagatggtgcaaatgctggaacggttttctaccgtacagggaaattctccatcacgaatgtttgtggactaatcaaaattcatgaaaattatccaattagctataagtatctttactattggctttcaatagaagcccaaaagcatgtctattcaggtatgggtaatcctaagctaatgagccatcaggtcgagaaaattactgtgcctatacccttcccggcatcaccagagaaatcaatgctcgaacaacagcgaatagtcggaattctggacaaattagaggctataacattctcattgactgaaggcttacctcgtgaaatcgagctgcgccagaaacagtacgaatactatcgtgacttgctgttcagcttcccgagaccagaaaccgccagcaactaa

SEQ ID NO: 121108 - DNA, 330 bp, Enterobacter cloacae; identical to SEQ ID NO: 119089

SEQ ID NO: 121109 - DNA, 1077 bp, Enterobacter cloacae; identical to SEQ ID NO: 97051

SEQ ID NO: 121110 - DNA, 426 bp, Enterobacter cloacae
atgaaacgttctcttactttatctctgagtgctcctcttgtttttatgctggccgcctgcgcgccggaacatgccacggtgtctccagtaaaaacgcaagccgccgccgcagctgtaaatacccaactgcgtcatgccgactggccaaaaagcgaatggtggaaagactttaacgacccccagctcaacgcgctgatcgacaaagcgctggcggatgcgccggatatgcaaattgcccgtcagcgtatcaccctggcggaagcacaggcgaaagccgctgtcgctgctgagggtccacagctggatttttccgcagatgttgaacggcaaaaaatgtcggcagaggggctgatggggccatttgcgctgaccgacccggcagcggggacaaccggccctagtacaccaacggcacctttggtctga

SEQ ID NO: 121111 - DNA, 624 bp, Enterobacter cloacae
atgttaagcatctatggaaaaaaattacgtccgcaacatgaaatggaaaagatcatttctgcaacctcaggcgttgaagaaagaacgttaaaaaaatggcagaaaatttccacttctgattccggctatattcatattatcgttagcggtgaagtcgaatttcgacgtgaatctgacgaactgtgcatgttcaccgtcaccgggcaatgcattttcggcctgtcgtcaatgtattacagcgccacccatatgtacggccttgttcggacgaatacggttgttcgctcgatcaagaaagaggtcttcgcccagctgatgaccgaaaaaaatctgtggccagaactgaccaaagtcctttcctggtacatctgcatgctgagcaaacgtgatgatgttctggttgcccgcagtgcgtattccgttgtccgcgaatttttatatgagattaacgacctgattgttcaacaacagcgtgatattaacgtttatgattacattcaggaatacactaacctggcacgtagcactattattaaaatcctctccgatctgaaaaagggtcaatatattgtggtggaaaaaggtcgactgcttaaccttaccgcactgcctgaaaaatattaa

SEQ ID NO: 121112 - DNA, 1035 bp, Enterobacter cloacae
atgccctgcgccccctgccgcgaatacctgagctatgttcaggcccagtgcgaagaacacggctgcgaaaactcgccgttgccgcctgcccgcgtgcgcaaaatgcacacgctaaccaaaggcaacatcagcaaactgaacgcgctggcgcacctgtcaatgctcgccgcctggacggaacgcgcggcgcaggtcagcccacgtcatttacgtctggcggcgggagagatcctgcccgcccaaaaactcggtaagcgcctggcgaccgtggggctgtttgcgtccgtgctgtttgccgcctgcggctggtatttgacctcatcgatcggcgcacgcctgccgatccagctgccggtgcccgtcagctggaaacagcaatcgctaaaagtcgaagcgcccgtagtgccggttatcgacaacgaaatagttaatcagccggatgcgatgcatcagttgtatctcatgtgggggtatgacgcctcggccgaagatgcgctgtgccagaacgccgccaaagtgaacctgatgtgtaaacaggggaacgcgtcgccggagacgctggcgcaggaagggtatccgtgggtcagtgaactgaaaaccagcggccatcttaactatgcggtggtcgccagggtcggggacacgtccattgacctgttaatgaataaccggacctggcaggtgagccgcagctggtttaaccggcacgcgaccggcaacttcacccagctgcaccgcctgacaccggaaggtaaagacgcgatcggcgcggccagcgacagcaaagatatggcctggctggatcagcaattaagcctggcgctgagccagcccgaaacgcatgcgcggatctggaccacagagatgatgaaacgcacccgcgagttccagcaaaaaatgcatctgcacgtggatggtatccccggtgaagatacgctgatgcagctgatgcgcgtgaccaacagcacgccgggcgtactgattcagaccacccgcaccaccccggacgcgaaaatgcaggagaagaaagcctaa

SEQ ID NO: 121113 - DNA, 312 bp, Enterobacter cloacae
atgggcgatcgtcagcactctggattttgctttcccctcctgccactggcgcaggacggcatccaccgcctgcatgcgatctttaatcgctttcgttcccgggttgagtttgtacagcaggctactggcactcagtttgggaaatgcgttgatggcaagaacggtatggttgctggctttaagcgcgtcgatgaactgacccagaagcggagcgtcgtcgcaaaaaagcccgataattcccgccagctgggttttctctttcagcaggttgaacacgtcctgatgataaggcaccagaaaatcaccggataa

SEQ ID NO: 121114 - DNA, 1209 bp, Enterobacter cloacae
atggctttctacgcctggacggcaacggatgccgcggggaaaacacagcgcgggacgttacaggccgaggggcagaagcaggttcgccagtggcttcgcgagcaaaagctgatgcccgtcagcatcaccgaaacccgcgaaacggcggctggcgggaaagcgaaaaccggggtgaagctctccactccggtgctgtcgatgtttacccgtcagctttcgacgctggtcaacgccgcgctgccgctggagagcgcgctgaaagcgatctcaaagcagacggaagacaaaaagctggcggcgatggtggtggagatccgcgagaaggtggtggaaggccacaccctgttcgatgccttcagccagtttccgcgcaccttcgacaagctttactgcacgctggtgatggccggggagaaaaccggtcacctgggcgacgtgctggaaaagctggcggagtacaacgagcagcgccagaagatgaaaagcaagctgacgcaggcaatggtctacccgataaccctcaccgtggtcgccatcgcggttatcagcatcctgctggtggcggtggtgccgcaggtgattgagcagttcacccacatgaagcagcagctgccgatcaccacccggacgctgattgcggtcagtgatttcctgcaagcctggggcatttatattgtgggcattctgggcggcggctttatcggcttcaaaacctggctgaggaatgccaaaaaccgttttcgctggcacagctggctggtgaacggctcgccgattaaaaagctggtctgcgccatcaacagcgcccgctatatccgtaccctgagcattttgcaggccagtagcgtgccgctgctggagggaatgtatatcgcgatggacggtattgaaaaccgctatgcccggcaggtgctggagcaggccgccgacaccgtgcgccagggggcgtcgctgtatgcggcgctggaacaggcgaaattattcccgcccaccatgctgtatatgattgcctccggtgaagagagcggggaattaggtaatttaatggatcgcgcggcggaaaatcaggaatcggccttgcaacatcgaattacattaacgctgtcggtctttgaaccggcgctggtggtatccatggcgacgattgttttattcatcgttctgtcaatattacaaccgcttctgcaacttaataatatggtaggttaa

SEQ ID NO: 121115 - DNA, 684 bp, Enterobacter cloacae
atgcccgttagccggtgcgctggctggcagggtcttctcgtcataaccaacgcagtatttatcaaggaacggctgatcgacgaggttttcagtgatcatcacatacgccagcgcattgaccagcgccgcatcggtaccagggcgaatagggatccactcgtcttcacgtcccgcgccggtatcggtatagcgcggatcgacgatgatcatacgtgcgttggatttggcgcgcgcctgctcaagataataggttaccccaccgccgctcatccgggtttcgcctgggttgttaccgaacaacaccaccagtttactgttttcgatatccgacgggctgttaccgtctgcccagccgccgtaggtgtagttcagacccgcagcaatctgtgcggaagagtagtcgccgtaatgattgagatagccgccgcagcagttcatcaggcgcgccaccagcgttttacccggcggccaggagcgggtcatggtaccgcccagcgtcccggtgccgtagttgaggtagatggattcgttgccatactctttgatcaggcgctgcatgttagtcgcgataatatcgtaggcttcgtcccagctaatacgctcgaacttcccttccccacgcttaccgacgcgcttcattgggtatttcagacgatccgggttataaacgcgacggcgcattga

SEQ ID NO: 121116 - DNA, 618 bp, Enterobacter cloacae
gtgggatgggttgcccttcgccagcggcgacggacgctgcgtagtgagaacgttgatgcagcccgcctgatcgatacggttcgcatccgggttataccaggccccttcccccagcgcgacaacgccaggcatcatacgcggagtcactttagcttcgatatgcacttcgccacgtccgttgaagatacgtacgcgatcgccattactgatgccgcgcgctttcgcatccatcgggttgatccacatctcctgtcggcaggccgctttcagtacgtcaacgttgccgtaggtggagtgaacacgcgctttgtagtggaaaccggtcaactgaagcgggaatttcgccgtcagcggatcgttgtagttttcgaagcctggcgtataaatcggcagcggatcgataacatccccttccggcaattcccacgttgcagcaatttttgccagctcttcggagtagatctcgattttgcccgacggcgtggtcagcggattggcctgcggatcgtcgcggaaggctttatacgccacgtgatgcccttcgggatcgcgctgcttgtacatgccctgcttgcggaaggtatcgaagtccggcaggtcaggaatggctttgcgtga

SEQ ID NO: 121117 - DNA, 1572 bp, Enterobacter cloacae
atggccgatattgaaattcgacaggcgtcgccgacggcgttctatataaaagtgcacgataccgataacgtggcgattattgtcaacgacaatggcttaaaagctggcacccgctttccggatggcctggagctgattgagcacattccgcaggggcataaagtcgcactggtcgatatcccggcgcagggcgaaatcgtgcgctacggcgaagtcatcggctatgcggtgcgcgctatcccgcagggtagctggattgaggagtcgctggttgagctgcccaccgccccgccgctggagtcgttgccgctggctacccgcgtccctgagccgttgcttccgctggagggttataccttcgagggttaccgcaacgcggatggcagcgtgggaaccaaaaacctgcttggcatcaccaccagcgtgcattgcgtggcgggcgtagtggattatgtggtgaaaattattgagcgcgatctgttgccgaaataccccaacgttgacggcgtggtgggtcttaaccacctgtacggctgcggcgtggcgatcaacgcgcccgcagcggtcgtgccgatccgcacgattcacaatatcgcccttaacccaaactttggcggtgaggtcatggtgattggtctcggctgtgaaaaattgcagccagaacgcctgttgcagggtacggaggatgtgaaagccattccggttgacgatgccagtgttgtgcgacttcaggatgaacaccatgtcggcttcagatcgatggtcgacgacattttacaggtggcagagcgccatctggagaagctgaacaaacgccagcgtgaaacctgcccggcctctgaactggtcgttgggacacagtgtggcggcagcgatgcgttttccggcgtcaccgctaacccggcggtaggttatgcctccgatctgttcgtgcgctgcggcgccacggtgatgttctccgaagtcaccgaagtacgtgatgctatccacctgctcacgccgcgcgccgtcaacgaagaggtgggcaaacgcctgctggaggagatggcctggtacgataactatctcgacatgggcaaaaccgaccgcagcgccaacccgtctccgggtaacaagaaaggcggcctggcgaacgtggtggaaaaggccctcgggtcgattgccaaatccggccagagcgcgattgtggaagtgctctcccctggccagcgaccaaccaaacgcggtctgatctacgcggcaacgcctgccagtgatttcgtttgcggcacccagcaggtagcgtccggcattacggtacaggtctttaccaccgggcgcggcacgccgtacggcctgatggcggtaccggtgatcaaaatggcgacccgcaccgagctggcaaaccgctggtatgacttaatggatatcaacgcgggcaccatcgccaccggggaagagagtattgaagaggtgggctggaagctgttccacttcattctggatgtggcaagcgggcggaagaaaaccttctccgatcaatggggattgcataactcgctggcggtgtttaacccggcgccggtgacgtga

SEQ ID NO: 121118 - DNA, 921 bp, Enterobacter cloacae
atgaatactattattctaccgaaaacacagcacctcgtggtatttcaggaagtcatcaaaagtggctccataggttctgctgcaagacaactggggctgacgcaacctgccgtcagcaaaatcatcagcgacatcgaatcctactttggggtggaagtgatggtgcgtaagaacaccggcgtaaaactcactgccgccggtcaggtgctgctgtcctacgctgagtcgatcacccgcgaaatgaaaaacatggtgagcgagattaacagcctcagtttcagtaccgtcatggacgtctcttttggctatccgtcgctgattggcttcaccttcctgtccgggatgatcaaaaaattcaaggaagtgttcccgaaagcgcgcgtctcaatgtatgaagcgcagctctcttcattcctgcccgccattcgcgatggccggctggatttcgccatcggcacgctgagcgacgggatgcagcttcaggatcttcacgttgagccactgtttgaatccgagtttgtgctggtggcgagtaaatcacgaacgtgcaccggcccgaccagactggcatcgctcacgcacgagcagtgggtgatgccgcaaaccgatatgggctactacaacgaactcctgaccaccctgcaagacaaccacataagcattgaaaacatcgtccagaccgattccgtcgtcaccatctataaccttgtcctcaatgccgattacctgacggtgatcccccgtgacatgattgcgccattcggctcggaccagtttattgttctgccggtggaagatgaattacccgtggcgcgttatgccgccgtgtggtcaaaaaattacagtattaaaaaatcggcgtcagtattagttgaactggcaaaacaatattcgtcgatgaatatcgaaaaacgacgatag

SEQ ID NO: 121119 - DNA, 207 bp, Enterobacter cloacae
atggctattcctgcttatctatggcttaaggatgatggcggcaacccgattaagggatctgtggatgttcaaaatagagaaggtagtatagagatcctctcttttagtcacggcttgttagttccgaccgataacaacaccggcaagatcacccggtgccagctctccgcacttcttatacatttgggatattttaatcatgcttaa

SEQ ID NO: 121120 - DNA, 393 bp, Enterobacter cloacae
atggcatgtataccgatttatccaccccgcgggctggagatattgcgcgaacacataaggctcgcgcgggcgcgtcacgaagtccagaatatggccgccccgcttacgtatacgtggttttatgagcgagtaagaaacggcgggccgtgggattacaaacaacataaacgggcttatgctgacttcgggaatttccattacggcgctgtgggttatgcagcgtgcatccctgcaaagattttgcttattgctgccggcgcggcgcagtggaaagccggcacatcaagacccgaatggggtaatttcacggggaccccgccgtttggtgatgatccgattgaccaattttggataaagcaaggcatcgactatgttaaacagcatcacttttag

SEQ ID NO: 121121 - DNA, 465 bp, Enterobacter cloacae
atgttaaacagcatcacttttaggacgctgcactggatcgccactattcttatggccctggcggtcgcggggtactgttatttccaacatatacagcgtttaactgttagtgatcggctatatgaagttcgccagctcacgccccggacctggttatacattactgagtatgacggctcgaacatgaccaccggggaagtgtatcgttattttttagcgagtaagattgacggcgatccgctggtggctctcgaaaaacaacatatcgcacccacgcttacagcgaataccgcccgcgcaaaagttgaaggcataggcaacaatatctcatttactgttcacggcactgtgtacagctttacaacgtccgcatttttttatgatgctgagggaatagcggccgcgccgtcaattgacttaacggcccgtggcgagagctgggacaaggggaaatttagtcgatag

SEQ ID NO: 121122 - DNA, 909 bp, Enterobacter cloacae
atggcctttgagcgccacattaaggatcaagcgcaggacaagccctggctaggagaaaaagcagataagcggcgagttactgaccttgttgaaacctggttcaacgctcatggagttacactctctgatggcctcaagcgtaagggcgcaatggaatttgcctgctttgctatgggaaaccctctcgctactgaatttaacgccaaactttttgcaacctaccgtgaacaacgtttaagcgggaaaattacacgttctgatcgggtaaaagcagtgactccccgtaccgttaatcttgagctggcgtatttccgcgccatgttcaacgaactaaaaagactggatgactggagtgcgcccaatccgctcgaaaacgtccgggaatttaaaatcgatgaggcagagctagcctggctgacagttgaagaagttaagcagcttctggctgagtgcgagaaaagcaaggcggaagatttagtaactatagtaaagatatgccttgcaaccggcgcacgatggggcgaggcggagtcactaacaggcaagcaaataagccccggcaaaatcacttatatcaaaaccaagggcaagaaaaaccgcgccgttccaataagtgatgagctttacgaaatactcccaaaagtaagaacatcaaaaccagtctttacggggtgctattctgcgtttcgtggggcaattaagcgagcggggattgagctacctgacgggcagctgtcacacgttctacggcacacatttgcaagccactttatgatgcgcgggggtaacattcttgtactgcagcgtatccttggacacactgatattaaggtgacgatgcgctatgctcatttcgccccagaccatctgacagaagcagtggagtacaaccccttaaatctgatttga

SEQ ID NO: 121123 - DNA, 546 bp, Enterobacter cloacae
atgaaaaaaacgctcatatcttttttaatcatgacttcttttgctgtcagtgcagcacctgaacagtacaaaagtatcagcaagttaatggatgattataacgattactcatcatacagcgtaaatggaattgagtacccggcatttaaggttttagcgcaaaatcctttgcatattcaaatatcaccaagcatctactctaaagattcaaaagaaataaaatatgagtcagataaagcgtccgtttacgctgtataccgtactctttttcagactccagctaaaagcgtgaaagttacagtcctacctttatccattgacctccaaaccaaaaaatttgaatacctaactgcggaaaaattcgatttttccataaccagaaagcaagcagaaaatcttttgcgtaagtacggcaacatccgtaaccctgaccaattaatgaccgcaagcggaagctggagcgataacttcaaaaattgctgctatctggaagagggtaagccaggcttgactaaatttgctcaagacctcatttctcaaaggtaa

SEQ ID NO: 121124 - DNA, 651 bp, Enterobacter cloacae
atgatccaaaattggaaaggtcaacaacaagatttcacgaatcgtaagtcaattcagctaccccatggcggcaaagaccctatcgaacgtatttgcgcagcttatggctttacctcacgacaggcgttatgcagacatcttgatgtgtcacaaagcaccatggctaatagggttacgcgtggtaactttcctgcggattgggttttgatatgtgctatggaaactggtgcgtctttagattggttagtttttggacgcggcgaagcccccaaaatggaaacacatattgaaaacacaaatgagatacctcaagcgcaaaaaacactccaattgagttacctgaccatccagaatggggtggtaaaaaaccaaaagcagattgatgttgcaccggaacttatcccaacaggcacaacctcgccccgccttgttggactagatagtgcgatatggatagtcgatgatttcgcaggtgagcttgtagatgggttttggttgactgaaatggatggtgttatcagtatccgcgaaatgtacagattgcctggtggtcgcgtaagagttgaaaacggaaaggcatcttttgaatgtaatgccgccgatgtgaaaattttgggtaaagccattggcaaaacagaatttatggaatga

SEQ ID NO: 121125 - DNA, 237 bp, Enterobacter cloacae
atgaatcgtaatttttcaatgcgccccagcatcaaccttgtggtatctgagccattcatcacacttgatgagttctgtcgccgtactggttacaagcctagttatgcccgtcaaatgatccgggaaaaccgcctgcccatcaggaaaaaagccggagttaacagccttatcgaaatcaacatgttcgcgttgacgatggaagcggcccaaggctgcgaagtcgcaatgcaagcctga

SEQ ID NO: 121126 - DNA, 510 bp, Enterobacter cloacae
atgtttgattatcgtgtttccaaacatccgcattttgatgaagcctgccgggctttcgcactgcgtcacaacatggcgaagctggcagaacgtgcgggaatgaacgtccagacgctgcgtaacaagctgaacccggagcaaccgcatcagctcacgccgtcggaaatctggctgcttaccgatcttactgaggactccacgctggttgacggttttctggctcagattcactgcctgccatgcgtaccgatgaacgaagtggcaaaagagaagctaccgcattacgtcatgagcgctactgctgaaatcggacgtgttgctgccggtgctgtatcgggtgatgtgaaaaccaccgcaggccgccgcgatgttatcagcagcattaactctgttactcgtctgatggcactggctgccgtttcgatgcaggcgcgtttacaggctaacccggcgatggcaagcgcggtggataccgtgacgggcctcggcgcttcgttcggtttgatctga

SEQ ID NO: 121127 - DNA, 201 bp, Enterobacter cloacae
atgctgactaaggaaccatctttcgcgtcacttctcataaagcaaagcccggcaatgcactacggtcatggctggatcatggggaaggatggcaaacgctggcacccgtgccgctctcaggatgaactgctggctgacctgtccacaaccaaacaggggaaatcatggctattgaaggcgctacggcgactgttccattaa

SEQ ID NO: 121128 - DNA, 342 bp, Enterobacter cloacae
atggctattgaaggcgctacggcgactgttccattaagccccggtgaacgcctggacggactgaaccatattgcggaattgagggctaaagtgtttggtctgaatattgagccggagcttgaaaggtttattaaagatatgcgcgatccacgcgacgtaaataataaacagaatgagagggcactggcagccattttttatatggcaaaaattccggcagaacgtcacggcgtcaatattagtgatctgactactgacgaaaagcgggaactggtgaaagcaatgaatcattttcgtgcagtggtgagcttatttcccaaacggctaaccatgccgaattaa

SEQ ID NO: 121129 - DNA, 234 bp, Enterobacter cloacae
atgcgaaatatcgaaacccgtaccactaaaaccggaccagatgatgctggactcaacctgttgctgactgaggcacgcaaagaagaacgccggggacgcgcagatgtgatggctgcacgtctggattctttagctgctcgcatcgtgtcacgtcagcttaaccacacggaagcggctgagctgctgcgtcaggaagctgtgaagattcagaacgaagcgcaggagatccactga

SEQ ID NO: 121130 - DNA, 228 bp, Enterobacter cloacae
atggctgattcaatggacctcgtacagcagcgcgttgaagaagaacgccagcgccacatccacaccgcccgcaataaagcgccgggcgtttctcgtgttctctgcattgattgcgatgcgccgatcccgccagctcgccgccgcgccattccgggcgtgcagtgctgcgtcacctgtcaggaaatttcggagctaaaaggcaagcactacaatggaggtgctgtatga

SEQ ID NO: 121131 - DNA, 858 bp, Enterobacter cloacae
atgagcactatcctgaaatgggcgggaaataaaaccgccatcatgccggaactgattaagcaccttcctgctggcccgcgactggttgaacctttcgcgggttcatgcgctgtaatgatggcgacagactatcctcattatcttgtcgcagatattaatcctgatttgattaatctttatctgatgattcagaaagaccatgaggctgtcattcaaatagcgagggagttatttaaagattttaattcggatgttcagtattaccgtgtccgccagcatttcaattacgccatttctaatgaggtagaaaaggcggcatattttctgtatttaaatcgccatggctatcgtggcctttgccgttataaccagaagggtgaatataacaatccatacggacattataaaaaaccgtactttcctgaaaatgaaatacgcacttttgccgtgaaagctaaacgtgcaatgtttatttgtgccagctttgaggaaacactggcgctgctgcaggctggtgatgttgtttattgtgatccgccatacgatggcacgtttagcggttatcacactgccggttttacagaggacgaccagtatcatctggcgtctattcttgagcgccggtcatcagaaggtcatccggttatcgtgtccaacagcgacacgtccctgacccgttcgatttatcgtaactttacccgccatcgtatcattgcaaagcgcagcatgggtgtggctgccggtgatggtaaatctgcagcagaaatcatcgccacaaaatcagctgactggtttggtgtcgatttggcgtccggtccagatatctcggtggaaactgaggtgcgggcgtggcagtga

SEQ ID NO: 121132 - DNA, 2409 bp, Enterobacter cloacae
gtggcagtgagtaaattcacattacataatgcaccaaccaccggcggctcgaatgaggccgccgtggccttttcatggaataaccccaaaaaagcggttaacccatatctggacccggcggaagttgcgccggagtctgcgctttcaaacctgattgctctttacgctgcggataacgagcaggagcagctgcgccgtgaggcgctgagcgatgaggtctgggaacgctatttcttcaatgaatcccgtgatcctgtccagcgtgaaatggagcaggaccggctgattagccatgccaaaatggcgcgcgagcagcagcgttttaatcccgatctggttattctggctgacgttaacgccatgccgtcccatatcagcaagcctctgctggagcggattaaatatttccatagtctgggcagagcaaaagcctattcccgctacctgcgtgaaacaatcaggccgtgtcttgagcggctggagcgcgtgcgtgacagtcaggtgtctgcctctttccggttcatggcgagtcatgacgggctggaggggctgctggtactgcctgaaatgaatcaggatcaggtcaagcgtctttccacgctggttgcggcacatatgagcatgtgtctcgatgcggcctgtggtgatctgtttgtcagcgatgatgttaaaccagaagaaatccgccaggcatgggaaagggttgccgcagaggcgatgcgccttgaggtcatcccgcctgcctttgagcagttacgccgcaaaaagcgccgccgcaagccggtgccctatgaactgatcccaccatcgctggcgcgtatgctgtgcgcggactggtggtatcgcaaattgtggcagatgcgctgcgagtggcgcgaggaacaactgcgcgccgtctgcctggtcaacaaaaaagcatccccgtatgtcagctacgaagccgtgatccacaaacgcgagcagcgccgcaaatcgctggagttcttccgctcacatgagctggttaacgaagacggcgacacgctggacatggaagacgtggtgaacgccagcaacagcaatccggcacaccgccgtaatgaaatgatggcctgtgttaaggggctggagctgatcgcggaaatgcgcggagactgcgcggtgttttataccatcacctgcccgtcacgcttccacgcaaccctcaacaacggcagacctaatccgaagtggaccagtgccactgtccggcagagtagtgactatctggttgatacgttcgccgctttccgcaaggcaatgcacaaggccgggctgcgctggtatggcgtccgggtggcagagccgcaccacgacggcaccgtgcactggcacctgctctgcttcatgcgcaaaaaagatcgccgttccatcaccgcgctgctgcgtaagtttgccatccgtgaagaccgcgaggagctgggcaccaatacagggccgcgcttcaagtccgagcttatcaacccgcgcaagggcacgccgaccagctatatcgctaaatacatcagcaaaaacatcgacgggcgcgggctggctaaagaaatcagcaaagaaaccggcagatcactgcgtgatagcgccgagcatgtcagcgcctgggcgtcactgcaccgtgtccagcaatttcgtttctttggtattccggggcgtcaggcataccgcgagctgcgcttgctggctggtcaggcggcgagagtgcagggcgaacgcaaagcaggtgcgccggtactggataatccacgtctggatgcggtactggcggcggctgatgcgggctgctttgccacctacatcatgaagcagggcggtgtgctggttccccgtaaacatcaccttgtccgcacggcatatgaacttaacgacgaaccgagcgcctacggcgatcacggtatccgtatctatggcatctggtccccgattgcagagggcaagatttgcacgcacgcggtgaagtggaaaaaggttcgtaaggccgttgacgttcaggaggcggcagccgaccagggcgcttgcgccccttggactcgtggcaataactgtccccctgttgaaaatctgaacaaatcagggggtgatttacccgatataaaaaccatggatgaggaggagctgcaggaatatctccacagcatgggccagaaggaacggcgggagctgacagccaggttaaggcttgtaaaaccgaagcggaaaaaagcatacaaacagactatttcggatcagcagcgcctgcagcttgaggctgagctgagttccagagggttcgatggtagcgagtcagagattgacctgcttctgcgcggcggcagtattccgtcaggtgccgggctgcgtattttttaccgcaaccaccgtctgcaggaagatgacaaatggcgtcagtggtactga

SEQ ID NO: 121133 - DNA, 189 bp, Enterobacter cloacae
atgcaggattatcttttggagtcgttgaaactccagcgcattgatttttttatcaagcttgtagcggctagtgagtgtagcgacgaagaaaagcggctggctatccagtgggtgtccgaaatgaccgacgagctgatggcgaaaatccgcagccatgaatactgtcggtcaatggacgtcaccagttaa

SEQ ID NO: 121134 - DNA, 234 bp, Enterobacter cloacae
atgcgcattgaaataatgatcgataaagagcagaagattagccaggctacactggacgcccttgaatccgagctttaccgtaatttgcgccctctgtatcccaaaacagcaattcgtatccgtaagggcagcgccaacggcgttgagctgagcgggttaaagctggatgaagacaaaaagcgagtgatggaaataatgcagcaggtctgggaggacgacagctggttacattag

SEQ ID NO: 121135 - DNA, 1056 bp, Enterobacter cloacae
atgagcaagcgtaaaaacaagaataaccgcgcagcggtagatcacaacgctaaatcaggcggcgctgtggcggaggcgttcagctttggcgacccggtgccagtgttagaccgacgcgaattactggactacgtggaatgcgtgcagatggaccgctggtatgagccgccggtaagctttgacggactggcgcggacctatcgcgccgccgtacatcacagctcaccgattgccgttaagcgtgacattctcagcagtacctacatcccgcaccgcctgctcagccagcaggcttttgcccgtttcgttcaggactatctggtgttcggtaacgcctatctggaaaagcgcaccaaccggctcggcggcgttctctcgctggagccagcgctggcgaagtacacacggcgcggcgtggacctcgacacctactggtttgtgcagtatggcctgaccacgcagccctatgaatttacgcagggcaacatctttcatctgctggagccggatattaaccaggagatttacgggctgcccggctatctctccgccattccatcaaccctgctcaacgagtccgcaacgctgttccgccggaagtattacatcaacggcagccatgcgggtttcatcatgtatatgaccgacgcagcacagaatcaggaggacgtgaataatatccgccaggcaatgaaaagcgccaaagggccgggcaacttccgcaatctgtttatgtattcgcccaacggtaaaaaggacggtatccagatcatcccgttatcggaggttgcggcgaaggatgagtttctgaacatcaagaacgtgagccgcgatgacatgatggcagcacaccgcgtaccgccgcagatgatgggcatcattcccaacaataccggcggctttggtgatgtggaaaaggccagccgcgtctttgtccgcaacgagctgatgccgctgcagaagcgactgcaggagcttaatgactggctgggcgaagaagtgatccgctttgagccgtacacgctgggactgacagaagacaagcgcaacgactga

SEQ ID NO: 121136 - DNA, 726 bp, Enterobacter cloacae
atgcactcaaccccaactaacctcatgactactgccagcctgcctgtagatcgccctttctttgcttaccagcatgaatggaacagtggcacacgcagcagaaaccgcttgcttacaaaaatgcgtcaggctggtgcggatttctttttcgcctacgaagccctgaacgatgcactgcataccggacgcaaccagatttttctgggctgcaccccggcatcagccctgacagtcaaaaactatatgtcagcttttttaggtgaggccgcagcctggacgcatcttgggaaaataaaatcaggtaaagcgcatcttgaactaccaaacggtgcggttatttattttatcgggccggaaagtctcgccgccgcgctccatggaaacgtctacgtgtcagagtatgcctgggctgactccccaaaaaatatgattgcgctcgccaaaagcctgtccatgcacgcgcgctatcacgctacctactacaccaccccaagccgcaaccccgaggcatggcaggaatacaaaaagctgattgcccgcaacagcactacctgcatggcctttaccgctgatgacgctgcagcatccggggcaacgctcgcaaccggagccgcgctctttgatgatgaatggctgaatgacatgaaaaaagagttatcagcagaggactggaaaatgctgtttatgtgcgaatggccccaggctgacaaggagcaggcggcatga

SEQ ID NO: 121137 - DNA, 1767 bp, Enterobacter cloacae
atgaacacgacactgacccccgcagacctcgatccccgtcggcaggccatgctgctgtactttcagggataccgcgtagcccgcattgctgaaatgctgggcgagaaagttgcaaccgttcacagctggaagaagcgcgacaaatggggcgactatgggccgctggatcagatgcagctcaccaccgccgcacgttactgccagctcattatgaaggagcagaaagaagggaaagacttcaaggaaattgacctgctggcgcgccagtcagagcgccacgcccggatcggtaaatttaacgatggcgggaacgaagctgacttaaacccgaacgtcgccaaccgtaacaaaggcccgcgcaggcagccagaaaagaatgtttttaccgatgaacagatcgaaaagctggaggaaatcttccgcaacggcatgtttgaatatcagcgccactggtggcaggctggcgtaaaacaccgcattcgcaacctgcttaaatcacgccagatcggggcaacatacttttttgcccgcgaagcgctgattgacgccatcaccacggggcgcaaccagatttttctctcagccagtaaggcgcaggcgcacgtttttaagcagtacatcatcgactttgcaaaagaggtggatgttgagctgaaaggcgacccgatgaccctcagcaacggcgcgtgcctgtacttcctcggcaccaacgcccgcacggcgcagagctaccacggcaacctgtaccttgatgaatatttctggataccgaaattccaggagttgcgcaaggttgcttccggtatggccattcacaagaaatggcgacaaacctacttctccacgccgtccagcctgacccacagcgcctatccgttctggtccggcgcgctgttcaaccggggccgcgccaaagcagacaaagtggatattgacctgacccacagcaaccttgcgcgcggcgtgctctgcccggacggacagtatcgccagatcgtcaccgtggaagatgcggtccgcggcggctgtaatctgttcgacctcgaccagctgcgcatggagtacagcccggacgaataccagaacctgctgatgtgcgaatttattgacgatctggcgtcagtgttcccgctcagcgagctgcaggcgtgcatggtggacagctgggaagtctggtccgattttcaggcgctggcgctgcgcccgtttggctggcgcgaagtctggatcggatacgacccggcgaaaggcacgcagaacggtgacagcgccgggtgcgtggtggtggcaccgccaaccgtgccgggcggcaagttccgcattcttgagcggcaccagtggcgcgggatggacttccgcgcccaggctgacgccattaaaaaactgacgcaacagtacaacgtgacctatatcggcatcgactctaccggcgtcggtcacggtgtctacgagaacgtgaaagcgttctttcctgccgtgcgggagtttgtctacaaccctaacgtcaaaaacgccctagtgctcaaggcatacgacattatcagccaccgccgtctggagtttgacgcaggacacaccgacattgcgcagtcctttatggctatccgccgcgcaactaccgccagcggcaaccgccctacctatgaagccagccgcagcgaagaagccagccacgcagatttggcctgggcaacgatgcacgcactgtttaacgaaccgctgcagggcgaagccgccaataccagcaacattgtggagattttctga

SEQ ID NO: 121138 - DNA, 834 bp, Enterobacter cloacae
atgacagtgaaagcaaagcgtttccgtatcggggtggaaggtgccaccactgacgggcgcgaaatccagcgtgaatggctggtacagatggctgccagctacaacccgacggtctataccgcgctgattaaccttgagcacatcaagtcttatctgccggacagtacctttaaccgctacggcagggtgacggggctggttgcagaagaaatcaaggacgggccgctggcgggcaagatggcgctttatgccgatatcgaacccacggacgccctggtggaactggtgaagaaaggccagaagcttttcacctccatggaggtcagcacgaagtttgctgacaccggcaaagcctaccttgtggggctgggggcgacggacgatccggcgagccttggcaccgaaatgctggcattcagcgccagcgccgcgcataacccgctggcgaaccgtaagcagaaccctgaaaacctgttttcggaagcggttgaaacgctgattgaactggaagaagcccaggacgaaaagccgtccctctttgcccgcgtcaccgcgctgttcaccaaaaaagagcagaccgatgaggcgcgtttctccgatgtacataaagcagtggaactggtcgccaccgagcagcagaacctgagcgaacgcacggataaatcccagtcagaacaggacaagcgcctttctgagctggagtcctccctgcaggagcagcaggccgcctttgccgagcttgagaaaaagctgagcagcgaagacagccgtaaagactaccgccagcgcgcgccgggcggtgacgcaccggcaggcaccctgaccaattgctga

SEQ ID NO: 121139 - DNA, 1062 bp, Enterobacter cloacae
atgaaaaagaaaacccgctttgcctttaacgcttacctgcagcagctggcgcgcctgaacggtgtggagattgaagaactctccagtaagttcaccgtagagccgtccgtgcagcagacgctggaagaccagatccagcagtccgccgctttcctgacgctgattaacatcacgccggtcactgagcagtccggtcagttgctggggcttggcgttggcagcaccattgccggaaccaccgataccaccaccaaagagcgcgagcctaccgatccgacgctgatggaagacgtggaatacaaatgcgagcagaccaactttgatacggtgctgacctacgcaaaactggacctgtgggcgaaattccaggacttccaggtgcgtatccgcaacgccatcgtcaagcgtcaggcgctggaccgcatcatgatcggctttaacggcgtgaagcgtgccaaaacctccaaccgtgctgaaaacccgctgctgcaggacgtcaataaaggctggctgcagaaaatccgcgaagatgcgccggatcacgtcatgggcagcacaacaagagacggtgcaacgactgcaggcgcggtcaaggtgggcaagggcggcgactatgccaacctggacgccgtggtgatggatgccgtcaacgagctgatcgacgcggtttatcaggatgatgacgatctggttgtcgtctgcggacgtgaactgctttctgacaagtatttcccgctggtcaacaaagagcaggacaacagcgagaaaattgccgccgatctgatcatcagccagaaacgtatgggcggcctgcaggccgtgcgtgcgccttacttcccggcaaatgccctgctgatcacccgtctggataacctgtccatctactggcaggaagatacccgccgccgttctgttatcgacaacccgaaacgtgaccggattgaaaactttgaatccgtcaacgaggcgtatgtggtggaggactaccgctgcgcggcgctggttgaaaacatcgaaatcggtgatttcagcgcacctgccgcaccggaaggtggggaataa

SEQ ID NO: 121140 - DNA, 651 bp, Enterobacter cloacae
atgagcctgagtcccgcacggcagcaccgcctgcgcattcaggccgaacaggccgcccgtgagggcggcagtgttcgccatgcgtcgggctatgacctgatgctgctgcagctggcagaagaccgtcgccgcctcaagggcgtccagtccacggtgaaaaaggcggaaatcaaggtggagctgctgccgaaatattccgcctgggcggagggcgtgctggcagccggaggtgcgcagcaggatgacgtgctgatgtacgtgatgctgtggcgtatcgacgccggtgattatgccggtgcgctggaaatcgggcgtcatgcactgcgccatggctgggtgatgccgctgggcaaccgtaacgtgcaaaccgtgctggcagaagaaatggcagacgcggcgcaaagcgctctgctagccgctgctggttttgatgccgatctgctcttgcagacgctggatctgacaaccgatctggatatgccggaccagtcgcgggcgcgcctgcataaagccatcggcgctgtactgagcgaaagcaacccggcatctgccctgaatcaccttacccatgcgctgcagctcgatccccgctgtggcgttaaaaaagaaaagcagcagctggagcgcagactgcgcaatgacagccgctaa

SEQ ID NO: 121141 - DNA, 465 bp, Enterobacter cloacae
atgaagtttgttgcgcccgagcaggcaccggaacaggcggaggtcatcaaaaatacgccgttctggcctgatgtggacctgtcggaatttcgcagtgtgatgcgcactgacggcacggtgacgcagccgcgtttaaagcaggtcgtgctgacggctatttctgaggttaacgctgagctgtacgactttcgcaaccgtcaacagatgctgggctggcggacacttgcagatgtaccggcggaaatgctggacggcaagagcgagcgcatccagcactaccacaacgccgttttttgctgggcgcgcgctgtgctcaatgagcgttatcaggactatgacgccacggcgccaggcgttaagcgaggggaggagctggcggaggccagcggcgatctgtggcgtgatgcccgttgggctatcagccgggtgcaggatgcaccgcactgtacggtggagcttatctga

SEQ ID NO: 121142 - DNA, 204 bp, Enterobacter cloacae
atgaaagtgcgtgcgcatcagtatgacacggtggacgcgctttgctggcgtcattacgggcgcacgcagggtgtcactgagcaggttctgcaggcaaatccggggctggctgagtacggcccatttttaccgcacgggctgcaggtggagctgccggacattacggcgtcaaccacgacgcagaccgtccagctatgggactga

SEQ ID NO: 121143 - DNA, 216 bp, Enterobacter cloacae
atgacgcttgaacgaatcagcgcctttatcacttactgcatcgccgtgctgctggcatggctgggcgatctgtcgctcaaggatgcgtcaacggttggcggcgtactgattggtgtgctgatgctggctatcaactggtactacaaacaccagtctttcaaattgttacgtggcggcaagatttcgcggggggaatatgaatccttcaatcgttaa

SEQ ID NO: 121144 - DNA, 510 bp, Enterobacter cloacae
atgaatccttcaatcgttaagcgctgccttgtcggggccgtgctggctatcgccgccacgctgcccggatttcagtcgcttcatacctccgttgaggggctgaaacttatcgccgattacgagggatgccgcctgcagccttatcagtgcagcgcgggcgtgtggactgacgggatcggtaatacgtccggtgtggtgccgggaaaaaccatcacggaacgacaggcggcgcagggacttatcaccaacgtgctgcgcgtggagcgggcgctggataaatgtgtggtgcagccgatgccgcaaaaggtctatgacgcggtggtgtcgtttgctttcaacgtgggcaccggcaacgcctgcagctcgacgctggttaagttgctgaaccagcggcgctgggcggatgcctgccatcagctgccgcgctgggtatatgtcaaaggtgtgtttaatcaggggctggacaaccgccgcgcgcgggaaatggcctggtgcttaaaaggagcataa

SEQ ID NO: 121145 - DNA, 378 bp, Enterobacter cloacae
atgaaaaagaaagtcatgagcgtttttttccagctggcatgggctgcgctgttggttatcagtctgctgtatccgcgtagcggtgcgccggttctggttggtgcgtctgtctgggtgtcatgcttcctcgcctggctgctcgctgcgctgtgcgctgtggggtggttcgccggagatcgtgcgcgcgatgaggtcggggcggcactgctgaaattcagggtgcaccccgtaaaaccagtgcgtacatgggtaatcaggcttcttattgttctgtgcctggcgttttcgggatgggggatcaccctggtgttttacctgctgacgctggttttgtatcagattgcccgcgtgcaacttcatgagccggtggcggcctga

SEQ ID NO: 121146 - DNA, 426 bp, Enterobacter cloacae
atgcgtgcgctggcggtagtgctggcgctggcatttgcggcgctgggctggcagtcatggcggcttaacaatgccagccacaccatcgaaacgcagggcgcggcgctgaaaagcaaaacgcaggagctgacgaagaaaaacagccagctgatcggcctgtccattctgactgaaaccaacagccgggagcagacgcggctttatgcggcagcggaacagaccaccgcactactgcgcagccgccagcaccggatcgaggaactgaaacgtgaaaacgaggatttgcgccgctgggctgatactcctttgcctgctgacattatccggctgcgggagcgtccggccctcgccggaggtgcagcttaccgtgagtggctgtcccagagtgacgcagtgccgcctggaaaggtcagcgccgcgcagtaa

SEQ ID NO: 121147 - DNA, 432 bp, Enterobacter cloacae
gtgaacaaaccgcagtccttacgcagcgctctgaataaagcggttgcctatgtccgggacaacccggacaagctgcaccttttcgttgataacggctcactggtggcaacaggagccagctccatgtcatgggaataccgctacaccctgaacgtggtgatcgaggatttcagcggcgaccagaatctgctgatggctccagtcctgctgtggctcagtaccagccagccggatgccatcaacaacccggaactgcgcgaaaaactgctcacctttgaagtggatattctgcgcaacgatgtgtgcgatatcagcctgaacctgcagctgacggagcgcgtgcttgtcagcactgacggcagcgtgtcaagcgttgaagcggtgccggagccggacgaacccgaagaaatgtggacggtgaaacgtggatga

SEQ ID NO: 121148 - DNA, 447 bp, Enterobacter cloacae
gtggatgagctgcagagggtggatgactggctgacggcgctgctggcaaatctggagcctgctgcacgcagccgtatgatgcggcaactggcgcaacagctgcgccggacgcagcagcagaacatcaggttgcagcgtaatcctgacggcagcggttatgagccgcgccgggtgacagcccgcagcaagaaggggcgcatcaaacgccagatgtttgcaaagcttcgcactacaaaatacctgaaaaccgccgccagtgcggactccgccagcgtgcagtttgatggcaaggtgcagcgcattgcccgtgttcaccattacggcctacgggatcgcgtcagccgaaaaggcccggaggtccgctacgcagagcgccgccttttgggcgtgaatgatgaggtggaaaccatcacccgtgacactctgctgcgctggctggcggggtga

SEQ ID NO: 121149 - DNA, 579 bp, Enterobacter cloacae
atgaatgcacaactgaccgaaattatgcgccttatcaccaacctgatccgcaccggcaccgtgaccgtagtggaccgggaaaactggctgtgccgggtgaaagtgggcgagcttgaaaccaactggattaactggctgacgctgcgtgccggtggtgcccgtacatggtggtgcccgtcgccggatgagcaggtggtggtgctgagcatgggcggcaatctggaaaccgcttttgtgctgcctgccatctattccaatcagtttgcgccgccgtcagattccgtggacggctgcgtgacggagtacccggacgggggctggtttgagtatgaacccgccaccgggcggtggcatgtccggggtatcaaatccatggtgatcgaggcggcggacaatatcaccctcaaaaccggtgagtttgtggtggaggctgacaccacgcgcatcaacagtgaggtggtgatcaatggcggcgtcacccagggcggcggcgcgatgagttccaacgggatcgtggtggataaacacggtcacaccggcgtgaagtccggcggcgatacgtcaggaggcccggtatga

SEQ ID NO: 121150 - DNA, 360 bp, Enterobacter cloacae
atgacgctgtatatcggcatgggccagggcaatggcaaggccattactgatacggaccatctgcgccagtcagtgcgggatattctgctgaccccacagggcagccggatcgcccgccgggaatatggttccctgctgtccgccctgattgaccagccacagaacccggcgctgcgcctgcaggtcatgtctgcggtctatgtggcgctgagccgctgggagccacgacttacgctggattccatcaccatcagcagcaattttgacggctccatggtggttgagcttaccgggcagcgcaacaacggcgcgccggtttccctttcggtgtcaacaggagcagacaatggcagtgattga

SEQ ID NO: 121151 - DNA, 909 bp, Enterobacter cloacae
atggcagtgattgacctttcccagctgcccgcgccgcagatagtggacgtgccggattttgagacgctgctggctgagcgcaaggccgcttttgtggccctttatcctgaggatgagcaggacgcggtacggcgcacgctggcgctggaatctgaacccgtcaccaagctgctgcaggaaagcacctaccgcgaaatacttctgcgccagcgtattaacgaggccgcgcaggcggtcatggtggcgtatgccatcggtggcgatctcgatcagttggcagccaattacaacgtgaagcgcctgacggtaacgcctgctgacaatgacgcggtgccgccggtcgcagccgtcatggaaagcgatgaggcgctacgcctgcgtgttccggctgcgtttgaggggttgtccgttgcgggaccgacggcggcctatgagtttcacgccaaaagcgcggacgggcgcgtggcagatgccagcgcaaccagtccggcaccggcggaggtggtgcttaccgtgctgagtcgtgagggtgacggtacggcaggggctgctctgctggcggtggtggatcaggcgcttaacagcgagaacgtgcgcccagtggcagaccgcctgacggtgcgcagcgccgaaataatcccgtacagcgtggatgcgacgatttttctttatccggggccggaagctgagcctgtgatggcggcagcaaaagccagcctgcagaagtacatcgccagtcagacgcggctgggccgtgatatccgccgtagcgccatttatgccgcgctgcacgttgagggcgtccagcgtgtggaactggcgtccccgctggctgatgtggtgctggataagacgcaggcggcgtcctgtacggaatggagcgtaaccaacgggggcaccgatgaatag

SEQ ID NO: 121152 - DNA, 606 bp, Enterobacter cloacae
atgaatagcctgctgccgccaggttcatcgccgcttgagcgccgactggcgcagacctgcagcgggatttccgatctgcaggtgccgctgcgcgacttgtggaacccggcaacgtgtccggtcagctttctgccgtatctggcgtgggcattttccgttgaccgctgggacgaaagctggacggagagtgttaagcgtcgggtagttcaggacgctttctatatccatcagcacaaggggacaaccagcgccgtgcgtcgcgtggtggagccgttcgggttcctgatccgcatcattgagtggtggcaaaccggcgagacgccggggacgtttcgcctggacattggtgtgcaggaccagggcatcacggaagaaacgtatctggaactggagcgcctgatcagtgacgccaagccgtgcagccgtcatctgatcggtatgtccatcaatctgcagaccagcggcccctattttgtgggcgcagctacctacaccggcgaagaaatcacgatctacccgtatatcaacgaaaccattatttccggcggcaccgcttacgagggcggggcggtccatgttattgacacaatgagagtgaatccatga

SEQ ID NO: 121153 - DNA, 1305 bp, Enterobacter cloacae
atgagcgcaaaattttataccctgttgacggatatcggcgctgcgaaactggcaagcgccgccgcgcttggtgtcccgcttaagattacccagatggctgtgggcgacggtggcggcgtgctaccgtcgccaagcgcgcagcagacagcgctggttgcagaaaaacgccgcgcttccctcaatatgctgtacatcgatccgcagaacagcagtcagattattgctgagcaggtgatccccgaaactgagggcggttggtggattcgtgaggttggtttgttcgatgaaaccggcgcactgattgccgtcggcaactgccctgagagctataagccgcagctggcggaggggagcgggcgcacgcagacggtgcgcatggtgctgattaccagcagcaccgaaaacattaccctgaaaattgacccgtcagtggtgctggcaacccgtaaatacgtggatgacaaggtgctggagttgaaggtgtatgtggatgaccttatggcaaagcatatcgacgctaacgatccccatacgcagtatgcgccgaaagtcagcccgacattcactggcatgccaaaagcgccgacggcggcggcaggcaataattccacgcagcttgcaaatacggcctttgtacaggcggcaattgccgcgcttgttgattcctcaccgggggcactggatacgctgaatgaactggctaaagcgttaggtaacgatccgaactttgccaccaccatgaccaatgcgcttgccggaaagatggataaatcagccaatggtgctgatatcgccgatatttccgagtttctgaataatcttggtctgggggctggctccgctctgccggttggtgttcctgttccttggcctcttgcagcagcacctgccggctggttgaaatgcaacggtgcagcctttactgctgcgcagtatccgaagctggctcaggcgtatccggggctaaagcttcctgatttacgcggtgagtttattcgcggctgggatgacgggcgaggtgtagatagtggaagaaatttagtcacggcacaaggggatgcaatcaggaatatatcaggtcaaattttcgcgggcacctctggtaattcgcagtatgttttctctggtgcaaacggtgctttttcacaaagtggattaccattcggccccaatcttgcgggaagcaccggcactggcgaccagcggtcttctggtatcgaattctccgcatcacgtcaggttccgacagcactcgaaaatcgtccgcgtaacatcgcattcaactttatcgtgagggccgcataa

SEQ ID NO: 121154 - DNA, 597 bp, Enterobacter cloacae
atgcagactgcagtattagaaaatggcttcgctgtcgtggcgggggaagttgtcgtgttcaactacgacggcctgacgcgagagtacctctcacagtcaacagagtatctaccggttggcgtcagtatccctgctaatgcctgcacagacaccccgttggctgcaaaaagcggttatgctgtctgtagaaacattaagctgacaggttgggaatatctggtggatcaccggggtgaaactgtctggaatgttaaaaccggggaggcgcaacaaattaccgtactgggcgattatcctgctgataccaccatctacccgccatcgacaccttatgataagtggaacggtgagcgctggttaacagatgaggcggtgaaagctgcggcagacattgccgaagcgacagcaactaaaacagcgcttatcaaaggtgcagctgagaagatagagccgctgcaggatgccgttgagctggatatggcaaccgaagaagaaaagagtagttatgatgcctggcgaaaatatcgtgtgttgctgacgcgcgtggatacatcgctggcaccggatattgactggcctgaaccacccaaagattaa

SEQ ID NO: 121155 - DNA, 1173 bp, Enterobacter cloacae
atggctcaggataaccaccacggggtgcgcgttgttgaaatcaacgagggcacccgatccattaccacggtgagcaccgccatcgtgggcatggtctgcaccggcgatgatgctgatgcgtccatgtttcccctcaataagccagtcctactgactgatgtactaaccgccagcgggaaagcgggcgagtccggcacgctggcccgttcgctggatgccattgccgaccaggcgaaacctgtgaccgtcgttgtacgtgttgcgcagggcgaaaccgaagcggagaccacctccaacattatcggcggcgtgactgctgacggtaaaaaaacgggcatgaaagcgctgctttcagcgcagtcgcagctgggcgtcaagccgcgcatcctcggcgtgccgggacacgacacgcaggcggttgctactgagctgctgagcgtggcgcagagtctgcgtgggttcgcctacctgtccgcctacggctgcaaaacggtggaagaagcgattgcctaccgtgacaatttcagccagcgagaggggatgctgatctggcctgacttcatcaactttgacaccgtgatgaatgcagatgcgacggcctacgcctccgcccgtgcgcttggcctgcgtgccaaaattgacgaacagaccggctggcacaaaaccctttctaacgttggcgtgaacggcgtcaccggcatttccgccgatgtgttctgggatctgcaggacccggcaaccgatgcgggactgctcaaccagaatgacgtgaccacgcttatccgcaaagacggcttccgcttctggggttcccgctgcctcagtgacgatccactttttgcctttgagaactacacccgcacggcgcaggtgctggctgacacgatcgcagaagcgcacatgtgggcggtggatggcgtgcttaacccgtcgctggcccgtgacattatcgaaggtatccgcgccaaactgcgcagcctgaaaacgcagggctacatcatcggcgcagattgctggctggatgagtcggtgaacgataaagactccctgaaagccgggaaactcactatcgactacgactacacgccggtgccgccgcttgaaaacctgatgctgcgccagcgcatcaccgatcagtacctgctggatttctccagccaggtcagcgcgtaa

SEQ ID NO: 121156 - DNA, 516 bp, Enterobacter cloacae
atggctttaccacgtaagttaaaacacctgaacctgttcaacgacgggaacaactggcaggggatcgttgagtctctgaccctgcctaaattcacacgcaagtttgagaagtatcgcggcggcggtatgccgggcgcggtggacgtggatatggggctggatgacggcgcactggacacggaattttcaatcggcggcaccgaactgctgttattcaagcagatgggcaaagccactgttgacggcatccagcttcgtttcaccggctccattcagcgtgacgataccggcgaagtgcaggccgttgagctggttgtgcgcggacgtcataaagaagtggattccggcgagtggaaaaccggcgagagcagcaccacgaaagtcagcagcaccaacagctacgcgaagctgaccattaacggtgaggtactttatgaggtcgatctggtcaacatggttgaaattgttgacggcgtggacctgatggaagaacaccgtaatgccctcggcctctga

SEQ ID NO: 121157 - DNA, 303 bp, Enterobacter cloacae
atgagcgacaaactgactgaaaagactgtgcaactggataccccgatcaagcgcggtaaaactgaaattaccgaaattgtgctgcgcaagccgcagtccggcgcactgcgtggcacccgtctgcaggccattatggatatggacgtgggcgcgatgatgactgtaatcccgcgaatctctaccccgacactgaccgcgcaggaaatggcagaactggaccccgccgatctcaccgcattgtcggtagaggtggtgacttttttgttgaagaagtcggtgcttgccggtttaccgacagcctga

SEQ ID NO: 121158 - DNA, 3450 bp, Enterobacter cloacae
atgagtgacaacaacctgcgcctgcaggtgattcttaatgcggttgacaagctcacccgcccattccgatccgcgcaggccagctcaaaagagctggctactgcgcttcaaactacccggaacagtttgaaagaactgaataaacaggccgggcgtattgatgaattccgtaaaacccggtcacagcttgcaatcactgcaacaaatctcagtgctgcgcgcgaagaagccgcaaaacttgccacgcagtttgctgcaacaaatcgcccaactgctgctcaggctagattatttagtcaggcaaaaaaccgtgtgcaggaactgcagcagacctacaacggcctgttgggttcggtacaacggcagcggcaagcgctgaaagaatccggcattgatactaaacagctcagtagcgcccagcgggaactgcgtaaaaatgccgacgaaacccggcaggcgatggaacgtcagcagaaatccctgaaacgcctgggcgaacagcaagcgaaaatgaatgccgcacgtgagcaatattcacgccgtcttgaggtgagggatcgcattgccggagcaggggcaaccaccacggcagcggggctggcaatgggtgcgccggtcatggcagcggtgaaaagctactccagcatggaagatgccatgaaaggcgtggcaaagcaggtaaacgggttgcgggacgataacggcaaccgcacgaaacagttttatgacatgcaggatgctatcaaggccgccagcgaacagctgccgatggagaacggcgctatagactatgccgcactggttgaaggtggtgcgcgcatgggcgtgactaaacaggacgatccttacgaagaccagaagcgtgacctgctggcctttgcatccacggcggcaaaagcggcaacggcgtttgagctacccgccgatgaattagctgaaagtttgggaaaggtggcgcaactttataaggtgcctacccgtaatatcgagcagttgggcgatgcactgaactatttagatgataacgctatgtcaaaaggcgcggatattatcgacgtgctgcagcgcatggggggtgtggctgatcgattggactatcgtaaagcggctgcgcttggctctacgctgcttactctgggggctgccccagaagtagccgcaaccgcagctaatgcgatggtgcgtaaattgtctgccgcaacagttcagggaaaaagttttcaagaaggggtgggcatattaaagctcgatcctgaaaagcttgaaaaacaaatgaccaaggacgcgatggggactattcagagtgtacttgagaaggttaatagtctacccaaagataaacgattaggcgtgatgtctttagtctttggaaatgaatttggtgatgatgcggcaaaacttgcaaacaatcttacagagctgaaacgccagcttagccttactgcaggcgatgaagcgaacggctccatgcagaaagaatctgatatcaacaaagactctttatctgcgcagtggttgctagtcaaaacaggggcgcagaatgctttcagtagcctgggcgaaacgctgcgccagccattgatggatattatggattccgtaaaaagtgtcactggcgcattacgtagctggatagaggccaacccgcagctggcaggcacgttgatgaaagttgctgcagcgactgccgcgatcaccgttgcgctcggtatgcttgcagtggcggtggctgcagtgctggggccgatagcggtgatccggtttggcctgtctgtcttgggtgtaaaaactttaccttctgttactgccgcagttacccgaactggaagtacgttgtcatggctggcaggtgctccactttccctgttgcgtcgtggtatggcctcatccggcggcagtgccgggctgctgagcgctccccttaattccttgcgccgttctgccgggctggctggcaatgcactgaaagctgtagcaggtgcgccgcttgtaatgctacgcgcgggaatgtcaggcattcgtaatgttattggtatggtgatgaatccgctggcggcgctgcggggtgggttatctgctgccggtggcgtgctgcgttttctggtatccggcccactggcattacttcgtgtcgcgctatatggcattttcggtctgctgggtgcgttacttagtccgatagggctggttgtggctgcgctggctggcgtggcgctggttgtctggaaatactggcagccgatcagcgcatttttgggtggtgtggtggagggattcaaagccgctgctgcaccgatcagtgctgcctttgagccattgcggcctgtttttcagtggattggcgacaaggtgcaggctttgtgggggtggttcactgatttgcttacgccggttaaatccacttccgaagagctgaacagcgcagctgcaatgggccgcaggtttggtgaggcactggcggaaggtctgaatatggtgatgcacccgcttgagtctctcaagtcaggcgtgtcgtggttgctagaaaaactcggcatcgtcagtaaggaagcggcaaaagcaaaattaccagaacaggttacacgacagcatcctgctacggtgaacagtgacggtaaggtggtgttgccacctggcggatttccgtcgatggggtttgcaggcatgtatgacagcggtggcacaatccagcgaggtcagtttggcatcgttggggagaacggccccgaaatagtgaacggtcccgcaaatgtcaccggtcgaaaacgcactgctgagctggcaaggatggcggcaacgctcaatccttcacaagcggaaccagccagcgctaaacggcgtcctgaaagcaggattattttgccgcctgatagcgtgaatggcccagcaaaccttcctgtaagcaatcgtgctactgaactgacgaaactggcggcaaaggtaagcccctctcacgatgtaacatccagccgggagcaacgggctgaaagccggttaatgttgccgtctgaaatcgctaacgccccggtaaaatttccgagtagagatcgctctgttgagcttgctggtatcgctgcagccgtcatgccgacacaggccgttacggaaatcacggcgaaaagggctgatccggagactttaagtcagaaggttctggcttccgtcatagctggcgtaatgggcgtagcggcagcacctgcggaggctgctccactgcatccgtacagcctaccggcaatggcatacaaacaaagtcaacctgcgaaatctgccagcgtaccgccagtgatccgttatgagattaacgcgccgattcatatcactgcccagcctgggcagagtgcgcaggatattgcccgcgaagtcgcgcggcagcttgacgagcgcgagcgcaaagccagggctaaagcgcggagtaatttcagtgatcaagggggatatgaatcatga

SEQ ID NO: 121159 - DNA, 486 bp, Enterobacter cloacae
atgatgatggtgctggggttatatgtcttcatgctgcgtacagtgccatatcaggagctgcagtatcagcgaagctggcgacacgccgccaacagtcgggtgaaccggcgaccatcaacgcagtttcttggcccggataatgacccgctgacgttatctggcgtactgctgccggaagtcaccgggggcaggctgtcattgctcgcgctggagcaaatggcagagctgggcaaagcatggcctctgattgagggaagcgggaccatttacggcatgtttgtgatcgagagcctgagtcagacaaaaacagagttttttgaaagcggaatgcctcgccgtattgagtttacgctgaccctgaaaagggttgatgagtcgctgtctgatatgttcggcagtctcagcgatcagctcagtaacctgcaggactctgcaacatctgcgataggtaatattaaaaatacggttggagggttgctgcagtga

SEQ ID NO: 121160 - DNA, 1101 bp, Enterobacter cloacae
gtgaattttagctctgatctttttgacctgaacagcaaaagcccggctttcagtatcaccattgaaggtaaggacgtgactaccgcgctggatgcgcgcttgatgagtctgacgctgaccgataacaggggttttgaggctgaccagcttgatctggagctggacgacgccgacgggcagatcgttctgccgcgacgtggtgccgttattcagctggcgctgggatggaagggccagccacttttcccaaaaggggcattcacggtggatgagattgagcatagcggtgcccctgaccgcctgaccattcgcgcacgtagtgctgattttcgtgaaaccctcaatacccggcgcgaaaagtcatggcaccagacaaccgttggcgatgtggtaaaggaaatcgcagcacggcatgacctcaaaatggcgttgggtaaagacctgacggataaggcgctggatcacatggaccagaccaatgaaagcgatgccagtttcctgatgaagctggcgcgccagtatggggcgattgcttccgttaaggatggaaacctgctgtttatcaggcaggggcagggaagaacagcgagcggtaagccgttgccggttatcaccattgaacgtaaagccggtgacggtcatcgttttaccctggctgatcgtggtgcttataccggtgtaattgccagttggctgcatactcgcgaacccaagaaaaaagaaacaaccaaggttaagcgccgccggaagaaaaccaccgcgcccaaagagccggaagcaaaacagggtgattatctggtgggaacggatgaaaacgtgctggttcttaatcgtacttacgcaaaccgcagcaatgctgagcgtgcggcaaaaatgcaatgggagcgcctgcagcgtggtgttgcgtctttctccctgcagctcgctgagggccgggcagatctctacaccgaaatgccggtaaaggtgagcggctttaagcagcctatcgacgatgccgaatggaccattacaactttgacgcatacggtcagcccggataatggttttactaccagtctggagcttgaagtaaaaattgatgatttagaaatggaatga

SEQ ID NO: 121161 - DNA, 1743 bp, Enterobacter cloacae
atggccggaagaatcccacgcgttttcatcaatgacctgcttgccagaaccgacatcgtcgatctcatcgacgcgcgggtgaagctaaaaaagcagggcaagaactaccatgcgtgctgtccgttccataacgaaaaaaccccctctttcaccgtaaacggtgaaaaacagttctaccattgcttcggctgtggcgcacacggtaatgccgtcgattttttgatgaactacgacaagctcgagttcgttgaaaccgtcgaagagctggcggcgatgcataaccttgaagtgccgtatgaagcgggaactggcctgagtcagatagaacgccatcagaggcaaaatctctatcaattaatggaagggttaaatgatttttatcagcaatccttcacccaacccaacgccgaaccagcacgccagtatctgaatcaacgaggtctaagtgccgagattgttcagcagtttgcaattggttttgctccgccaggctgggataacgcgttaaaacgtttcggtggtaatgtcgacaacaggaaactgctgctcgatgccggaatgctggtcaacaacgaccagggaagaacttatgaccgtttccgcaatcgagtgatgttcccgattcgcgacaaacggggccgggtgattggtttcggtggacgtgtattgggtaatgatacgccgaaataccttaactctccggaaacagagatttttcataaaggccgccagctttatggcctttatgaagcccagcagcataatgctgagctaccacgattgttggttgtcgaaggatatatggatgtggttgccttggcgcaatacggtattcattatgccgttgcttcgctgggaacatcgactacagccgaccatatgcatatgttattccgggcgactaacaacgtcatttgttgttacgacggcgaccgtgcaggccgagatgccgcatggcgtgcgcttgaaaccgcaatgccttacatgacagacggacgtcagctacgctttatgtttctgcccgatggtgaagacccggatacgctggttcgtaaagagggtaaagaggcatttgaagcaaggatggagcaggctcagccgctctcaatgtttttatttaacagtctattgccacgggtcgatttgagttcaccggatggcagtacgcaactggctgcactagcgttgccgcttatcagtcaggtccctggcgatgcgcaccgtattcagctgcgccagatgctaggtctgaagttgggaatttttgacgacgcccagcttgatcgtttaatgccaaaacaggcagaaagtggtgtcgtacgccccactcagcagataaaacaaactcctatgcgtatacttatagggctgctggtgcaaaacccgaatctggctccgttggttccacctttgcatgggttagtgcagagcaaactaccaggactcagcttgttcaacgagttagtaagtctttgtgttgcacagccaggccttaatacggggcagcttctagagaactatcgtgggacaaatgaatactcaacacttgaaaaactctcagcctggaacgatataagggatgagaatgttgaaaaaatgttcaccgacacgctaaaccgaatctttgattcaatgcttgaacagcgacaagaagagttgatagctcgcgatcgcacgcatggtttaagcagtgaagagcgcagggagttctgggaaatcagacaagccctggaaaaaaaatga

SEQ ID NO: 121162 - DNA, 795 bp, Enterobacter cloacae; identical to SEQ ID NO: 119503

SEQ ID NO: 121163 - DNA, 1077 bp, Enterobacter cloacae
gtggcggagatctggcagccgtgcgcggcgcgtccgatgatcgtcaacctgcccgctaccgtcgaggtgagcacgccgaacgtctatgccgaccagatcgagtatttctgccgccacttcagccgccgcagtgacgtctgtatcagcgtgcacccgcataacgatcgcggtaccggcgtcgccagcgcagagctggccgtcatggccggggctgaccgcgtggagggctgcctgtttggtaacggtgagcgcacgggcaacgtctgcctggtgacgctggcgatgaacctctacagccagggcattagcccgaatctggatttcagtgatatgaatcgggtggttgaaacagtagaaaccagcaaccagctgcccgtccatccgcgccatccgtgggcgggtcgtctggcttacaccgccttctccggctcgcaccaggatgccatcaagaaaggtttcgatgcccgtaagcctggcgaacgctgggagatgccctatctgcccgtcgacccgcaggatattggctgtacctatgaagcggtgatccgcgtgaacagccagtcaggaaaaagcggaagcgcctggcttattgagcaaaaccacggcctgaaattgcctcgcgccctgcaacaggattttagccagcacgtgcagcaggaaacggataaccatggaaaagagatgacgcagaatgcgctctggcagctgttccgcgcccgctacggcctggtggcgagcccgccattagcgctgcaatcgtaccgcagcgacagccagcaggacggccagctgcggctgacggcaagcgtcgccacgcaagggggcacccgccagctggaaggccagggaaacggtttgctctccgccgccgctcacggcttaagccgctggatcaacgcaccgtttgtgatcaaggattatcacgaacatacgttaggcgaacgcagcgacagccgctcggtggcctatatccgctgtctgttccaggatgggaccagccgctggggcgtgggcatcgacagcgacgtggcacgcgcgtcgattcaggcgctttttaacgcggtcagtcgttcctga

SEQ ID NO: 121164 - DNA, 11424 bp, Enterobacter cloacae
atgagccaaatatctgttatatcgaaactaactggcgtggaaacgaccacggagggaacacaggtaacactcggccattcgtctattgttaaacttaacgtggatcgcgccgatatctcaggttactcccgcagcggaaacgatctggtgattaccctccactcgggcgaagtgattaccctcaagaatttctacatcaccgacgcgcagggcgtgagccagctggtgcttgaggagagcgacggtgcgctgtggtggattgaagatccaaccggtgccgccacctatgaatccatcgcctccacggacgccctactggcggcgtcagggagtgataccggcggcgccgcagcgtggccctgggtgctgggtggcctggccgtcgcaggtgggattgccattgcggcgggaaccggcggtggaggtggcggggatgacgataacaacagtccgaatcccggcaatccgggaaatccttccgagccagataccacgcctccggatgcccccaccaatctacaggtctcacctgacggcaaaaccgtcaccggtaccgctgagccgggcagcacgattaccctgaaagatgccgatggcaacaccatcggaacgggcaaggcgggtagcgacgggaaatttacgattgatctcggtacgccactcaccaacggggaacagatcaccgccaccgccaccgatccgtccggcaataccagccagggcggtcaggttacggcaccggatctcaccgcgccggatgccccggccaatctggaggtctctcctgacggcaaaaccgtcaccggtaccgctgagccgggcagcaccgttaccctgaaagatgccgatggcaacaccatcggaacgggcaaagcgggcagcgacgggaaatttacgattgatctcggtacgccgcttaccaacggagaacagatcaccgctaccgccaccgatccgtccggcaataccagcccgggcgttcaggtcacggcaccggatttaaccgcgccggatgcacccgagattgtcaccgtcaatgataacgtgggcgccgaaacaggcccgctgagcaacggacaacgcacggacgatgcccgtccgacgttcagcggcatcagtgaagccggcaccgtcattaccttctatgacaacgggaaaccgattggcaccgccacagccgatgccaccgggaaatggagctttaccccgtcgaccaacctgtctgaaggcagccacgccattaccaccaccgcgaccgatgccgcaggcaataccagcccggcgtccacggcggtaaccttcgtggtcgataccgtcgcgcctggcgcgccagcgatcgtcagcctcaccgatgatgttgcgcctggcaccggcacgctcgggagtggaagcagcaccaacgacccacggccacagctcaccggcacggcggaagcgggctcgacggtcaccatctatgataacggcattgccattggcacagcggttgtgggcagtaacggaagctggagctttacgccgtcggtgaacctgagcgaaggcagccaccagcttaccgtgcgcgctaccgacgtcgccggtaacactggcccggcctcgccggtctttaccgtcacggtagatgtcaccgcgccgcaaacgccttccggatttatcattaacgacgacacgggcgtactgaaaggggcgatcggtgccgggcaatttaccgatgcctcagagccgcgcctgacgggcagaggcgaaccgggcagcacgatcacggtttacgataacggcgttgttatcggcaccaccaccgtcctgccgaacggtacctggagcatcacgccgacgagtccactggcagaaggcgcacactcgattaccctgagggaaaccgatgcggcaggcaaccagagcggtctgtctcagccgatcaactttaccgtcgatcttacgccgccagacatgccggttgcgacgctcaactccgcaggcacccagatcaccggtaccgccgagccgggcagtaaaatcgtcatcaccaacaatgccgggctgcaaatcgggaccgccactgccgacagcaacggcaactatgtcgtcaacctgaaccctgcgcagaccaacggcgagattatctccgtggtcgcctccgatgccgcaggcaaccagagttcaccggcgctggttaacgcagcggatatcactccgcctgccgcaccgggcaacctggtggtggcggaagacggggccagcgtcagcggaaccgccgagccaaacagcacgattatcattaaagcgccggacggtacgatcatcggccaggccaccgccggtccggacggcacatttaccatcccgatttcgccagcccagaccaacggcgaagcccttgaagtgacggccaccgacggcagcggtaacaccagtccgtctggctttgccgacgcgccagacagcaccccaccgctggcgccggaaaacgtggtgatctctgccgacggcaccaccgtaaccggtacagccgagccgggcagtaccgtcaccattcgtgaaaatggcgtgaaggtcggggaagcggtcgccgacgatcaggggaatttcagcgtagatctgatcccgccgaaagccaacggcgaagccctgaccgccgatgccactgataccgccggaaacaccggtccgaccgcgccgtttgacgcgccggacatcaccgcggcacaaaccccggtcatcacgggcgtggtggatgatgcccccggcgtcaccggtcctgtcagccagaacggtctcaccaacgacagcacgcctaccatcaacggaacgggcgagcctggcaccaccatcaccctctacagcggtactaccgaaattggcaccgcagtcgtgtcggcgaacggtcagtggtccatcacgctggaaaccgcgctaccggacggcgggcacgtactgacggcgacggcggttgacgccaacaataacctcagcgggacatcgaatacctggagcatcacggtggataccgccgccccgggcgcgccggccattacgcaggtcattgatgacgtaccgggccgcacgggtgcgctcgacaccaatgaaaccaccaacgatacgctcccgacgctgaacggtaccggtgagccgggctccaccgtgacgatccgcctggacggacaggatattggtactgccgttgttaacagcggtggcgcatggaccttcacgcccaccaccccattagtgaacgggcagcatacgttcaccgtcgtcgcgagcgatgcggcgggcaacgccagcgcaccatcagctggctttacctttaccgtcgatacgactccgccaccggcggccaccattgacatcgtttccgataacgtggggcccgtgcagcttccgcttaacagcggggacaccaccgacgacacgctgccgcagttgcagggaaccgcaccggacggcaccaccatcacgatctatgacggaaccaccctgctcggcacggccgtgctcgacggcagcggtggctggagcttcacgccaaccacgccgctgacggacggcccgcactcgctgacggtccacgcaacggatgaggcgggtaacaccaccatttcgccgccgtttgaactggcgatcgacacgaccgcgcctgcaacgccggatattcctgagatcaccgtcaacccggacggcggcacgccggggacggccctgaatcctggggagaccacccgggataccacgccaaccctgagcggctcgggcacgccgggggataccgtgaacatttacgatggcgccaccaaaattggtgaggccgagatcgatggcgacggtaactggagctggacgcccaccactccgctgcctgacggcacctacgatctctccctgacggtcactaaccaggacagcgccgggaacgaaagcgcgccgtccacgccggtgaccattaccattgataccgacgcgcctgaccagccgggaaccccaacggtgacagacagcgtaagccagatcaccggccccgtgctggatggcgaatccaccaacgatccgcgtccggtcctgagcggcaccggtacgccgaatgacgtcattaccatctatgaccaggtgggtacaggcgagccgcaggccgtgggcagcgttacggtggacggtaacggtaactggagctggcgtcctgagagcaacattggcgaagggacgcatgaatacacggcgaccgccaccgatgaagccgggaacgaatctgtgccatcagccggtatcacgataacggtcgataccctcgccccggacacccctgttatcagcgacatcgccggcgcgcagaacggcgggtccactaacgacaccacaccgaccctgagcggaaccggcaccaccggcgagacggtgatcatctacaacaacggcgtggaagtggatcgcgttgaagtcgtcaatggcggatggtcctataccctgccgacgcagaccgacggcccgctgaatatcaccgtcgccgcggtggacgatgccggtaacgttagcccggtaagcccggtctttacggtggaggttgatacgcaggcgccaaccgtgccgcaaattgacgccgtctctgacagccagctgaccaacagcgtgctttacacccgcgacggtacgccaaccctcaccgggattggcgagccgggttcgagcgtcaccgtttctgttgatggtgtcgcctcgccggtggtcgtggaggttcagccgaacgggacatggtcctggaccgccgaccctgcgcttaccgaggggccgcataccttctcagtggccgcgagtgacgcggcggggaatacctccgccagctccggggatctcagcgtgacggtggataccctgccgcctgcaacgccaacgaatatcaccattgccgcggagggcaccccgctgaccgggacggcagatgacggaaccacggtgacggttcgtgacgccaacggcaatgtcatcgggaccggggtcgcgacgggaggcaccttctccattgccctctccccggcccagttggatgccgcgacgctgacgctcaccgccacggaccccgcaggcaatgccagcccgtcaaccacctttgacgtgccggactctccgctcgatctgcctacggtgccggtgattacggcgatcaacgatgacgccgatcccgtcattggtgatgtgaaagataaaaccaccaatgacaccacgcctacccttaccggcaccgccgatccgggcagcgtgatcgccatttatcaggatggatcgctgcttccggtgaccactgtcgttgcggataccaacggcaactggagctacacgccgctgttgccgctgacggaagggccacacacctttgccgtgaccgccacgaataccaccaccggcgagaccagcggacagtcgccgatcgcgaccgtgaccgtcgaccttaccgccccgacagcgccagccatcggtgcggtgactgatgacgtaggtccgatcaccggcccaatcgccgacgggcagagtaccaatgacaaccgtcctaccctgaccgggacaggcacggccggggacactattacggtgtacgatgacggcgacccgctgggcaccgttgttgtcggtccgaccggcacctggagctacacgccgcctgcgctggacgacggcagccacaccctgaccgtgaccgccaccgacccggcgggcaatgagagcaccccgtcggccgggatcaccattgtggtcgacaccgtctccaccacgccggtgattaccagcgtgacggataacgcaggcaatgcggcaacgcctgtcccaagcggcgatccaaccaacgacaccacgccaaccctgaccggtaccgccgagccgaatagcgtcgtcgccatttttgatggcgccacgcagattggtacggtgtcggcagacggtaccggcgcctggacatttaccccagaaaccgccctcggcgaagggacgcatgactttacggtcagagcgacggatccgcagggcaacgtcagccagccgtccggcgtctggagcatcaatatcgatctgacggcgccacaggtgccgacgatcgatacggtcagcgacaacgctccgggtggcgtaaccggcccgcttaccgccgggcaggtcaccaatgacaccacgccaaccctgagcggcaccggccaggcgggtaccaccattcacgttctgaataacggcgtggagattggtaccactacggtcgacggcaacggtaactggtcctttacgccggatccggttctgactgacgggacgtataacctgcgcgtcaacgccagcgatgatgtcggaaacgtctccgccaactcgccagtattcgcctttacggtggataccaccggccctgcggccccggtggtcaccacggtgatagacgatgtcagcccgggaacgggaatcatcgccagcaacggttccaccaacgacacccgtccaaccttcaacggtacgggggaagtgggcgcaacggtgcacgttattgtcgatgatgtggaaatcggcacggcggtcgtcaacgccctgggtaactggaccttcacgccgaccaccgcgctgggtgaagggccgcataccattaccttcaacgccaccgatgccgcaggcaataccggggtcacctcgccaccgttcaacctgacggtggatacgtcggtgcccgacgcaccagtctttacccctgccaccgacaatgccggtcccgtgctgggcccggtcgcctcgggacaaagcacagacgacaccacgccaacgctgaacggcaccgcggcagccaacgcgaccatcaccatctatgagaatggtcagcaggtgggcaccgccgtggctgatgccaacggcgtatggagcttcaccaccggcacgctggcaaacggcagccacacctggaccgccacggcaaccgatgccgcgggcaacgtcagtcctgcctcaccaggctttacgctggttgtggatacgactgcgcctgccgcgccggttatcacccaggcgattgacgatgttggcaccatcaccggggcgattggctccggccagaccacgaacgatcctctcccgcgtctggtggggaccagcgagccgctggccaccgtgaatatctacgagggcacgacgctggtgggcaccggtactgccgatgctaacggcaactggaccgtggatatcaccgtgccgctgggcaccgggtcacacacctttaccgcagaagcaacggatcaggcggggaacaccggcgcgccgtccgccgatttcagcctgaccattgacaccacgccgccagcgctaccggtactgaccagcatcaccgacgacgtcggtaatgctgcgacgcctgtcgccaacggcgggttaaccaacgatgcacgaccaacgctcaccggtacggcagaagctggcgcgacggtaaccatctatgacaatggggtacagattggcaccgcggtcgccaccggcggcgcgtggagctttacgccgtccaccccgctggctgacgggccgcataatctgaccttctccgccaccgacgccgtgggcaacgccagcgcgcagaccgggggttacaccatcaatgtggatgccaccgcccctgtcgcaccggcaatcacctcgattgtggatgatgtgggaaccgtcaccggccctgtcaccggcaccaacccaaccaacgacacccgtccgaccttaaacggtacggcggaagccaatgccaccgtacgtatttacgacggcacaacgctggtgggaaccgtcactgccgatgccaacggcaactggacgctgccgcaaaccagcaccacgctgaccgaaggcgcgcataacttcaccgccaccgccaccgatgccgcgggcaataccagcgcgccatcgccgattatcacgatcaacgttgacctgacgccgccaccagccccaaccgggctggcggtgatcaccaacgggacgcaggttaccggtacggcggaagcaggaagtaccgtcaccattaccagcagcaccggaaccgtgcttggtaccgccgtcgcggacggcagcggaaacttcagcgccaccctcacccctccacagaccggcggggagtcactgattgtctttgctaccgataaggccggtaacgcgggtatcaccacctccgtgattgctccgatcaccacgatcccgaacgcgccggttatcgctaacatcgacgataacgtcggcacggtgacgggcaacctgaccaacgggaaaaccaccgatgacaccacgccaaccctgagcggcacggcgcagccaaacgcgactatcaccctctataacaacggggtgctgatgggcacggtcaccgcaaatgccagcggcaactggagcttcaccacgccggtgctgagcgaagggccgcatgccttcaccgccacggcgagcaacggctcgggcaccagcccgatttccacctcgaccaccgtcattgtcgatctcactgcgccaacggccccgaccgggaccttcaacgcagacggcagtgtactgaccggtagcgccgaagcgggcagtaccgtcaccatccgtctggcggataactcaacggtcaccgccacggcagacagcaacggctcctggagctacaccttcctcaataaacagacggaaggccagacgctgcaaatcaccgccaccgacgcggcaggcaacgtctcgctgcccggctcagcccttgcgccggtggtgccgctctcagccagcaccaacgttgaagagctggcgctgacaaccaccgcaacggtgaccaactcgcagtacagcgactatggtttcctgctggtgggcgccgtaggtaacgtgctgacgctgctcggcaacgacaccgcacaggtaggtttcaccgtcggcagcggcggcagtgcggatattgccgtgaacgccaacgccacgggggccgtactctccctgctcaatacccttgagctggtggtacagcgctttgacgccgccaacaacacctggaccaccgtggtcgacaccggacagccgcagttcgctgacctgctgaccctcggcgcgacgggggtgtcgctgaacctgaccggcctggcggatggtcagtatcgcgtcctgagctacaacactaacctgctggcaaccggctcttacaccagcctcgatgtggcggtgaaagagaccagcgcaggcaccgtgtccggcgagaccagcgttgtcgggaacgtcatcaccgacgtggacccaaccgcaggcagcgacaacgccccggcgggcaccaccgtcaccgcggtcaccaacgcccagggcaccaccaccagcgtcacggctgacggcacggtgattcaggggcagtacggcacgctgaccatcaacctggacggcagctatacctataacctgaccaacaccagcgccgccgtcattgggcgcacggagaactttacctacaccatcacccacaacggcaccagcgcctcggcaaatctggttctgtcgctgggcgaaggcaccagcagcagcggtatcgtggcagtggacgataccgcctcgctgaccttcgataccaccgtggaggcgattaacaacggcacctcttcgcagggcggctttaccctggtggggatcaaccttggcaatacgctggggctgaacctgctggacgatctggccaacccgatcatctactccgtagaagaaggcaccacccgcaccatgaccgttcaggcgtccgtgggcggcgtggcgctggcctcggtgttcgacctctacatctataagttcaacaatgcgacgcagaccttcgagcagatgcgcgttgaacccggctggctgcgcgcgccgctgctgggcggcacctcctcgcagctgacgctgaatctgcccgccggcgagtacctgttcctgctcaatacggcggcggggatcaccgcgctgacggcctacacgctgaacgtcttgcaggatcatgtctacagcgtggcaagcgtgagcgagagcaccaccggggatgtgctggcggatgatattgcgccagcgggtaccgtggtctccgacgttaacggcgtggcggtgaacagcagcggcctgacggagatcaccggcgagtacggtacgctgcggatcaacgcggccggggagtacacctacaccctggacagcggggtcggcgcggaccatatcagcacgccggataccttcgtctacaccatcaccgcgcctgacggctcgaaagacacggcatcgctgaacatcaccccaaccgcgcgcccaatggatgcggtaaacgatgtcagcaccgcgatggacgtcacgtcggttcaccatacgtcaacctatacggatacctccgtcggcaccgccagctggactaccgccctgttggggtcaacgcagggcagcggaagcggaaccttcgtggtggatgcaaacaccgcgctgcataacgcctcgctgcactttaacgtggcctcgctgctgtcgctgggcgggctgacggtgaactggtcaatcactgacgggacgaatgtgattcgcagcggctccttcagcggaggctcactgctgggcggcagcatcgacgttccgctgaccgggctggatctcaacgccgggacctatacgctgaactttaccggcagcgtaccggggctgagcgtggggaacatcaccattaccccaagcgtaaacggcacgacctactccctgtcgcagtacgacgcgacgggcacccacaccgttgacggtaatatcttcgacggcaccggctccgcaggggcgatggaccagctacactcggttgatacccgcgtgagcatcaccggcttcgacggcatgaccaccacgctcgatccgtacaccggcagcacgatgtccaacatcacgggccactacgggacgctggcgattgccgctgacggcagttacacctataccctcaacccggggatctcgctctctaccattaccagcaaggaggtctttaactacaccctgaccgatgccagcggcaccacggataccgcgtcgctgaccattgacatggcgccgaaatttgtcagttcggagcataacgatgtgattagcggcacggcctacggcgacacgctgatttatcaggtgttgaacaatacggcgggtaacgctaccgcaggtaacagcacgggcgaccactggacgaacttctccctcacgcagggagacaagatcgacattggcgatctgctggtgggctggaacggtagtgcgtcgacgctggggaactatgtgtctgtttcacaaagcggtaacaatactgtgatctccatcgaccgtgacggcacgggagccgcctacactaaatctgcgctcgttacgctggacaacgttcagaccacctacgacgagcttgtaaaccagcaacacatcattacctga

SEQ ID NO: 121165 - DNA, 1323 bp, Enterobacter cloacae
gtgtcctggaaattaaaaaccggtaaatctaccgaagagcgccagcaagccaaccagcaaataagagaaacggttgaacaaatacttgcggatattgaaaaacgcggaaataaagccattcgcgaattatccattaaattcgatcgttatgaccgtcaggattatcgtctgacgtccgcggagattgaccactgcataaaacagttaagccgccaggatattcaggatattgaattcgcccaacagcaggtagcgaattttgcccgcgcgcagaaagaatgcctgcgggacctggaaattgaaacgcgtcccggggtgatcctcgggcataaaaatattccgattaacgccgtaggatgttacgtgcctggcggaaaatatcccctgctcgcctccgcgcacatgtcgatcatcaccgccagcgtggcggggtgttcaagaatcatcagctgtgccccgccgtttaacggtcagcccgccccggcgattgtcgcggcgcaaaaaatggctggcgcaacggaaatctatgcccttggcggcattcaggcgataggcgccatggcgctgggcacggactcgctggcaccggtcgatatgctggtcggccccggtaacgccttcgtcgcggaggccaaacgccagctgttcggccgggtaggtatcgacctgtttgccggtccgacggaaacgctggtgattgccgatgacaccgttgacgcggaaatgtgcgccacggatctgctgggccaggccgaacacggcgtcaccacccctgccatcctgctgacgaactcgcttcagcttgccaaagagacgctcagcgaagtggaacggctgctggaaaagctccctaccgccgacattgcccgccagtcgtggcaggactacggggaaatcatcgtctgcgacagccacgaagagatgctgctggaggcagatcgtatcgcttccgaacatgttcaggtgatgaccgaccgggacgactggttcctggctaacctgaccaattacggcgcgctgttccttggaccgcgtactaacgtggcctacggcgataaggtgatcggcaccaaccacaccctgcccacgcagaaagccgcacgttataccggcggcctgtgggtgggcaagttcatgaaaacctgcaccttccagaaagtcctcagcgacgaagccaccgctgaaatcggcagctattgttcccgtctgtcgctgctggaagggttcgccggacatgccgagcaggccaatattcgcgtgcgccgttatggccagacggaagttccctacgccacaccggccccggtcagggaaaaggtgtaa

SEQ ID NO: 121166 - DNA, 420 bp, Enterobacter cloacae
gtgataagagccgccttgcttgttctgctgcttgcgccaccggcgtttgctgcggacggttcatggagcagccatagttttggcggcacgctgtcgcgcggcaagcaggtactgaaaagtcgtccagttcagcccgccgcgccccttccgaaaggggttacgccgacgcatctgctgtggaagattacaccggacggccccacgccgccgggctttcgcattcgcgtctgtaacaacctgcgctgtctgatgctcagggaactggcgggcgaaatcccgttgccagcgggtttcccggccgcgggcccctttcgctttgagtatcagtcggtagcgcgcggcgaaatgacgccgccgctgacaatactgaaaaatgaaatcacaataaggtatcgcggcaaggggccatcggcgccttaa

SEQ ID NO: 121167 - DNA, 2094 bp, Enterobacter cloacae
atggctaatatcgccaccaaattacgtttgcccggcttcaaggagacccagtggcaggtactggccggtccagtcctgatcatgacgatccttgcgatgatgatcctgccgctgccaaccttcgtgttggacttgctgtttacctttaatattgtactggcgatcatgatccttctggtcgccatgtttacccagaatacgctggagttttccgccttcccgacggtactgctcttctcaacgctgcttcgcctggcgctaaacgtcgcctcaacgcgcgttatcctgatgcacggccataacggcgctgacgccgcgggccaggttatcgaggcgttcggccacttcctggtaggcggcaactttgccatcggcattgtcgtctttatcatattgataattataaactttatggtcatcaccaagggggccgggcgtattgcagaagtgggtgcccgctttacccttgacggtatgcccggtaaacaaatggcaatcgatgccgacctgaacgccggtctgatcggcgaggaggaggccaaacgccgtcgaaaagaggtgactcaggaggcagatttttacggctccatggacggtgcgagcaaatttgtgcgtggcgatgccatcgcaggcctgctgatcatggcaataaacattatcggtggcctgattatcggcgtaatgcagcatgatatgaccctcagcgcagcgggagaagcctacacgctgttgaccatcggtgacggcctggttgcgcagatccctggtcttgtgatctccaccgcggcaggtgtcgttgtaacgcgtgtggtcaacgagcaggacgtaggcgagcagatggtcggccagctgtttacctcgcctcgcgtgcttgccctctctgcggccgtaattggtttgctggggctaatcccaggcatgcccaatctggtctttttactctttacctcctcacttttaggcattgcatggtggctgcggggccaggaaggtaaggcgaaaaaaacgggcgccgccccctccgcccctacccgagctgaagctgacgtggcgcaggttaatgaagcgacatggtctgacgtacagatggaagatgtactggggctggaggttggctatcgactgatccctatggtcgatcatgaacagcagggccagctgttaacccgcgtacggggtattcgtaagaagttcgcgcagcagatgggctttctgccgccagcagttcatattcgcgataatctcgacctgccgccgactcactatcgtattctgctaaaaggggtgacgattggtaaaggcgaggtccagcccgatcgctggatggcgatcgatccaggctgtgcagagggagaagtgcccggtacgccctgtaaagaaccaacctttggacttcccgctctatggatcgatgaagtccatcgcgagctggcgcagacgctgggctataccgtagtcgatccatgttccgtcgtcgctacgcacctgaaccaccttatcagcacccacacggacgaacttttcggtcgccaggaggcgcagcagctgcttgaccagctcaccaaacagtcgccgaagctgatagaggatttgatccccggggtaatcagcctgaccacgctgcacaaagtactgcaaaatctgctctccgagcgcgtgccgatccgcgatatgcggaccatcatcgacacgctggctgagtatgccactcctcagtctgacgctgacgagctgacggcccgcgtgcgcgctcgcctctcccgggcgattacgcagcagtggttccctggcgacgacgatatccaaataatcggccttgatatgtcacttgagcagttgctggtacaggcaacccagagcggaagcgctatcgagccgggaattgccgagaatttaatgaaacagaccgagcaggcgttgcagcatcaggaagcgctgggtgcgccgccggttctgctggtgaacccggcgctgcgtttgatgctgtcccgctatcttcgtcgcatcttccctcagcttgcagtgctctccagccaggagataaacactcagcgcaacgtgagaatgacgtatctcattggaggtaaatcgtga

SEQ ID NO: 121168 - DNA, 702 bp, Enterobacter cloacae
gtgaaacggatacgggtgctgacagttgatgattctgcgctcatgcgcaacatcctgagcgcagtgatcaatcaacagccagatatggagatggtcggcaccgcgccagacccgctgatcgcacgcgagatgattaagcagttgaaccccgacgtgctgacgctggatatcgacatgccgaaaatggatgggctggagtttctctcccgtttgatgcgccttcgtccaatgccggtggtgatgatctcctcgatgaccacccgaggctcgaaggcgacaatggccgcgctggaacacggcgccgtcgattttctggccaaacccgatcagcgtatcgccggaaatctggaactgtggggtgtgcaggtcgcagagaagatccgcattgccgcgaaggcaaaactgggacgtcaggctgaagtggcctcgccgatactgcggggcattaccgtggatccacaaagcattgtggcgattggctcctcgaccggcgggacggaggcgctgcgccaggtattaacgccgctgccagccagcgtccccggtatcgtcatcgcccagcatatgcctgctggatttacccgctccttcgcccagcgtcttgattcactttgccagataaaggtgcatgaagcggatgacggcgaaccggtacttccgggtacggcattgatcgcccccgcgcatccgcgagatggctga

SEQ ID NO: 121169 - DNA, 315 bp, Enterobacter cloacae
gtgtgtgaaaaggctgaacgcgccagagcgccgctgaaggtaaagccagaactgctggccgctattcactatcagcggctcaacttgctggacaacagctggccgctgcccggaccgtttgacgccatcttttgccgcaacgtgatgatctatttcgatgcgccgacgcagaagcgtctgcttgagcgctttgcccgcatgctgaagccagacggcctgctgtttgttggtcactctgaacattttaatcatccgcacattccactcaggcttcgcggccagtcggtgtatgaacttacggaggccttacggtga

SEQ ID NO: 121170 - DNA, 312 bp, Enterobacter cloacae
atgttcgaagccgtaatgaaacggcttggcctggcggatagcgagttcgctcagcgtctccagcagatcgaaatcgaccgccggttgctggaagtggaaaaactccgcaaagagctggccggtgatggtgatgatgacgaaccgaccccagtgcagattaatatcaacgtagtggacgcgagggcggaagccgcaccatgtgaatccatcattttcaacatccgtacgccggttctctccctgagacttaacgattctggcaatgggagaagcctgtttaatggttccgtcagaggttactgtcgtatttga

SEQ ID NO: 121171 - DNA, 483 bp, Enterobacter cloacae
atgacgttgaagacgacatcgacggtcctgacgacgacggcgtgggtgaagttcgtgttcatcgggtcaatactgcgcccggcgcagcgcatggagagcatgaagccccccgcgctccgcagcaccagtatcaaccaccgtatgcctctgcccagccgcgccagccagcgccgccgccagtggaagaacctgttcgtcatccgccgcagcagcctgtgcaacagcagcccgttgcgccacagcctgtacagccacagcctgtacagccgcaacctgtacagccgcaacctgtacagccgcaacctgtgcaacagcctgcacagccagtgcatcagccacagcctgttcagcagccgcagccggtacaacaaccgcagccgcagcctgaaccgcctgcgccacagcccgctccgcgtgttgagccagagccggtcgcagagccagaaccggttgttgaaaagccgcagcgtaaagaagcggtga

SEQ ID NO: 121172 - DNA, 312 bp, Enterobacter cloacae
atgaacaagaaaactaagcgtactttcacccccgagttcaggatggaatgtgcacagctgattgttgataagggctactcctatcgacaagccagtgaagcgatgaatgtcggttctaccacgcttgagagctgggtacgccagctcaggcgtgagcgccaggggattacgccctctgccacacctattactccagaccagcaacgtatccgcgagctggaaaagcaggttcgtcgcctggaggaacagaatacgatattaaaaaaggctaccgcgctcttgatgtccgactcactgaacggttcacgatag

SEQ ID NO: 121173 - DNA, 927 bp, Enterobacter cloacae; identical to SEQ ID NO: 83362

SEQ ID NO: 121174 - DNA, 213 bp, Enterobacter cloacae; identical to SEQ ID NO: 100199

SEQ ID NO: 121175 - DNA, 588 bp, Enterobacter cloacae; identical to SEQ ID NO: 83361

SEQ ID NO: 121176 - DNA, 210 bp, Enterobacter cloacae
atgccggatgagatcgaccgcgatcaggaatttaatgaacagcgactggaggagatgattgagcagaaccgttttaagccgggttcaacaccatcattatttcactgtcgtatatgtggtaaacctattcctgaaaaacgacggcagactctgccgggcataaccacctgtacagaatgtcaggaacaacttgagcatcgcagacgctaa

SEQ ID NO: 121177 - DNA, 222 bp, Enterobacter cloacae
atgagaaaacccaattatcacgtctttatcactcaggaaagtcagcccgatgcacagggcgagaaaaacacgtactggaccagggttggtgtggccttcgcacataacggtaagcctggcctgaatatcgtgctgatccccggtattgcggtttcaggcaggctggtactgcttgaaccgagagaagagagtgacatttcacaggatgccgcagccgtttaa

SEQ ID NO: 121178 - DNA, 645 bp, Enterobacter cloacae
atgctttccaccacagcctttctggcgctggcgacgcagtgcgccaccagtgttcacccgtccacggcacttgatgtggcacgggtcgaatccggttttcacccttacgccattgctgaaatcgtgccgggcggcaaaggtgtgatttcacattttcccgcaagccatgatgaggcgatgagcctcaccggacggctggcggcgcaaggccgacgctattcggtcggcctgatgcaaatcaccagcaccaatttccgccattacggcgtcacggccagcgacttacttaacccttgcatcaatctgtcggtatttgagcgcattctcgccgactgttaccggcgcggtagcactctgaaacgagcgctcagttgttactactccggcaactttgaaaccggtcagcgaccggaatccgcctttaaccagaccagctacgtacagcgcattggctatgtcgtcccgtccacccgggaagaccggcagcgagcccctgacccgagcacacaaccgtctgcccgttatcccgccgttgtgctgcgcggcgagcctgccggtgccactgcgccgatcctgacttccctgcattatcccgattccgtcattcgcggcgctatccctgttatccctgatgaggagaaatga

SEQ ID NO: 121179 - DNA, 273 bp, Enterobacter cloacae
atgcgtaaacgccgttactccgctgttgtttccgtgctgctgtctgccccggtgctggcggcgaacagtggttttaacaaggccaatgaaacactgagcaatacctcgaccggcctgctgggactggccgccgtcaccatcacactggcgactatgtgggtgggctacaaggtgctgttcgacggcaagagcctgcatgacatgcgtaacatcatcatcggcgcgatcctgatcgtcggcgcgtccggcttcggtgcctactgggcgtcataa

SEQ ID NO: 121180 - DNA, 2748 bp, Enterobacter cloacae
atggctacgctgaataaagcactcacgcggcctgccgccattatgggtattcctctggtgccgttcgttctcgtcagcggggccatcgtcctgctggcagtctatgtcagctattacctggcgattatgctcattcctgcatgggcggaaatgaaaaataaaacccgaaaggacattcattatttcagtctgctctggctggcgtttaaaacccgtgggcggcttttcaccaatacccattttggcgcgaatgccctgctggcaaaccagtacgataacgttgatgtctcggagtttattcagaaaatgaaattaaacgagcgtattacgctggataaatatattccgtactcctcccatattcacccttacgtcatcagaaaccgtcaccgtgatttggttgccacctgggagctggacggcacagtctttgaatgtgaagacgaacatcacctgaccctgatggccacgcacctgaataacgttattcgttcgtatgagggtctgccggtaacattctatattcaccggctccgtgaaaaataccatgatgtttttgaagcctgttcgggtattcccttttccgatgaggtaacacgtcggtattaccagccggtaaaagacaaaccgttatggcggcaccggctgtttttcaccgtctgctacgcgccgttctctcagattgagaagaaaaccatgaaagcgcagtcgcacagtaaacgccaggcagcactggatgacgcgctcaaaatcatgctggaataccgcgaagcactggaatcttcattatcccgctatatggcaacgccgctggggatatatgaagaaaacgggcgggtgtattcctcacaactggcgttcttccatcgtctgcttaccggtcagtggcagaaggtggccgtaacgcgctcaccattttatgaaacgctcagtacgccagacgtctttttcaccaccgacaccggtgaatgccagacggtcagcggttcccgtttcttccgcagcctggagattaaggattattccccggaaacccataccggtatgctggatgcgctgctgtacgccgaaagcgagtatgttctgacgcagtcctttacctgcatggcacgggatgaggcgcagaatcatatccgtctggcggaaaaacggcttaactccacggacgacgacgcgacttcccagcgcgaagagctgattgtcctgcgcgacctgctccagtccggacatgtgtcgtgcggtaaattccacttttccctgctgatctcctcagacagtgccggacaggtggtgaaggacactaacgttctggcccagcccttcgccgatcttggtattatgacaacgctctccaccctgtcactgcccgccgcgtatctggcgcaactgccgggcgtgtatacgctgcgaccccgactggtggccgtcagcagccagaattttgccgatatagcctgcctgcataacttccatccccacaaacgcagcggtaatccgtggggggaagccatcgccatcctcacatctcccggcggtggcgggtattacctgaacctgcacgacagccaggccgggcgggatgacaccggtgagaaaacgccggggaatacggcgattatcgggaaaaccggatccggcaaaaccctgctgatgaccattatgcaacaactgatgcagaagtaccgtaacccggcgtcgtttgcgccttctgccaccatcaaacggctgaccacggtgtatttcgataaggaccgggcggcggagatggcgatccgccaggcgggcgggcgttatttccgcatccataccggcgagcccaccggcttcaacccgtttgcgctggagccaacccgccggaacatcagtttcatcaaacggctggtgcgcatgctgtgccgccgcaacggtaagccgctcgatccgcgcgatgaggagcggatcagtgccgccgtggacaccatcatgctggactatccgccggagtaccgccggtacgggatcacccggctgctggaagtgctgccggagccgccgaccacagacgcccgcaccaacgggctgcgtattcgcctgaaacagtgggcgcagaggggcgagttcggctgggtgtttgataacgaggccgatactttcaccatcagcgatgtcgataactttggtatcgacggcaccgaatttctggatgatgacgatattcgcggccccgtgaccttttaccttctgtaccgtgtgaccagtcttctggatggtcgccgcctggtgatgtttatggatgagttctggcgctggctggccgatgtcgaattttcccgcttctccctcaatatgctgaaagtcatccgaaagctgaacggtatcttcgttccggcaacacagtcaccggatgaaatcgtcagacaccccatcgccccggcgattattgagcagtgcggtacccagattttcctcgccaacccgaaagccagccatgcggattacgtggagaaaatgaaagtgccggaaagtgtttatgacacggtcaggaacctggatccgggcgagcattatatggtcatcctgaaaacaccgctgcgggccggggaaacccgcccgtttgtggcgatggcgaaaatggatctgtccgggatgggtaaattcacccggcttctcagcggcagtgaggacaacctgaaaatattcgatgccatttatcaggatggtatgcgacctgatgaatggaaagatactttttttgaccgggcaatctga

SEQ ID NO: 121181 - DNA, 729 bp, Enterobacter cloacae
atgcgttccaggaatcaccgtctggcattattgttatttttctcggcgcaggcgttcagcgccggaataccggttttcgacgccgtgcagaataccgaatccattaaccagtggatgcagaaactacagcaatgggagggtacggttacccattataaaagcgaacttaatgcgtataagaaacaactggctaccgcaaccggcgtgcgggatattcagggttttctcagtgatgcccgaagcctgaaaaccgatattgataatctccgtaagaacggtatttcactggatgatctgctgaccacgcagaacagttcatattcttatgaactgcaacacctttacagtaaatacaaatcgttcagcgtatgcagcgaggaacaggaaggaataaaatatcaggccctggccgacagttgcaaacagataatcctcaatcaagcaatggcgattgagaataccactgacgttgaaaacaggattaacagcacactcagcgatatatcagacttatctgaccgtatatcgaatgcgcaggactcgaaagagtctcaggatctggctaacgccatcgcggcgaaaagcgtacagttaaatgcgctgacgaatcagtgggagatgtctgtcaggcaggctgaacagcgaacgacattgctggaacagcaaagacagaaagcctttgaacagcagcagctaacggcacctgttgctgaccttaataatttataa

SEQ ID NO: 121182 - DNA, 273 bp, Enterobacter cloacae
gtgctcagatccttattcaccttatgcacactctcaggcgtgatattactgtccggctgcaaggaaaccaaatccgaagcctggtataagcaacatcctgacgaaacttatgcggtttatacgcaatgcctgaaggatggcgaggcaagcgataactgcgaatttgcccaccgggcagcacttatgtttgcacaggaaggccagcccggggttaaggaaaaattcgaggcgatatttcagcaggaagctgcaaaacgaaatgcagtgacatag

SEQ ID NO: 121183 - DNA, 1032 bp, Enterobacter cloacae
atgtccggtggtatttttgttggtatggacaaaaacatcatggatggactgaatgctgtactggaaggtcagtcttccacttacggcacgatgatcagcgtcatcattgtcagctcttttaccttatttatactgtatcgcggttatcagacactggctggcaaactccggaccccggttgaagatgtcgtctgggatgtggggcgaatgttgctgatcaccacctttgtgttaaaccgggatggctggcttgatatggcggtagcggctatccagggactcaaagacggtgtcagcggcgatgataatatctgggcgctgctcgatactgtctggggaaaggcacaggcgctggggcaaaagttatttaatatggacacatcaacttacgtcaaactgaatggcggccttgccgaagtgctggtatggggcggctctattgtcctgctgatggcagccacctttgtcaacctgctcgccgaaatcaccatcctgttaatgaccaccaccgcgccgctctttattttctgcctgctgtacggttttcttaaaccgatgtttgataactggctgaaaacgatttttgcggcaatattaacgatcatgttttccgccttatccatccgtatcgccattaattacctgaataagatactggatgctgcaacaaaaacatccgctgaaaccaatatggtcacgctggcggcgcagtgcctgctggccgggatagcggcaggtgtgatggtctggttctccgcgaagctcgccagcgcactcagcggggccgccgtacaggcggtgctgcagggggcagccatgagtggcctgagcggactggcgaacaaatccgccgacctcgccggagcgggggtaaagggcggtgcccgcctgactgcgaaaggcggcatggccgtcgcagcggcgaccggcagactcaccggcgcaggcgcgggtaaaaccgtgagcgcctggcagaaacgcgccgcagccatcgaaagcatgaaacgcctgaaccggcagcgtcaccgttaa

SEQ ID NO: 121184 - DNA, 141 bp, Enterobacter cloacae
atgaaattcagcatcatccttctgatgctgtgcgcgctcacgggctgcgcacggcatcagggcgacctcccaccggtatccggcgaacccgagccagtgaattcccccgccatcattcaggagctgactcaccatgtctga

SEQ ID NO: 121185 - DNA, 684 bp, Enterobacter cloacae
atgtctgatattcagaacattgttaatgtttcccgctcttttgaatccatactgctggaaaaggaagaacgttcccgaaaaaccgcctggcgggtggccgctgccggactggttctggccgcaatggcgattgcggccattattattctgctgccgctgaaaacctccgacactgaattatggtcagtggataaacagaccgggcgctatgaatatatgacccgcgtgaaggagcgggatattgctgctgaaaaagcgctggcacattcactggcagcacactatgtcagacttcgcgagggatataattatttctccctccagcgtgattatgacgacgtgcagttatttaacagcgacagcgtgaaccgggactatctggacgggtttaacggcgaccaggcaccggacgtgatttttaataaggcggaatatgtcgtttatatcgccattatttccaatgtgcatgcgcctgccaccgggccggataatctggcaacactgcgtattaagcgcacaatccgtcgtgttgctgataattccgtgaaaacggatgtgtggaatatccgcctcacttaccgctacgtcccgcaccggcaactgaccgacagccagcgcgaagtgaacccgctgggctttatcgtcaccagctaccagcgcgataaagagctggggggggaatga

SEQ ID NO: 121186 - DNA, 891 bp, Enterobacter cloacae
atgatgctgaaacatcccctgctcctctctggcttaatggtgtcatgcctggcatggggcgcagcgacaccgcgcggcagcgcgtatgacagccggatgcagaacgtcacgtacaacagccagaacgccacggtcgtcagtacccgccccggctacgtcaccatgctggtgtttgatgacggtgaaaccgttatcgatgcgcaggcgggtttccccaaaggctggaccgtgacgaaaagcgacaaccgggtgggcgtcagcccgaacccgattacccagccggtcacggacgccagcggcaacaacgtcagccaggtgtttctgccgacggcaaaagactggaaaaccaatctgttcgtggtgacctcgaagcgcgattacagcctggaactgaacgtgctggataaagactcgcccgcccaggcctttgttatccgctaccgctatcccgacgaactgcgaaaaaagtctgccgccgccagcgccgcccgtcagcaacatcagcaggaagcactggaccggcagcggatagcggcggcattcgggcaggccaccacgccgcgcaactggcgctatacaaaacgggtggcagctggctcagcctccatcgccccggactttacctgggatgacggtcgttttgcgtatatcggtttttctcctgcgaaaaccctgccatccgttttccgggtggtgaacggcctggagcaggcggtcacgccccgaaccattaaacagggcaactacaccgtgatggcggttccggcatcgccgcaactggttctgcgttacggcacctcggtggtggggatcgaaaacgacggatccgggcgtatcccgctgaccaacagtgacaccgtttcgccgtccgttacgctggaggcaaaatga

SEQ ID NO: 121187 - DNA, 1305 bp, Enterobacter cloacae
atgaccgacaaatctttcccggacgaaccggaaaaaaccaccgcagaacgggaagcggaagcccgtgaacgcgcccacgcggcaatggcatatcaggagccggagcagaaaacgccgcccggtcagccggaagtgacccgtttccgtaaagcttcaggtcgccgcatgctgatcgtcagcctgctgagtctggtcctggtcatcgcgctggcatccggtggcgatcgtcttctcagcgccctgaaaacgggtgatgagaaagaatctggcaccgcgccgccctcctccggtacggtgcagcatgagcgtaagaatctgggtctggacagtaacccgtttggcctgttcgggcctgggaggcaggaaagcacagaccctgccagtcagagcgccccggccactccagctctgccgcccgggccgcccgccctgaacaaggcggcagcactggcagacgggctgaacagcgacagtacagggtcaggcgacgatacacgcacgtcccgaagcggatcgcgcaacaacgcgggaacgtcgggcagcccgtcagcctccacggcgtacacatcctgtcagtctgtactggtcagtggcgaagatggacgtctgcgctgcccggatacgacagcaccggcaggcagcaataacaacgacaatccgggcgttgccagtgtcactggtgtcaggcggctgggcctcgatcccgatctctatatcccggtggatcgttatattccgtgttcgatgatgcggcgcttcgtatccgatgttggcggtcatatctcctgcctgattggggaggatgtctggagcgccagcaaccatgtgaagctgatcccggccggaacagtcgcccgtggcgtctaccgcaccggcgcactgcaacacgggcgcagccggatgtttgtgctgtggacggagctgcgcacgccggagcccggcagcctgcaaatcccgctcaccgatacgcaggccaccggcccgctcggcgaggcagggatcgcgggctggatcgacagccatttctgggcgcgtttcggcaacgccctgatgctcagtaccgtgcaggacgtggcggcagcggcatcagatgccgcgccgggtaaagaccgcaataccgactataccgaaaacacccgcgccgccacggcggaaatggcgaaaacgacgctggaaaacagcatcaatatcccgcccacgatgtacctgaaccagggcgatgtgatcggcatcatgaccggtacggatattgatttttcctctgtttatcaactacggctgaaaaagaaatggtatgaacgctga

SEQ ID NO: 121188 - DNA, 1020 bp, Enterobacter cloacae
atgaacgctgaaaacctgtcactggattttatgaaaaaccggctgtttggcgactttcttgctcaggatggcctgacagaaattgctgttaaccggccgggtgagctgcatacaaaaattcggggaaaatggcaaaaacaggcatcccccatcacgttgcgtcagtgccatgcttttgccagagcgctggcgtcctggcatgacgataatattgacgatacatcacccatcctttctgcaacattaggatctggcgaacgtattcaggcgattattcctccggcctgtgaacgtaatacggtgtccattacgctgcgcaaaccctcgtttgagcagaaaacacatcagtcatggattgatgcgggattttatcagcgcgtggccggtcaggaaaaaacggaaagtcaggataatgcactaatccggttatatcacagcggggatattccccactttatggaaaaggcggtggaatacggcaaaacgatttttattgtgggtgaaaccggctccggcaaaaccacctatatgaaaacgctgctgcattatattccgctgcatctccgtctggtaacgattgaggataatcccgaaatccgtttttatcaccacagcaattatgttcatcttttttacccggcggatgccggggataatgctattgtcacgcccggcaggctgatccgtgctaattatcgtatgaaccctgaccggatattactggcggaaattcgtgggcgggaagcgtgggacgcgctgaaaattgtcggctccgggcatgaggggttaatcacctccctgcatgcgggctgtccggcagaatgtattgaagggatcattgaccgctgctatgaaaaccccgactgccggaacattccttttgatgtgttgttacgcaaggtacttaaaagcattgatgtcatcgtcagcattgatatacacggcgatgtgcgccggatgagtgatatttactttaagccagttcatttaaacagcacgaaagagacattcagaaaataa

SEQ ID NO: 121189 - DNA, 1860 bp, Enterobacter cloacae
gtgattttgaataagctggccgtttcactgtcgccgatagtgaatgggatgctggcggtgctggcttttgtgcaacagcatcagctgatgctggcgctgttatcggggctgacgatgccgtttttcgcctcgttgaaaagcgatgaacggcaaaaagccccgctgtggcaaaagatgattattgctttttcaatgctgtgttttctctccggcacactggccccgatagttatcggatccttccagtggctgtataagaccagactcaccagtgataatacggtactagcctggtcagcacggattgctttcactgtgaccgggattatttttcatattatacttcgccgggtattcacgccggaactggataaaataaagaaacgccttgttaaaaaaaccacccttgaacgggaattgcgcaccgatgtccgcaccgtaaagtccctgctgccggaaacactgcattatgatccgctggattatatcgacctgaataaaggcatttttactggcatggacagggagaacgaaccaatgtatctcccgttaaatgactggcagaaacagcacgcggatattatcggcaccaccggagccggtaaaggggtagctgccgggatattgctatatcaaagtattattgccggtgaaggagtgtttgttatggaccccaaagacgatgaatgggcaccacacctttaccggaaagcctgcgaggatgcaggaaaaccctttgccttaattgacctgcgaaaacagcactaccagttaaatctgattgaagatatcacgcccgatgaactggaagaattgttcgtagcaggtttcagcctggcggaaaaagggcaggaatcggatttttatcgcattgatgaccgaaaagccgcgcgtatcgccgcacaatttgtcagtgataatccatcggcaacaatccgtgatgtctataacggtgattacgttcagggagttgccgaaaaaatcaaagcatttttcggcaagattgaggaactggcaatactcaatgccattaactcaccagaaggcttttcgcttaagcacatatttgatgagggcggctgctgttatgttgtcggctccatgcgaaacagcaaaattattaccgcccagcgcatgctgctggttcgcctttaccaactggcagaaaagcgcgatcgagtaacagacgtaccccgccccattgctatttatctttccgagctgaaataccatttatccagaccagcgctggaaggtttaggtgcggcgcgggataaaggcgtacacattattatggaccaccagtccatcgccgatttaaacgactgcccggcagatttgaaaggtgacgccgttgtcggtgcggttgttgaaaatgcaaaattcaagctggtataccgggttatggacccggatacagcggaatgggtggcgagaatgtcaggcacgattctggtggatgatgaactccgtaaagcgaaaacggataatatgctgacggaaacgatcgacagtgagcgcacaatccgccaggccgaacgtttctttattgacagcaatatgatcctgaacctgcccgattttgtcagctttatctttacgacaaaaacgctaccttctgcttcactgatttcaccgataaaggtcagaaagcgtcagctaaaaatcttctcggtttcccctgatattgccgcatcggcggcaccggtgaaaatcgcactggattttgacgaggatgataaaccatccatacaggatgtaatgacaacgtacccggatcttttcttcaacggaagcgaagtcaaaccggcagagccccaacctgatgagggagaacacctgtccccgctggatttttaa

SEQ ID NO: 121190 - DNA, 747 bp, Enterobacter cloacae
atgctgatttcgacatatcacgagcgccagacacgcaacagagaaaaaataaaacaactgctgaacttcctgaaagaagaaacctacagcgatttcaaaacgctgatgctgctatttggtttccgggatcataaatcgctttattcgctgctggcaaaaactgagaaaatggggttaatccagaagcatgtgcttgaatcacggacaatgaagatttcattatgggggatcaccagcgacgggctggcggtggtgttaaccccggatgataaaatctttcccgcgaggtttgaaccgttcagaattaccggctggacgctggagcatcatcttgataatcaggccgccagacttattctggagaaaaaaggtgcttcgggatggattaacggcgaccggaccacttttatcagccagtatcaggtgaaacatcgcccggacgggttactgaccctgcctgacggtaacgttattgccattgaaaccgagcgccgcctgaaaacccgagctcgttatcagtcgatcatggcaagccacctgctggcccgtacccgcaagcagtggatttacgttttttatgttgtacccgatccacagaagaagcgtgcacttgaactgctgtttgacagcatcaggcatgtcatcatcaaccatcagcacgtcccgctggaagaacgccaccgccgggtgtttcgcatttatacccttgatgaactgaaacgcctgtcattagacagctatacgtaa

SEQ ID NO: 121191 - DNA, 948 bp, Enterobacter cloacae
atgacaatttccctgcattacccccggacaagcgcccctaacaccgcagcggcgaccagcgtatccccgctggacccgtcaggctcctcaaaaacgaaattttctaaaaccagaaaggatatttatcagaccgttaccgacaacatcattgcagcgctggaagccggtgttaaaccctggtcctgcccgtggcagcgtgtatccggcatgtctggattgccatctaattacgccaccggcgtggcctacagtggcatgaatatcatgttgctgtggagcagtgcatcaaaacaggggttcagcgattcacgctggttgacctataaacaggcccagtcggtaggtggacaggttcgcacgcgtgaacgtggcactacagccattttctacaccacgctggagaaggaaaacgacgccggagaaatcgaccatatcccgatgctgaaaactttcaccgtgtttaacgttcagcaaatcgacggcttgcctctgacaaaggtaactgtcagtccggaagcgacatttgccccgttgccgcaggctgaaaatctgttcaggaagagcggcgcaaacatcattgagaaaggacaaaacgcctttttcagcccatcaactgatgaagtctggttaccggagcgccatctattcgctgatgcggctaacttctatgctaccggcctgcatgagcttgtccactggagtgggggtaaaaaacgcctgaaccgtgaaatgaaagggaagtttggcagtgcggattatgcagaggaagaactggtggcggagctgggaagtgcttttctgatggcggacctggggattgagggagaggtacaacatgaaagctacattgcttcctggctgaaagctctgaaaaacgacaggcgctatattttcaaagcggccagcgccgcctctaaagcgcatcgttatctgatggataaactctga

SEQ ID NO: 121192 - DNA, 1041 bp, Enterobacter cloacae; identical to SEQ ID NO: 100197

SEQ ID NO: 121193 - DNA, 1812 bp, Enterobacter cloacae; identical to SEQ ID NO: 100196

SEQ ID NO: 121194 - DNA, 1935 bp, Enterobacter cloacae; identical to SEQ ID NO: 100195

SEQ ID NO: 121195 - DNA, 876 bp, Enterobacter cloacae; identical to SEQ ID NO: 100194

SEQ ID NO: 121196 - DNA, 1368 bp, Enterobacter cloacae; identical to SEQ ID NO: 100193

SEQ ID NO: 121197 - DNA, 753 bp, Enterobacter cloacae; identical to SEQ ID NO: 100192

SEQ ID NO: 121198 - DNA, 666 bp, Enterobacter cloacae
atgacaaagtggaaacgtctgtttaatgcgctcgcaggtgcgcagaaccagtatcaggtcggcaaccatcttattatgttcattaaccgtgcgatgaacccggttaattacgcccgtgatccatcggtgtttgcctggcgacgtgatgaactcaatgttgtcctggctttttccggtttttatatccgtgaggatggtaaggtcgcgagcgctgctaaagtaacgactctggattctgctcgagcccgcgccgggcgacttaaggctgcactcgaaagccgtgctgtgcatgcggaagttttgaactattgccgtgccgaacttctggacgaaaactattttcatgccgtcttcgaggcgacgaagggggttgcggaacgtattcgtcagttgtccgggttgagcggtgatggtgctgacttggtgaacaaggcatttaccggacaacaacctgttctgactttgggatcgctcaccaccgactcagaaaagagcgaacagaaaggttttgcgaatctactgattggtctattcggtgctgtgcgcaatccactagcccatgcgcctaagaagaattggcccatgtctgaactggatgcgctggacatccttacgttggtttcgcttattcatcgcaagctggatggcacgcagaaacaactatag

SEQ ID NO: 121199 - DNA, 483 bp, Enterobacter cloacae; identical to SEQ ID NO: 100190

SEQ ID NO: 121200 - DNA, 939 bp, Enterobacter cloacae; identical to SEQ ID NO: 100189

SEQ ID NO: 121201 - DNA, 1362 bp, Enterobacter cloacae; identical to SEQ ID NO: 83360

SEQ ID NO: 121202 - DNA, 1554 bp, Enterobacter cloacae
atgaagataaagttaatcgctgcgggtattctgacgacgctaccattttgggcctgcgctaaggatgtcaccatcctttataccaatgatctccatgctcatgtagaaccttataaagtgccatggattgctgacggcaaacgggatattggtggctgggcgaatatcactactctggtaaaagaggaaaaatcaaaaagtaaagcgacatggttttttgatgcaggtgactatttcactggcccttatattagtagcttaacgaagggaaaagcaattattgatattatgaataccatgtcgtttgatgttgtaacgataggtaatcatgaatttgatcatggctgggataatacattattacagctaagccaggcgaaattccctgtcgtacagggcaacatattctatgagaacagcagcaaattattctgggataaaccttataccatcgtcgaaaaagatggcgtgaaaattggcgtcattggtttgcacggcgtgtttgccttcaatgataccgtctccgcggcaacgcgcgtaggcattgaagcgcgggatgaaattaagtggttacagcgctatctggatgaactgaaaggcaaagtcgacctgaccgtattgctggtccatgaaggtacaccggcgcgtcagtccagtatgggagggaccgacgtacgacgtgcactggataaagatattcaaactgcaagccaggtgaaaggtctggatattctgattacgggacatgcgcatgtcggtacgccggaaccgattaaagttggcaatacgctgatcctctcgaccgacagcggcggcattgatgtggggaaactggtactggactacacgaagccgcatcagtttacgatgaaaaattttgagcttaaaaccatttacgccgatgagtggaagcccgatccgcaaacgaaacaggttatagacggctggaataagaaactggataaagtagttcaacaaacggtggcgcagtcgccggttgagttgacgcgcgcgtatggtgaatcagccccgctgggtaatctggctgcggacgctctactggtggctgcgggtaaaaatactcagctagccttgaccaactcgggcggcattcgcaatgagatcccgtcgggcgcaattacgatgggtgacgtcatcagtacgttccccttccctaacgagctggccacaatggatcttacgggtaaacaattacgcacgttgatggaacatgccgcaagtttaagtaatggcgtcttgcaggtttcaaaaggcctggaggtgaagtatgacagcagtaaaccaatcggtcagcgggtcgtcgtatttaaccttaatggcaagccgattgaggatgcgacagtctaccacattgccactcagagcttccttgctgacggcggcgatggttttaccacctttaccgagggtaaagcgcgtaatacaacaggcggttactacgtttctaatgccgtgatcgattacttcaaagcgggcaacactattacggatgagcagctcaacggcatgcgcgttgctgatgtgaaaaagtaa

SEQ ID NO: 121203 - DNA, 1014 bp, Enterobacter cloacae
atgactattttgataaccggtggcgctggctacattggctcacataccgctttgagcctattagaacatgatcgtgacattgtaattgttgataacttggtaaactcgtcgaaaattgctattcaacgtgttgaacaactttcagggaaaagtgtcaagttttatgaaggggatgtatgcaatatagatttcttgaatatgttgttttcaaagtatagttttgaatcagtgatacattttgcatctttgaaatcagtttcggaatcagtgtcaaatcctttagagtattatagcaacaacattgttagtatgctttctttaattaaggccatgatgaattatggcgtaaataatcttatatttagttcttctgcaactgtttatggggtacctgaatctattcctcttacagaatcgtgccaaacaggtggtacgacaaatccctatgggtcatcaaaattttttattgaacaaatattaaaagatgtctcacgtgcaaattctaagttaaatattatgttgctgcgctatttcaatcccgttggagcacattcttctgggtttttaggagaggctccaaatggaatacctaataatttattcccttatataacacaagtggctgtaggcaaactggctaaagtgcatatatatggcgataattatgatacaccagatggcacaggcgtaagggattatattcatgttatggaccttgctgaaggtcacttggcagcactaaatgcacaaaaagattatcccggcttaagagtatataatttaggcacaggtaaaggctattctgtcaaagagatcgttaccgcattcaaaaaaattacgggtgttgatattccatatcagattaccgaacgtcgtttaggggatatagcagaatgttggtctgatccttctctagcttctcatgaattaagatggaatgctaaacggggattaaatgaaatgatcacagatgcctggagatggcaacaaaaaaatcctgctggctacgaatga

SEQ ID NO: 121204 - DNA, 1233 bp, Enterobacter cloacae
atgaaatacttacacataattaaaaaatactccttcttttcgatagcccccttaattacggctttaattcagcttttttcggtttttataattgggcatacgctgtcaggtcctgaattgggtttggcaggtatttttaataccctgatttttattcttgttttcatatccgatggtggaagttctaattactttatttacaggaaaattgttagctttccagaggttaggataattactgtattaaatgtttctgtctcattcttatctatcttattatatttcgtactgtcacctaattttattgaaagtagtattgtcacattgatttctttttttgtgatggctttatcgattagttttccgttatatcattattcgcgattgttagttgagaaaaagtttaataccatagctatggttgaagtcttttcaaaatttgtatttattgctagtttgtcagcgctaatctaccgatttcaaatccagggagtcgctgttgtatatgcatggacagcttcatatgtaataaggtgtttgatttttatagttgtatgtaggggattttctttgtatcaagaaaattcaatcaaatacggaattaaaaatatcattcgtagatggtgggcatatattcataatcaaatattttcccaatttttgaattatatcactctcactgcggatatattcattgtttcacacttcggaggattggagcgcgtgggcgtctacagtctctgcaaggatgccactttaaaaattagtgccgtcataagtccagttatcggtaaattattgataagtcatgtcgtcacttcagacattaaagtgatccatttaaatgcgaagagaatatttttaagcattctctttgttgctatgactatttttcttgcatggagtgtagtaggtccttatcttcttcaagagttacgaccagatatacattccgattttgagatctttatttatgcttgggctatctgtggtgtattgagaatgcttataaatccagtagcaacaatatttcaagggttgggtgaaacgcgaaaagaactttatataaacttggtttcatcgttaagttttataatgatattttcgttgttatatgtaagtggtgttataactggtgtgattaacattatcctcattactctcatcgggatgtatgttatatcactaatatactcaggatggcttttgcaaaaacgctttcaaaaaatttga

SEQ ID NO: 121205 - DNA, 1164 bp, Enterobacter cloacae
ttgaatatcttgactattccctcctggtatccaaatccgaagctgaagactcaaggccttttttttcgtgaccaggcgctagcattatctaaaaaacataatgtcgatgtaatctattgccatagaggtactgctttttacaacaaaaaatataatgataatgggttaaatacttatttctgggggtatagattacgagcaggtaaatatattgggatgcttatacgtattcttgtgtttattgccatgtacattaaatatcaaaaaaataaaaaggttgatgttatacattgtcatagtgttgcatttaatcaggatggaagcgctggcatcgccggggttataattggtaaaattttttcaaaacccgtcataataacggagcatgcaacagtcttccaggcaaaaaattatagttacattgaaaagaaaataatgaaatgggctttggaaaatgcctcatcgttagtggcagtaagtgatggtttgaaagaaagcttactcgagttcactaacagagaagatatatatacaatacctaatacattagatgtcaaattatttgatattgaaaaggttaaaaaatcaacatcatctaatggtgtgattaatatttgctctgttggctatttaatgcaaaaaaaaggttttgatagactaatattggctttcgataagattaaagaaaactacaatatcgcattccaacttaagataatcggtgatgggcctgatttagatacactaaaggaaatgatcgaacaaaagggcttaaaatctaatattgaaatgctaggtgagcaaagtaaagacgaaattgcatatcatatgggacaaagtgatgttttcattctacttagtcgagtagagacctttggcgtcgttttcattgaagcgttggcttcaggactattttgtatagctaccaaatccggcggccctgaattcattattaaaaatgatatgcttggtgaacttcttgaaaatatagacgatgcaaactatttttcagaaaaaatagcgaacgtattattatccgaaaaatttaagtctgatgtaagtttacgaaagaaatttgtcaatgataattattcatatgacagttttcttacttccttcgataatttaatcttatcaaaatatgaaatacttacacataattaa

SEQ ID NO: 121206 - DNA, 582 bp, Enterobacter cloacae
atgaaaaaaatactaaagtgcatatttaaaataaccttgtatattattaatttaccctttctgctttggtatcttacgcgagttaaaattccttatgctaactttaaaaacgtagccatttctttatccaagcatacaggtgaaaggggcattttattgaggcaagtcttttacaagaaaacccttaaaaaatgcggaaataatttgcgtgtgcattatggtgctttctttgtatacccgaatataacagttgggcaaaactgtacagtagaagaattttcaataataagtttatgtgatctcggtgacgatgtgatcattgctgcacgtgtctccatcatgagtggtggaaatcatcatgaagttgatgatttaaacttaaagttcgttgattctttattacctctcaagcacctttctattggttcgaacgtatggataggtactcatgctgtcatcatgaatgacgtggctgaaggttgtgttattggtgctggagctgtattaacacgtaaatttgagaggaatatgattatagcgggtatccccgcagcaattattagaaaaaggggcgagctttga

SEQ ID NO: 121207 - DNA, 1236 bp, Enterobacter cloacae
atgttaaataaatttgacgatgtgagaccaaaaggttttatattactgaattcagcgttctttattttttgtttacgtccgcctgggatgtcagccattatttttataataactgcaatagctttactaagtcttttttccaataagttaattctgagatatgaaacgcaattcaggttgctttatattttgatattcgtaatgatgatccgatgcataatcggctttgcttttaatggtggatatgaagaaagatatctccctgtattacttttatttagctgtgtgttaattatacacattgtgactgctcgacaagctgatctgaacgaatgttattccggtttttattacgcaataattttgactcttgctttagttttgcttgagattataactggatatcatttaccttcctcaagatattcagatcctacaaatgatgcacaattatggagtatatcaaagccaacggcattttattataatgaaaatgatatgcttagctttcttgtgtgctttttaccttttgctgtttatcattccaaaaagaatttacataaaataataatttttttattgacattaactagcgcagtttacataggttctaaagcagcaatcttggcgttgcttatttatttattatttacaaagttagtttcaaagaaagtgattttattgcttggcgctttctcgtcactcatgttgttattgctaaacccttccatcgttgaagacttactccttttatcaaataatgctgcttcgagattagttaatttttggaatacactttcaactgctggtgcggatgatgaaagcacctcagagagactgcaaatttacaaggcaaacattgattggttgatgaatcatgcgaatgccttgttgtttggcaatggccgctttggagactatgaaattgatataattaatcagtatggtttaagaatgggcgaattccataatattcattttgaaatgataacaatttatggaataatcttttacatgctgtttttttcttattatacatttttgctttggcggtgcattaagctgagacatatcaaacctgctgttagacctctaattacctcagctgttttatatcctattttaatttcatttgggcctagtagttctttgaaatatccgtttctttttattattgtactattgatggctatcgggataaggacttatgaaaaaaatactaaagtgcatatttaa

SEQ ID NO: 121208 - DNA, 885 bp, Enterobacter cloacae
atgattaatacaactgtaattataccttataaaaataatttggatgcgcttcatcgtgcattgaaaagtgtattatcccaaacagttgaagtatctattttaatcgttgatgacgggtcagaacaaagtcagaaagcagatttggtagtgcgggaattaaatcatcgaaatattaatgttatttataatgatacaagcttaggaggaggcgaagcgaggaatattggaattcgtaatgctaatacaaaattcatagcattcttagattgtgatgattattgggatcataataaaatagaatcgcaagaaaaaatgttttctgaattaccagcaaataggacaaatgttatttttagttcgatccgagtggtagatgaaaaactaaatatcattaaagaatattgcaatggttcggcggtgaaaaatttctccgaatatgtttttcttcaaggtggactcatacaaacctcatctttatttcttgaaacttcactggccatcaggaatcaatttaatcctaatttgaaacgtcaccaagattatgatttttgtctgaaactagaaagtcagggagcaatgtttgaatgttgtgataagacgtatagttactgggttgttcccagcgatcctcttatagctttaaaaaaaggttatgattacaaccttagtttggatttttataatagttataaaggattgatgactacaagagcagggtatgcttttttagcaaaggtccctctatggttttccattaaacaaaagaacatgaaaggtttcgtttctagtttattgaaaaaatgtggttttaaaactagttgtatggtttttcttgaattggcaagattagttttaacaaaatggatgaggcgcgatgttaaataa

SEQ ID NO: 121209 - DNA, 789 bp, Enterobacter cloacae
atgagagacttgatagttttaatgccagtttataatgatcaaaaggatatgatcagaactttagacagtataaacgaagataataatgatttctcagtgctcattatcgatgatggcagtaaaaccccgttaactttaaataataaacaatataaatttacagttaaaatacatcgtctgactgtaaacaaaggcatcacaggtgcgttaaatgctggactggatttaatctcagagatggataatattcgttatattgctcgattagatgcaggtgatattcaagttaagaatcgttttaagacacaacgactgtattttaataagaatcaaaagactaagttactaggttcaaatgtatctttttatgatgttaatggtgcggctgtattcgatacaaaccttccattaacagacgctgcaattaaaaaagaaaaatttattcgttcatgttttatccaccccactgttatgttttctaaagagataattgaagaaggtttaagatattcagaaaattatccatgcgctgaagattatgaacttttccttagaatcacaaataaatatgaagtggctaatttaagtgacaaactacttttttgccatgatagagcgaatggcataagtataaccaggagaaaaaaacaaatatcaagtgttctaaaatgccttcttacacatagggactacaaaagcccgtattggtatgtgggtatcggaaaagtgttagcgcaatattttgtaccaaggtccgtttttagctatatcaaggctcgattatcatga

SEQ ID NO: 121210 - DNA, 1098 bp, Enterobacter cloacae
atgaaagttctttttttaataacgcggggagacgaaataggaggagcacaaacccacgttagagatgttatgctagggttacgagataagtataatattgaatgcatcttagctactggttctgtaggaaaattcacagatgaaatgcaacaaaatggtataaaaatctttcatataaaatcaatgaaaagagagatatgccttaatgatttcaacgcctttttagaattaagaaaactcgtcaaaaaaataaaacccgatataattagttgccattcatctaaagctggtgttcttggtaggctagctactattggcttgagtattaagaaagtatttacggcacatggatgggcgttcacggaagggattccagagcgaaaagcaaaattttataaaaatatagagcttattttatcctacctaacagatgcgatcatcaatgtttcgcaatatgatcggcaattggcgctaagtaataatattaaatctaaacattatgttatccataattgtatacctgataatatccaaataaaacgtgaagtgttccgggataaaaatgaaataccgattcgttttgtaatggttgcaagattttgtgaacaaaaagatcacgaaacactgataaaagctttttctaatatctcaccaaacaagtggcatttgagtctattaggtggtggagatagtacagaaattgaaaaattggtttcgaaattaaatcttgactctaatattgatttcatcggtgaggtgtcaaatgttcaggactatcttaataaagccaatgtattcatgttaataagtaattatgaaggattcccaatatctattattgaggcaatgaaaacaggccttcctgtgatagccagtgatgttggcggcgtttgtgaggccgttattgatgagcaaaatggatatcttatcccgcggaaggatattgctgctttgcaaaccagacttaagaatctcattgaaaatccagacctgctgattaaatttggtcaagaatctcgtgaaatgtatgagcgtaattttactttgaataatatggtcgactcatatcatcaagtttttgccgaggtgaataaatga

SEQ ID NO: 121211 - DNA, 996 bp, Enterobacter cloacae
atgaacgataaagttttgtttattggcgcgtctggtttcgtcggaactcgtttaatcgagatttcaaagcatgattttgaagttactaacttcgacaaacaacagagtcatttttatccggatattactgtttccggtgatgttcgtaatcaggatcaactcgatcaggcgcttgctggatttgaaactgtcgtgctgctcgccgctgagcaccgtgatgacgttagcccgacatcgctatactatgatgtaaacgtacagggtacacgtaacgtgttgtctgctatggaaaaaaataacgttaagaacattatttttactagttctgtggcagtgtatggtcttaacaaaatgaaccctgacgaatcccatccccatgatcctttcaaccattacggcaaaagcaaatggcaagcggaagaggttctgcgtgagtggtttaacaaagcaccagaggaaagatccctgacaattgtccggcctacggtcatcttcggtgagcgtaaccgtggaaacgtgtataacctgcttaagcaaattgcaggtggtaaattcgccatggtaggcgctggaaccaactataagtcaatggcttatgtcggtaacattgttgaatttatcaaatttaagctgaccaatgttaagccgggttatgatgtctacaactatgtagacaaaccagacctgaacatgaatcagctagtttcagaagttgagaagagtctcaataaaaaaatcccttcagttcatcttccttacccgcttggtatgttaggtgggtattgctttgatattcttagcaaagttaccaggaaaaaatatgcaattagttctgtgcgcgtgaagaaattctgtgcaactacacagtttgacgcgaccaaggtacacagctctggatttaaagcgccttataccttatctcaaggtctggaccgtacgctgaagtatgagttcgttcatgagaagaaagatgacatcacgtttgtatctgaataa

SEQ ID NO: 121212 - DNA, 159 bp, Enterobacter cloacae
atgtcaaaagccacgaataaggcagccactaagcgcaacaaccgtaagattcacgctcgtaaattccttgctacgccagaaggtaaagcttggcttgctaagaagcaggaagagcgagaggaaatcaagctggcgcgaacggctaacaacatgttttaa

SEQ ID NO: 121213 - DNA, 243 bp, Enterobacter cloacae
atgaccaataagcagttacgtatccactatgggtttcatggaaaacataaagagaaaattattgaatgggacggatgtgatcaaatcaataccgtgttgtcagcgcttgttgaagatttgaatataccgacagctactcagacagttaacctccttgagcatggcattgatgatgtgttcttctttgatgaagtaagcaaaaagtgggaagagatccctacaaaatggttggcaagggcataa

SEQ ID NO: 121214 - DNA, 372 bp, Enterobacter cloacae
ttgctgcgcgtgataatgttaattgtttctatcttggcattacctgaaacattaggttgctcttttattgtgttcttgtttgtgaataactggttaagtaaacaggaggcgattgccatcgcgcgtattattgccgtcgagatgcgttcatctggttatatagatagtttcgaacttcgtgtgagcagatttggggcgaagaagttttttagtatgtttggggagttttacctcaaccaatttgatcccgacacacgagagagaaagtatcagggggatgtatctctgcaaggtgtgggtaatgtgtactgtgagttcacttatgatcactacaagtttaccaagtgcaccctcactgctggtgtgttctga

SEQ ID NO: 121215 - DNA, 561 bp, Enterobacter cloacae
atggcgaccacgaagataatcacccaggcagaggcttttaagctgattaactggcttgaaagtcataacaaacagctattcgcagacgtagcggtaacaatggcctctttatgcttacgtgtcggggatacggtgaatttaaagttcacccagttcaaggaaggaaatacgctggaagtgctggagagtaagacttgcaagaagaaagaaatcatcgtccctgcgaaggtgtgggagattgtagaacgtcgccgccaggcattcccgaaagacgaatatgtttttacgtcacacagcaatcgtgcatcaggaaaagcccctgtcagccgtgaacaggtgaaccgtgagatcaaacaggctgcggagaatgtggggatcaaaggaacagtaggatgccattcttttcgcaagttttctgccacacaggtgtgggagaagtctaacgggaatttggctttagcaatgaaagcgctgaaccactcagatcccaaagtcaccatgaactatttgaaaattgacgttaagagcgtgggcgctgcccttgcaaacatttgggagtga

SEQ ID NO: 121216 - DNA, 177 bp, Enterobacter cloacae
atgaagtatttcagcagtgaccaggtgttttatgaactggtgagtggtaaagccacaagagatttaatctacgcatctatgtacgtagccagaaaacgaaagtatttcgaacgtgaacagatgtttaaagaagcactatcccgttttgatgaatttaagaaggattccaaagaatga

SEQ ID NO: 121217 - DNA, 159 bp, Enterobacter cloacae
atgaagattaacttcacccctgaaacttacgaggctttgatcaatcgggctaatcgtgaaaataaagccgccgccgcactggtgagcgaattaataacaacaatccttaacaaagaggaaacaaatgaaccaaagaagaaaagtaataacctacgttga

SEQ ID NO: 121218 - DNA, 1449 bp, Enterobacter cloacae
atgaaccaaagaagaaaagtaataacctacgttgatgcaatttgcggatctggaaagtccaccacgttacagcactacatcaaatcaagtttattaacaaactccgaagcaattccccctcgttatcttctcgtgatgccaacacatgaattatgtggacaggtgagggaagaactaaaagacagacgggtgaagagtttccatgtggacaccgaaacagaagcggtaagacacctaatttccaccttggaatacgatttccagcattcggttattatctgtacacatcaatgtttcattcattactgctatcgtgcagcgcttgaaacggaacttcaaaaccttctccgtaatttcagtatctttgttgatgaaatccctgatgcaatgtttggcgcttacatcaaagtgcagcataccaaacggacggaacaaaatttcccattcctggattggctggaagagcgggacggattgttattcctgagtgaggataagcgtgaagatttctacgactattggcacgaaacagaggcgaatggtgctgagttaaagcgcctgctctgggcgattatgcagggtgctggacttctctacgaagagaataaacacctgtttgccttcactgagtctccaattatcagatctgtagaatgggctgaacaactcacacttttaggtgctggctcttctcgaagtttgtttacctgggctgctgaacatctggcgaaatacgaagttgaggaagctggtgaagatttacagccgccacttgaaagacgtaaacataagcgtgtaccgatctccctggtcgccgtatgtgaaaacagatgcactttgacagcattacagaaagtgtttcacgaacatctccaggaaatcatccagcgcgtgcctggtgaatttatcttcgctaccaacagagataaatccctgtgtcagtttactacgataggggatgaaattcttaccgatgcttcccgtggtatccgtgtttcaatggcttcctatggcctgaaccattaccagcacatacacaatgcagcgtttcttggttgcagtaatcttgataaagatttccaaggtaaatggcggcagtatgcggagcttaacggctggaatgttgaagaatttgaacagaagcaacgctccgcgatgaattatgaacggtgctaccagtttattagtcgtacatctatccgtaatgctgacactgatcaccctctggtgttcgtagtacctgatctggcaactgctgaatacatcaaagagcattatttccctggagcaaagattgaatgtctgaaatttgggaaagtgagaaagaaagttaaaggtaacaacacccgtaaagaagtacaggaacacaaatccaaaggattgacccaaagacaaacggctgaactaatgaagaaagggatcgccacaatacaacgccactggaactaa

SEQ ID NO: 121219 - DNA, 285 bp, Enterobacter cloacae
ttgatacaatacataaaattgaacaacacaaaccagatacagatcaacgatagcgggaagggcgtttaccatgccctggtttggttctggagaggacgtaggacacgcatttcctacggagaactatctgataaatccggtgtaagtgatcacgggatcaggttctggcttcgtgcgctgcgcaacattggtgtgattgagatagatgatgaaagtagctatttatcattcacgctgaaacacatcgaacgagacaatgtagaatttatctactctaatttctaa

SEQ ID NO: 121220 - DNA, 237 bp, Enterobacter cloacae
atgtctcctgacgagatgggcgcattacaggatattctcaatagctgccctggtgcattctggaaacccaggaagatgaaaatctttaatgtggattcttcaaatcttcacaaatggcaaattcttaatttctcctcatacgaacattattgcggctggctttcggttaatcaccttaacaatttaacccgcgactttgacaccctatttgataccaaggaacattatgactcttaa

SEQ ID NO: 121221 - DNA, 357 bp, Enterobacter cloacae
atgactcttaacactatggacaccgtgaacatcgtgaacacccttattaactctttccacgatatctggcatctaccagcattgcagcttgttaataaggcgtggcgtgagagaacgccctccgcgcttctggaagcgatacaatacactgaacaggcaattaccgcccttgaacactggagcgctgctgtagagcacctggtgcagatgaacggggataccgtcaccgtggatcaggcgtggcgcattgccaatgaccttgaagagcttgcttgctccctgcaatacatcaccgccgaacttgcggaactggcaggagccattgccgagaaatacgcagtaagcgaatttgaataa

SEQ ID NO: 121222 - DNA, 216 bp, Enterobacter cloacae
atgttcttattaaacaatcgcgaccgaatcctaaaatacaaatccgaagtgattcaagttaaccctgaaataacagctaaagtggctgaaatggcaggatgcactatagaagaaattgaactcgctgtagagcgttatttcccttctgaggacactcctcaacttagtatgcaggaacggatcgcaatcaaatccaaggaaatcaaacaacaatga

SEQ ID NO: 121223 - DNA, 360 bp, Enterobacter cloacae
atgattgtagacctaaccgaacttttcccaattcgtaagagtttcacggacgtagtgagctacgccactgattcttttgcagtcgtagaaggtcgtgttttcgacctgccagcggatattcaatgcgccgatgtcatcggggctgatggcgctttatacacctccggcgataatgcctttgtggtggtaagtgatttcgtgagtgctggcgacggtaaaaccgtgaatgtcctacgtgcgcctaatgttggcagcttcgtagcgctcaaagccgacaacctgaatgcagctaaccacgccgcagctattaccacgctcgaatccaaaggattcgtatgccgtccattcttcacctcttaa

SEQ ID NO: 121224 - DNA, 1041 bp, Enterobacter cloacae
atgactaaaatcgcaattgggcgtgagatggtcgatttagcgccaatcttccaggccctgccggaacgtaactaccttatgaatgccctcgacctcttcgacgaagtaggtgttcagaatccgaaagtggtggtgacacagcttctggatgataactacagcctgtttaacaccccgcagagccgttattcatcaaaccacgacactaccgcgcgtcagaatggtaaagaatatttggtggagattccttggtttgcaagggaagacaccttcaaaccagtagacgtacaagggaaaagggtacaaggcactgattacgaacaaaccgttacagacctgtacaccgaatacactgggaaacataaaattgcttaccttcgtacccgagaatcgtacctggcccgctgcctcttcaaaggtgaagtgtacacccctgcaactgatgacctgctgatctcttatgctgaattgtttggcgttgtgccaatgacagccagcgtgagtgcagcgacagcggcacaggattttgatgccatcttagacaaagttcaggctgccgcaggtggattggctggtcagattgaacgagtgatcgtattcgctaaacctgctgcattcagccagattcgcttctctgacagtatgtctaaagcgttccagtatgtagcgccatatgacgaccgtaacctgttctaccagcgtcacgagcttctccctggtgtttcaacctttagcctacctggtagcccagtagattttgtgaaggtcacagacacgctgatccttgcacagatgccagatgatgctgacatggtggcggttccggtgttcagcaagggcagtggcagtacaaacccttatcagaacatctacggcgctgcctctggcaactttgcgctgattgatgctgcacctgctgaatactactcctggggctacctgagcgagcgcggcgatgcttaccacgttatgcacgaaaacagcgcactgcctgtaaaccatgcgttaggtatgcaggtgaaaatcaccatcactgcttaa

SEQ ID NO: 121225 - DNA, 201 bp, Enterobacter cloacae
gtggaactcatactcaaatccaatcgtggcctacacgtccgactgagtgcagacgatgcagaagggctgctcaaggtgagccagctttgcgagctattagagatatcgtatacgggcgttagagcgcgtattttccgtggtgaaaccgtcgaagcggcaattcatcacttcttggatcagaaaggcggtggtgatgcttga

SEQ ID NO: 121226 - DNA, 1863 bp, Enterobacter cloacae
atgcttgatatcaacgtagcttccatcaagacgaccgtttcctttgtggtcgataaacaaagtctggcggaagcccgtaaagctggcgatgacctgaaaaaatactttgagaaaatagccgatccgaagattcgcttccaggctcaaaagcagcgcagacagaaagcccgtcaacaagctgacgatgcacgttttaatgataaacctcgtgatacgaaggaaatgaaagcccaacgtgcggcggagaagcagaaagtcagggatgaaaaggctaatctgaaagcgaagcagcagctacagaagcgccaggaagtagccgaacttagacttcgccatgcagggctgcaaatctctgggattaaaggtaaatacgagcttgatcctaagtctcaatatgaagcgttacgtatcatacgtcagcaaacagaggaatttgccaaaggcaatctgaccagtgcccgtatgaacgcatctattcgtgagcgtgtaactctgttacgcagagaagccgcacaacaagcgaaagtgacacaggcacagcgtacccagtatgccgcagcagccactaagctaaaggctcagaagggcgggaatgctcctatcgtcggtggtggggtattaggaagccttgcgttaacggctggctccctcggagtggggcagcgaattgttgacaaagggaatgataacctcgaactggtgagaatgagtgaacgtgtgaaaaccaacccaaacgccataaaaacgatggtagcctggggacagcaacacggtgttgattcagctaatacctcaaaagccgtcgataacatgaaagatgtgcgtgaacgcctcgccatgactgttaacgatgctcaaatgaagaatggcgaatggaagggtggggatggtggcattacgtcgataatgaacaaatttggatggagtaaggatcagatttccaagttccaagattcaccactcgattttgttcaagctacggtgaatgaagggcaacgccgtggtatgtcacaggctcagattggtacgttgatcgagagtttaggtgatgacctgatgcactacaccgatatgttcatgaataacggtgcagagtataacaagacgctgaaaactctcgttgaatcggggcagacgctgaacgacgagcaaatccgccaggtatccgcttacggcgatctgtccgtggcaatgggtaatctgatgaatggagtagacaatcagttgtttacaggctggatgaaaggctttgccgatgggggcgacgatctggtaaggaacaccaaagtgatcacagaatcagccggattgctcggagagggattaggcgaccttgctaaacaggtgacgggctttgttggagaaatctccagcgtagtgtccgatctgaatgctggcattcgtgagaagttcccagattggtttagcgaagctaacaagccagcggcccaggcggtaatagatggtgtaacaggtagtgctgatagtgcggcttcttgggtgcaggacaagacagggtttaatacccgtagtgtcggtcatgctgttaaagattggttaggaatagatgatcagcctacagggacagcggtagaacaatacagtctgaatggtgattctctgccagggggatcgcttcgtgattctgctatatcatccctaaccagcaccaatagtgcgccatcgtacaaccttgcacctgtattcaatctcaatcttgaggcgtctgttccgctcacaattgcgagtgattcaagtaggcttgcggattatgtggattttacggcgaaagcctcacaagcggcgtttactcagtcactaaccttgtcagccttgagcggtcaaagcagtacaggcgggtga

SEQ ID NO: 121227 - DNA, 672 bp, Enterobacter cloacae
atggatactacattcattgctgatcctatagtgagcattgacgagaggttgttaggcgttgagcttctcactcgcttcattgcctcagatggacgcccccttcaccctgaattcgtaatttcatcttgggatttagataggaagcggcttttcctatacgaacaatgtggaaacattgccactatgcaaacgtggttcgaacgaaagaatctattttgtacactgaacattgatcagaaaatggcttttttaatacgtcatgactacatacttagacaaactttcgaatcgatgccattcatcaaacttgaactttctgagcatttccctggtttggataagggattgaaaagtcccttattaaaatcgctgagccagggtgtaaatgggctatggctcgatgaccttggggcaggtaatgcaaatgtagttagtttgatagaaggttactttgaagtggtaaaaatagatcgtattttcttcaatgagcaggtgaaaaaaccaaccttcaaccagttaattgcatcaattaaaaaacactgcggcaaagttattatcgaagggattgagaatcgagaacatttgggaatactgcgtgaggtgggggtttggggattacaggggtatctttttaaatctgtcccttttaaaaacgtggatttattgctgtag

SEQ ID NO: 121228 - DNA, 1251 bp, Enterobacter cloacae
atgaaatacaagccggatcaatacatcatttccgatagttacggagtttattacgtcaggatctcaattcctgtatggctccgtaatgcatttggtggaagaaaaactctcgtccgtagtctgaaaacttccgatcttcgtgtggctcgtaggaagcgtgatgttatagccgatgaatttcaccacatcaggcaaattgcagagcctccaaaaccggacagcttgcaggacacgatcagctatttaaagagcgtggctaagtacgcgaaagctgccccgaaagcatcagcgccgattatctaccaatgcccttctctgattaagatgttagagatctaccttatgcataacgctgatcgcctgaaaatgggaacattaagcaagaccaggaaagccgtagaactattcctgaattacctgcgaaagaaggatgtggaacttaacgatatcaaccgtaccaccgttacaggctggcttgatcatctcagagagacaaaggcagtccagacagtggctaactatctatcagcaatggcaaacattttcgatcttgcctcttcccgataccaggacgccccaccgctggaaagtaacgtgttcagggggcataaactcaacacagcgcagagccgccagagttacgaggcattcacggaagaggatattacgaagctcattagcgcgtttaacaagttaggagaggacgagctaagggatgtgaccactatcgccgcttatagcgggatgcgcattaatgaaatagccagtttaaaatcagacaatatctgtgaagtagagggggtgctatgtttcgaggttacggagggtaagacacgcaatgcggcgcggttggttccacttcatagtgcgattagaacaatggttctggaacgctgccagaagccgcacaacggttttttattctaccgtgcaagtgtgaccaagagagaggacggcaagcgctcctcgtggcatgtaaaccgctttggacgacttaaacgcgacattctcccagggcaggaaaacaaggtgtttcactcgatcaggcatctcgttgctcaaactctggataggggcggggttggtcgagataagttaaaccccgtcccagaagatcgcatagcccttcttctgggacattcgagaggagaaacggagagtttcaaaacatacagcaagaatgccgcctcccctgttgagctacagcagtacatcgaattgctacgctattcaagaattgacaacccataa

SEQ ID NO: 121229 - DNA, 207 bp, Enterobacter cloacae
atgggcgagcaggctcgttcagtctggcgtttcacttctggcgctgaaggaaatgggggatgggagacactggaaatggttcaacgatatgcgcatttatctgccggacacctgacagagcacgcgagcaaaattgacgcgattattggtcttaatgccacaaatacggcacaggaggagaacgtggtttacttgaatgtaagataa

SEQ ID NO: 121230 - DNA, 330 bp, Enterobacter cloacae
atgcattgcggccacataggccagctcggaacgcaggaaacgcagaccaccagccatgtgatctttgccatagaagctgtgggtttcttcatccggccggaagagaatcagcaattgttcatcgggctcgtgctgaacatcaaaacccagctcagcggctgctgcctctatacgctggccagcatcaatatccgccggcaactctttcccgccgtcatgcttccatacccatgcggcggcctgcgcccacgtcatttcagtctggtgttcgccagcaccagcagaattttgtttagcctgcgatgcttcgacatccactttatcgcctga

SEQ ID NO: 121231 - DNA, 540 bp, Enterobacter cloacae
atgcgggacaatatttggtttacgtataaagcacgaattaatgcgcatcatcgtttggaatggcttgagaagcactcacagtttattcttgtatggtatgcgatattaagtgcaattctttctatcgtgacaatacgctttcctactgtgttaggaaataataccgatattttggctgctatattatcggtggcattactcggtatttcccttgtggtttctaatctagattttcgtggaagagcgatagctatgagaagaaattatcttgcaatgcaacgaatttattttgcatctactgatgataaaaatttaacatctgaacagcgaaatcaataccatgaattgcttgatgaagtagaaaatcatcttgatatagatgataaggccgcacgtgtatcccaggcagatctcgaaacaagaattcctactgctaaagaaataagggaagtaaagaactggaaaattaaaagattcatatttacttatgcattctatttacttccgatcttactcgtttggatggattatgactgctag

SEQ ID NO: 121232 - DNA, 1371 bp, Enterobacter cloacae
atgactgctagccggatatttaaaaaatcattttcggaaaaaaatcttcttagaatttacaaggagagaataaaggagtctggggccattggcatagaccgagtacgtccttcaaaactcgatgctacaataaaagatgaagttaagtttatttctgaaaaggtaatatccggtaactataagtttacagcttataaagaaaaacttatttctaaaggggctagttctaatcccagacagatctctattccgacagcgagagatagaattacacttagagctctatgcgaatgtctgacaggaatttatcctgattcaagattaagactgcctcataaagtgattgattcattgaaaattgcattagtcagcggtttgtattctgaatatgcaaagattgatctcagaaccttctacccttcaattgaacattcacttatcatcaatgttataaaaaataaaatcagaaaaaaggaaattagaaatctaataatgtcgtctttggttgtacctacagtaagtgaatttaaaggaagcaaaggtgtgtcacctaatgccaaaggtgttccacagggattggccgtatcaaatattcttgctgagatttctttatctaattttgatgaagaaattaatgagcttccaaatatttggtttatgcgttatgttgatgatattctaatccttacacaaaaaggtgaagccgaggtattggcgtctcacgtaattaaaagattgcaagcgctaaaattagatccgcatcctttggaggatgctaactcaaaatcaaaaattggcaatctagacgaatcatttgacttccttggctatcatatcaatcaaggagagttattaatcaagcacgaaagtattctccggttcgaatcttctttggcgaaaatttttacagcatataggcatgcattactgcaggctaagaataaacgtgaaaaagaaagagctatagcttactgtcagtggaagcttaaccttagaatcactggatgtgtatttgaaggtaagcgacttggatgggtctcatacttctcacaaatatccactacttctcaattacgcgccgttaatcataccgtaaataacttattacgtcgttttaatctttcatctgagatcaaaccaaaatcgttaataaaaacattttacgagcttcggcgaggaactgcagaaacgttcaaatatataccgaattttgataatctggatatatctcagaagagagagcttgtttcaatgtggataggtaaggacaaggaaagaaaactaagcgacagtgaggttgagaggaaattcaaatttaaaatagccaagtctgctaaagagctcgaggaagatatttcaggaatatcataa

SEQ ID NO: 121233 - DNA, 552 bp, Enterobacter cloacae
atgcgccgcccgatccctgcgcagcttgctgctcctgaaacactagaattttgtcaaaaaattgttcctgaagttcatcccttattgcttaacagtgaccctttgccggaagcggaagaaatggactgcttcgtcaatgtcgaacaggctatcgctaagaacggcggcaaggctgtttacggctgggctatatggcaagtaccaggtgtttatattgaagccgagtttcactgtgtttgggagaatgatgctggagaaatgctggatgtcacaccatacccttatcgtatggataacattctctttctccccgatagcacaaggacttacaagggccggcaggtagataatatccgtaaggctctggtcaatgatcctgatgtgattagatggttataccttgccagaaaacgttttgaaatcttaaatacaggtgacttggcgaatcagcatggacgtattgaactgcctccaaaattagccaaagagttcagcaaagtcatggaagaagctgaaaggctggattctcgactaaaacgtaggtatccctaa

SEQ ID NO: 121234 - DNA, 474 bp, Enterobacter cloacae
atgccgataaatttctcccctaaagtggggcaaattctcacgtgcaattacggaaactacttgaaagatgagaaaggggatgtagtttcgactgctgtcgatgctcatatccccccggaaatgattaaatgtagactcgtcgttgtattgaatgggcgtctgaatggcaatgcgtgtattgtggttccaatttcgaccacaaaagatactgctaaacttaataatggccttcacgttgagttacctgaggggataattaaagcagcaaaatattttcctcaaacaactagttgggttaaatgcgacatggtacaaaccgtaagtaatcagcgacttagcaggcctatggaagtaggcaggggatggataacgcagatgctttcacgtgaaattgtgacaaacctacaaaaagctgtaatcaaagctatcaatgcaactgcgcttgttccagcacagcaggaatccgaacaatag

SEQ ID NO: 121235 - DNA, 1023 bp, Enterobacter cloacae; identical to SEQ ID NO: 78996

SEQ ID NO: 121236 - DNA, 2028 bp, Enterobacter cloacae
atgagcgaatttacgggatcggcagcttcacaggctgactttatttggaagaatgcggaagacctttggggggacttcaagcatacggactttggcaagatcattttgccgtttaccttgctgcgccgcctggagtgtgcgctggagccgacccgcgaggcggtgagagaagcgcatgacgctttcaaggatgccgatgtcgagctggataccattctgcgctcaaccgctgaataccccttctacaacacctctgaatactccctcggcaccttgggtagcaccaagacgcgccgcaatctggaagactacatcgccctgttttcggataatgcccgcgctatcttcgaggagtttgagtttggcaatacggtgatccggctggagaaagcgggcttgctgtacaagatttgccagaacttcgccaagatcgatctgcacccggacgtggttccggatcgggtgatgagtaacatctacgaacacctaattcgccgctttggtgccgaggtcaatgaaggggccgaggacttcatgacgccgcgcgacatcgttcacctagcgaccgcattgctacttgacccggatgatgccctgtttgaggccagccccggtttgattcgtactctgtatgacccgacctgtggcacgggtggcttcctcaccgatgccatgaaccatgtgggtgactacggtaaccgcgacaagatcccgccagtgctggtgccgcacgggcaggagttggagccggaaacccatgcggtttgtgtagccggtatgctgatccgccgtttggagtccgacccaggccgagatctgtcgaagaacattcgtcagggcagcacgctgtccaacgaccagtttgccggtgagcgtttccactactgcctgtccaatccgcctttcggcaagaaatgggagaaggacaaaaccgccgtcgaagcagaacacaaaaaaggtgagttgggccgttttgggccgggcctgccgaaaattagcgatggctccatgctgtttttgatgcacctggcgagcaagctagaactgccgatcaacggcggtggccgcgccgctatcgtgctgtcgggttcgccactgtttaacggcggtgccgcgtctggcgaatcggaaatacgccgttggttgctggaagacgacctgattgaagccattgtagctctgccaacggatctgttcttccgcaccaatatcgccacctacctgtggattctgtccaacaagaagccgcaggagcgcaaaggcaaggtgcagttgatcaacgccaccgacctttggacttcaatccgcaacgagggcaacaagcgccgtattgtcagcgatgagcagcgccgccagattctggacatctacgccacaggcgaaaccggagcgctttcccggatgcttgactaccgtacctttggctaccgccgtatcaaggtcctgcgcccgctgcgcatgaccctggagctggataaggtgggcatggatcggttggaagccgaagctgcctgggaaaagctctctgatgcgcatcagacattctggcgtgaagccctcaagccgctgatcgggcaaacgcagccctatagctgggcagaaacctttgttagggactcgatcaagtccgatgaagcaaagcagctcaaggtcaaatccaacaagacattgatcaccgccctaatcagcgcctttggtcacaaagacccgaaagccgagccagtcacggattccaacggcgagctggtgccagacacagatttgactgattacgagaacgtcccctatctggatgacatcgacgactactttgcccgcgaagtgcttcctcatgtgccggatgcttggctggatgagagctttaccgatgccagggatggtcaattgggccgcgttggctacgagatcaacttcaaccgcttcttctaccagtaccagccgccgcgcaagctgcatgatattgatgaagacctgaagcaggtagaagccgagattgccgcgctactggcggaggtggccagcgaatga

SEQ ID NO: 121237 - DNA, 1335 bp, Enterobacter cloacae
atgagccagtacagagcatatcccgcgtataaggattccggcattgagtggattgggcaggtgccggagcattggaagattgcgcagattaagcgaatttccgccttgaatcccaggaaatcgaccttaagcgaggaaaaggattctctttgcacatttctccctatggaaaagctgagaaccaatgctgtaacacttgatgaaactcgtcctattcatgaagtgtatggtggatatagctatttctgcgatggcgatattctgatcgccaaggtaacgccttgcttcgagaatggaaacatagcgatagccaatggtctggttaacggcattgggtttggctctactgaaatcaatgttcttcgggtaaatggaaagggacataaccggtttctttactaccgtctgcaagaagagcagttcagaacaattgccaaatctgagatgagaggcactggaggcttaaagcgagttccaacggatctgtttgagtcatttactatcgggcttcccgacactgacgaacaagccaccatcgcggccaccctcgaccgcgaaaccgcccgtattgatgcgcttatcgagaagaaaaaccgctttgtcgagctactgaaggaaaagcggcaggggctgattacccatgctgtcaccaagggactagaccgcaacgccaagatgaaggattccggcattgagtggattgggcaggtgccggagcactgggaggcgacaaaactaaagcatgttgctgcattctctggtggtggtacgccatcaaaagaaaatccagactattggaacggctgcatcccttgggtctctccaaaggatatgaaacatgaggtgattaccgattctatagatcatataactaccaaaggactggaaaatagtgccacgaaactgattgactcgggagcggtgttgctggttgctcgatcaggtattcttcgtcacacgataccggttgggatcaataatgttcctgttagcttaaatcaggacatgaaagcattgagccttgatgaaactagggttagaccccggtttatacttcggtgggtacagggtcttaaccgctcgttgcttgggatatgggcaaaagaaggagctactgttgaaagcttagagcatgaatatgtagcgaacactcgtctacctcttccagatctgaaggagcaagatgccattctagccaccctcgaccttgaaaccgcccgcattgatgctctgattagcaagtcggaacaaagtatcaccctgctcaaagaacgccgcgccgcctttatcaccgccgctgtcaccggccagattgatttgcgaggaaaacaataa

SEQ ID NO: 121238 - DNA, 3258 bp, Enterobacter cloacae
atgcaatcagcagcacatcaggaaaaatacttccagcaatacatcatcgaccggttggtagatcagggctggaagctgggtgattccaagttctacaacaccgagcgggcggtgtatcccgaagacctggaaagctggatcaaaaccagcggccagcaggaaaaatgggacaagctggaacggctcaacggggccaaaacccttgaagtgctgatggatcgcttggataaagcactggagaaacaaggcaccatgcaggtgttgcgccagggcttttccattgccggttgcggcctgatcgagatgaccgaggccgcaccggaagacaagcgcaatgcagcagtcattgagcgctaccaggccaatatactgcgcgtggtgccggagctgaagtatcacccggcccgtgaatttgccattgatctggtgctgtttatcaacggtctgccggtggcaaccgtcgaactgaagaccgacttcacccagtcctgcgaagcggccatggatcagtaccgcaatgatcgcctgccgtatgacgcccagaccaaacgccgggagccattgctgaccttcaagcgtggggcagtggtacatttcgccatgtccgactctgaaatcatgatggcgaccaagctggatggagaaagcacctttttcctgccgttcaataaggggcgcaatgacgaaagcggcactgtacatgcgggtaacccgccaggtgagattaaggccgatggtacccaggaatacccggtagcctacttctgggaggcggtctgccagccggatgcctggctgcggattttccatagctttgtctacgtcgagaaaaaggacgtggtggatattcagggcaactggtcgaagaaagaaaccctgattttcccgcgctttcaccaatggacggcagtgaaccagatgctggccgatgcccgcgaaaatggcgcaggcatgacctacctgtgtgaccacagcgccggttccggcaagaccagcaccatttcctggacggcccatgacttggtgaaactgcgcgaagataacggcgacgcggtatttaacagcgtgatcattgtcaccgaccgtaatgtgctggacggccagctccaggacgcggtgaagcagattgaccatcagtttggggtgatcgccgccattgaccggcagaagtcatccaagtccaagagcaagcagctctcggatgccttgttgtctggcacgccgattgtggtagtaacgatccagaccttcccctacgcgatggaagccatcatcactgacaaggccctgaaagggaaaaactttgctgtgatcattgatgaggcgcataactcgcagactggctctaccgccgctaagctgcaagccgcgctggggatgagcggacaaggcaaaatgtccaccatgacggtggatgaactactggagcaactgcaaaagtctcgcgcccgcccggacaatatcagctacttcgcctttaccggcacgcccaagcactccactttgatgctgtttggtcgcccgacagatccaagccaaccgatctcggacgataacccgccgcaagccttccacctgtacaccatgcgccaggccattgaggagaaattcattctcgatgtgttgaacggctatgtgccctacaaaacggccttcaacctttccaagcagcttgaagacagcaagcgggtaagcggcaaggccgccaaacgcgccctggcacagtggatgtcattgcatcccaccaatgtgacccagaaggtacagtttatcgttgagcacttcaccaaaaacgtcgcccaccggctggatggcaaggccaaggcgatggtagtgaccagctcccgtgccgctgccattcgctacaagaaggcgtttgaccgctatatcgagcagcacagcgagtacggctttattcattcactggtggccttctccggcaagatgaccggtaagcaggtgatgcaccaggatgacagcgagttcaaggatgatgtgtttatcgtcgatgagaacgaggagttcaccgagcagagcatgaacccggatgtccacgggcaggatttgcgctttgcctttgaccgcccggaataccgggtgatgttggtggccgacaagttccagactggctttgaccagcccaaactggtcgccatgtatgtggacaagaaaatcgccaaccatgtggagattgtgcagaccttcgcccgcctgaaccggacggcacctgggaaggatgaagtctttatcatcgacttcgtgaacgatccagagaacgtgcgcaaggcctttgccacctatgacaaaggcgctcacatcagcgaagtgcaagacctcaatgtggtctacgagatcaaggagcgactggacgagcacggcctgtacgacgagaaggacttggccgcgttcaaagaagcccgcttcaagaccatacgtgacatcacccatactaaatcgccacagcacaaggcgctgtataccgctacagctggagcgacggccttgtataacgacaagatgaaaatgttgcgcgatggcatggcaacctgggaagcagcgtttgagaaggcccgcgccaggggtgatgaggcgggcatgaagtctgccgatcaccaccaggatgagtatgccgagcaaatcaaggcgctgatgggcttcaagtcggacctggggcgcttctgccgtacctattcctatatcgcccaactgattgattttggcgacccggagttggagaactttgccgctttcgccaagctgctgcaaaagcgccttcagcacgaagcaccggaaaccgtggacttgacaggcctggtgcttactggctttgacatcaatgctcgacccgatgacgtagaagaagaaggcaaaaccccggtattgcaaccagcaggtgcaggcggtggtggagcggcaggcgacaagccgaaattcgtcaaagagattatcgagaggctcaacagcctgtttggtgaggcgacgccgatccaggatcaggtggctttcgttaatcagatttcagcgattaccggtgaaagcgatgtcgtcatggctcaggtggaaagcaacacccgtgagcaggctatgaaaggcaacctccccggtgctgtgcagcaagctgttgttcgtgctttgtccagtcatcagaagctggcaacccaggtgctcaagtctgaccgtcagggcatgaccgcattggttgatatggtgtatgacctgctacgcgaaggcaaagacatcgatctgggtatggattaa

SEQ ID NO: 121239 - DNA, 1269 bp, Enterobacter cloacae
atgcttgacctgctgaatctgccaggcatcaagccggtcgatatgcgccacgaaggcaagtgccttgtgatagtcgctgagccggtaacggtcgaggtgccgttatgtggggactgcaacatccctatgcacagacacggtacgcgcaaaaacaagttcatggacacgccgttgtacatggagcccgtccgccttgaagttcagcgcccgcgctttcgctgtgagtcgtgcggaaaaatgtccatgccggagttgagttttctggatgacaaacgccgagccaccaaacggctggtcgatgttattcggcaacagtgcctgggaaccaccttccatgctttagctgagcaaaccggtgtggcggtgaacaccgtcaagaacatcgctcacgatctcattgaggaactctcccaaaccgttcgttacgaaaccccagtcatcatgggcattgacgaagtgaacctggccggagggtatcgctgtgtaatcaccaatctggcaaccaacaacgtctttgatatgttggagcatcgaactcaagagcatttgaagcccttcttcaaggatttgccggatgctgacaaggtggaatgggtctgtacggatatgtggcgacccttcaagcgttcctttgctcagtatctgcccaacgccaaactggtgatcgacaagttccatgtcgtcaagatggcttctgaagccttggaagtggagcgcaagaactatcaggcacagttaagcaaagaagatcgcatttacgtcaaaaagtcgattcgctggctcaccctgaagcgacccggcaacttgacacccgcagagcaaaaggcgctggaggttgtaaagcaggcgatcccagcacttgccatggcctatgacttcaaggaagccttcttctgcatctacgacgaacccgacaagcagagcgctcagaacgcctttgaggcttgggagaacagccttccactttatggcatggagcctttcaaaacactggtaaaaacggtacacaaccattacgacgacatctttgcctactgggatgcgccgttctcaatcaccaatggctatacagaagggctcaacggcttgatcaagatgtccaatcggttaggtcggggttatagctatgagatcatccgtgcaaagacgttgtactccaaagaagcccgcaaggttggcagtggtattcgagcaggacgaggcaaggtcgagtatggaccgcacattccgacattgttgaagcaggcagaaggtggagagttggattaa

SEQ ID NO: 121240 - DNA, 585 bp, Enterobacter cloacae
atgtcacgtgtttttgcctactgcagggtctcaactctggaacagaccacagaaaaccagcgtcgtgaaattgaagcggcgggttttgccatcagatcccaacgacttattgaggagcatatcagtggctcggttgctgccagcgaacgccccggatttatccggttgctagatcgcatggaaaatggggatgtactgattgtcaccaaacttgaccgtctgggtcgtaatgcgatggatatccgaaaaacagtagagcaactggcggctttagatattcgcgttcattgtctcgcactcggaggcgttgacttgaccagtccggccggaaaaatgactatgcaggtaatttctgctgtagcggagtttgagcgggatttgctgcttgagcgaacgcattcaggtattgcgagggcaaaagcggctggaaaacgcttcggtcgccctcccatcctgagcgaggaacaaaagcaaacagtgacagagcgcctaaatgctggcatcagtatcagtgctattgcccgggaatttaataccacccgccagactatccttcgggtaaaggctggattgctgcaagagtga

SEQ ID NO: 121241 - DNA, 483 bp, Enterobacter cloacae
atgccacggcgacagatactgagcagtgaagagcaggaacgcttactggttataccagatgatgaaattattctgacccgaatgtgttttctgaacgaaccggatattgcgctcattaataagcaccgacggccagcgaatcgcctgggctttgctgtattactctgttatctgcgtggacctggatttattccggacaaaagcagtgctcctcacaatggcgttgtatccagggttgcttcccgactgaaacttcagcctgatttatggccggaatatgcatccagagagcaaacccgctgggaacatctgaccgaactttatcgctacctggaactatctccgttcagccggtcaatgcaaaaagactgtatccgccatctgcacccctatgccatgcaactgacaaaggatttatgctggcggaagaaatgctcagctggctacataacaataatgttattttcccttctgttgaagtga

SEQ ID NO: 121242 - DNA, 2547 bp, Enterobacter cloacae
atgctcagctggctacataacaataatgttattttcccttctgttgaagtgatcgaacggacgcttgccgaagtcgtcacgctcgctaacagatcggtattttcgacacttaccgcgcaactggaaaagcagcataaatcagcactcgacagcctgctcatatcagagggtgaacaaccttcccgtctggcatggctgctacagcctccgggtaaaataaacggtaaaaatgtgctgcaacatatcgaccggcttaattccatcgctgcgctggggttgcctgatggtattgcgctttccgttcaccagaacaggttgcttaaactggcgcgtgagggccggaaaatgagcagcagggacctggcaaaattcaccgatgtcagacgttacgctacgctggtttgtataataatagaggccagggccactctgactgacgaagtgattgatctgcacgagcgtatcttgggtagtctgttcagcagggcaaaacgcacgcaggccgaacggctccagcaaacgggaaagcttattcagagcaagctgaagcagtacgttaccgtcgggcaggcgttacttaacgccagagaatccggggaagatccctggactgcaatagaagatgtccttccctggcaggaattcatcaacagcgtggaagaaacgcggtttctttcccgtaagggcaatttcgacgcgcttcatctgatcaccgaaaaatacagtacgctgcgtaaatatgccccgcggatgctgtcagcattgcagttcatggcgacacctgcggcgcaggcgctcagcgatgcgctggacaccataacggaaatgtaccgtaaacaacttcgtaaagtgccgccatcggcgccaacagggtttatccctgaaagctggcgaaaactggtgctcacgccttcaggcatcgaccgcaagtactacgagttttgcgtactgaatgaactcaagggtgcattacgttccggtgatatctgggtaaaaggatcgcgccgctacaaaaattttgatgattatctcatcccgactgctgagtttgagaaatcccgacataatgaccagttacagttggccgttcagaccgatagccaggcataccttcaggcccgtatgactcttcttgcatctcggctggaagaagttaacgcgatggcgcttgccggtgatttgcccgatgttgatatctcagataaaggcgtaaaaatcactccactggagaacagcgttccttcaggtgtttcgccctttgcagatttggtctatggcatgcttccccatccgaaaattacggagatactggaagaagttgatagctggacgggatttacgcgtcacttcgcgcacctcaaaaataataacgtcagaccaaaagacggaagactgttgctgaccaccattctggctgacggcatcaaccttgggctgacaaaaatggcggaatcctgccctggggccacaagatcgtcactcgaaagtattcaggcatggtacatcagagatgaaacttattcagcggcactggccgagctggtcaacgctcagaaagcgcggcctctggccgcattctggggcgacgggacaacatcgtcgtcagacgggcagaactttcgggtaggcagtcacgggcgttatgccggtcaggtcaatcttaaatatggtcaggagccgggcgtgcagatttatacgcatatctcagaccaatacagcccgttctacgccaaagtgatcagccgggtgcgcgactcaacccacgtgcttgatggcctgctgtaccatgaaagcgatctggaaattaccgagcattacaccgataccgcaggcttcactgaacatgttttcgccctgatgcacctgctgggattcgcttttgcgccaaggatccgtgatcttcatgacaagcggctgtttattcatggaaaggccgagcgctatccggggcttcagtctgtcatatcaacaacctgcctgaatatcaaatacattgagtcgcactgggatgaggtattgcgcctggcaacctcgattaagcaggggacagtcaccgcatcactgatgatgaaaaagttagccagttacccaaaacagaatggacttgccaaagcgctgagagagattggccgcatcgaacggacactatttatgctggactggttccgtgatcccggtctgcgccgacgcgtgcaggcggggctgaataagggtgaggcccgtaatgcccttgctcgagcggtctttttgcaccgtctgggtgaaataagggatcgtgggctggagaatcagagttatcgcgccagcgggctgacattactgacagcggcgatcacgttgtggaacacggtatatatagaaagagctattgagtcactaaaacgaaagggtatcccgataaatgagcaactggtctctcatctttctcccctgggctgggaacatatcaatctgagtggagattacgtctggcgtaataatcttaagctgggatccggaaaataccgctcattacgtacagtcgataccgctttgtacaaaaaatag

SEQ ID NO: 121243 - DNA, 1005 bp, Enterobacter cloacae; identical to SEQ ID NO: 31749

SEQ ID NO: 121244 - DNA, 981 bp, Enterobacter cloacae
atgagccatcaactcaccttcgccgatagtgaattcagcactaagcgccgtcagacccgaaaagagattttcctctcccgcatggagcagattctgccatggcaaaacatggtggaagtcatcgagccgttttatcccaaggcgggcaatggccgacggccctatccgctggagaccatgctgcgtattcactgcatgcagcattggtacaacctgagcgacggtgccatggaagatgccctgtacgaaatcgcctccatgcgcctgtttgcccgattatccctggatagcgccctgccggatcgcaccaccatcatgaatttccgccacctgctcgagcagcatcaactggcccgtcaattgttcaagaccatcaatcgctggctggccgaagcaggcgtcatgatgacccaaggcactttggtggatgccaccatcattgaggcacccagctctaccaagaacaaagagcagcaacgcgatccggagatgcatcagaccaagaaaggcaatcagtggcactttggcatgaaggcccacattggtgtcgatgccaagagtggcctgacccacagcctggtcaccaccgcggccaacgagcatgacctcaatcagctgggtaatctgcttcatggagaggagcaatttgtctcagccgatgccggctaccaaggagcgccacagcgcgaggagctggccgaggtggatgtggactggctgatcgccgagcgtcccggcaaggtaaaaaccttgaagcagcatccgcgcaagaacaaaacggccatcaacatcgaatacatgaaagccagcatccatgccagggtggagcacccgtttcgcatcatcaagcggcagttcggcttcgtgaaagccagatacaaggggctgctgaaaaacgataaccaactggcgatgttattcaccctggccaacctgtttcgggtggaccaaatgatacgtcagtgggagagatctcagtaa

SEQ ID NO: 121245 - DNA, 1293 bp, Enterobacter cloacae
atgattttacgctggcaatggattctcaggcagacacttaaaaagctatggttcagggcaacgttatttgcaatggtagcaataataacggcccttttatctattctttttagatcaatgatcccagagtcagtatcagtgaaggttggtgcggaagcagttgataatattctgaacatactggcatcgagtatgctggcggtgaccacattttcactgagtatcatggtcaccgcttacggttcagccactactaatgtgacgcccagagccacgcgtttagttgtagaagacgtaaccacacaaaatgtactggccacttttatcggttcttttctcttcagcctggtagggattattgccctcaatatgggagcctacggagaaaggggtagagtcattttattcattgtaacactggttgtcattgccttaataatcatcacattgcttcgctggatacagcatttgacctctctgggcagggtaggtgagacaacagcaaaagtagaacaggcggcgatcgagacatttattgcgagagcaaaaagtccatgtcttggcggatatccatggcttgagaacaatgaacaaccaaaaggaactgttgccgtatatccggagaaaattggctatgttgaatatattgacatggtcaagctcggcagtctgctgagcaatgatcctcgtcatgtatatcttgtggcgcagccaggcagtttcatacatccatcgatgccagttttgtacctgagttctggtcaggagtcatcaatctgtaccgatttacttgaaacgatcattgtctcggatgtgcgttcatttgctcaggatccccgattctgtctcagcgtcatggccgaaatagcctgcagggccctttcgcccgcagtaaacgatcccggtactgcgattgatgtcattggcagaggtgttcgaatactctccgcttacgcgcagaataaaatagatgaaactgaagtgatatatccttcagtacatgttgcgccacttcagatcaaagacctactggaagactttttcttacctgttgcacgtgatggtgcgagtatgagggagattcagataagagtccttaaaggactgtctatgctgagtaagggttggcctgggatgtttgctgaagccgcacatatactggcatctgaaacattagagcatgcaactcgtactggtcatatagcccatgacgaatatcttataaaatcaatttattataatttattcagtggcgaaaatcctaaggaaggtgcgaacaagttcctgatatga

SEQ ID NO: 121246 - DNA, 1998 bp, Enterobacter cloacae
atgagtgaaaatgatacaatccaaaagaagtctaaaagccagattaacaaagcggtattctttacatctgctttgttaattttccttcttgtcgcctttgccgctgtattcccggatgtcgccgacaaaaattttaaactacttcagcaacaaatcttcacgaatgccagctggttctacatccttgcagtggccctgattctactgagtgtctcgttcctgggactctcacgctacggtgatatcaaactgggtccggaccatgcgcagcctgattttagctatcactcctggtttgcgatgcttttctcggcagggatggggatcggcctgatgttctttggcgttgctgaacctgtgatgcattatctttcacctcctgtcggcactccagagaccattgcggcagcgaagaaagcaatgcgcctgacgttcttccactggggcctgcacgcatgggcaatctatgccattgtggcactgatcctggcctttttcagttaccgtcacggtctgcctttaacgctgcgttccgcactttatcccattattggcgagcgcatatacggacctgtaggccatgcggttgatattttcgccgttattggcaccgtctttggcgttgcgacatcgctggggtacggtgttttgcaggtgaatgctggtttgaatcatcttttcggggtgcctattaatgaaacggtgcaggtgattctaatcgttgtcatcactggtttagcgacgatttcggtggtgtccggcctggacaagggaatacgtatactgtctgagctcaacctgggcctggcagtgctgctgctggcgctggtcctgtgtctgggaccaaccgtgcttctgctgaagtcatttgtggaaaatacgggcggttatctttctgaactggtgagtaaaacttttaacctttatgcgtatgaacctaagtcgagcaactggctggggggctggacattactgtactggggatggtggctttcatggtcgccgtttgtggggatgttcatcgcaagagtctcgcgcggtcgaaccattcgcgagtttgtcaccggcgtgctgtttgttcccgccggcttcacgctcatgtggatgacggtgtttggtaacagcgcaatctatctcattatgcaccagggggcggctgatctcgccaataccgttcagcaggatgtcgcgctggccctgtttaatttcctggagcatttcccgttttcttccgtgctgtcatttattgcaatggcgatggtcattgtcttctttgtcacctcggctgactccggggcaatggttgttgatacgctggcatcgggtggcgtcgctaacacgcctgtatggcagcgaattttctgggcctcgctcatagggattgtggcaatcgcactgctgattgcggggggactgagcgcgctgcaaaccgtgacaatagcgagcgcattacctttctcagtgattttactgatatccatatacggattattaaaagccctgcgtcgggatttgaccaagcgtgaaagcctgagcatggcgactattgctccgactgcagcgcgtaacccgattccatggcagagacgcttgcgcaatatcgcttatctgccaaagcgctctcttgtgaaacgctttatgggcgacgttatccagcccgccatgacgctggttcaggaagaactgaataaacagggaacgataagccatataagtgatactgatgacgaacgaattcggcttgaagtcgatttgggcaatgagctgaactttatttatgaagtgagacttcgtggctataactcaccggctttcgccatggctgcaatggacaatgacgagcagcaggttgagcaacatcgatattatcgcgctgaggtctatctgaaagaaggcggtcaaaactatgatgtgatgggctggaatcaggaacagctgattaatgacatactggaccagtacgaaaaacacctgcacttcctgcacctcgttcgttaa

SEQ ID NO: 121247 - DNA, 504 bp, Enterobacter cloacae
atgccgggcaaccgcccgcattatgggcgttggcctcaacacgattttacgtcacttaaaaaactcaggccgcagtcggtaacctcgcgcatacagccgggcagtgatgtgattgtctgcgctgaaatggacgaacagtggggctacgtcggtgctaaatcacgtcagcgctggctgttttacgcgtatgacaggatacggaggacgattgtggcgcacgtcttcggtgaacgcactctggccacactggagcgacttctgagcctgctgtcggcctttgaggtcgtggtatggatgacggatggctggccgctgtatgaatcccgcctgaagggaaagctgcacgttatcagcaagcgttacactcagcgcattgagcgacataacctgaatctgagacaacatctggcaaggctgggacggaagtcactgtcgttctcaaaatcggtggagctgcatgacaaggtcatcgggcattatctgaacataaaacactatcagtaa

SEQ ID NO: 121248 - DNA, 603 bp, Enterobacter cloacae
atgtttccagtcggcattgacgtaagtaaaaacaccctggatctttgcatgctttatgacggtatcaaaggacgcataaaaacccgtaacatccagaataacagacattcagttgaaaatattcttcgctggctcaggcttcaacattgcagtccggaagatgttcatgtggtaatggaagctaccggtgtttatcacgaacggctggccactgaattacatgatgccggtttccgggtttctctggccaaccctcaccgtagtcgggagtttgcgcgtggcatgggaatcatgacaaaaacggataaggtggatgcgtatatgctggcctgttacgcattccttaagaagccacaccgctgggagccgccggcacccgaaatcagatatctcggtgcactcctgcgacggcgggatgttctgctgggtgatgccctgcgtgaggagaacaggctggaaaaatacctgtcgacagacacacctgcagatattatcagttcctgcaggcgtatggcgcagcttctgcgcgaggaggtaagtaatatcgagcggcagataaaagcacatatcaaagccagcccggtaatgactccaacttactga

SEQ ID NO: 121249 - DNA, 390 bp, Enterobacter cloacae
gtggcggatgtcacccaggtcgacaaactgctgcacggcgacgagaacgtcgtctgcgccgatgacggctacacaggcgtcgaaaagcgctccgagcatgccgaccgagaagtgatctggcaggtcgcagcacgccgcagcacctacaagatgctcgataaacgcagcgccctgtacaaagccaagcgcaagatcgagaaggccaaggcgcaagtgcgagcgaaggtagagcccccgtttcgcgtgatcaagcggcagttcggctacaccaaggtacgtttccgagggctggtgaagaacactgcacaactggtgacgctgtttgccctgtcgaacctatggatggcccgccgacatttgctggcaagcgcaggagaggtgcgcctgtaa

SEQ ID NO: 121250 - DNA, 1152 bp, Enterobacter cloacae
atggcctatctcgacccgtaccaacgccccgcgccggaccgcttcgtccggcgctggctcttcatcaccgcctgtattgccgcgctcatgctgctgtggcagtttctgcccgccatcgaggcctggttcagtccgcgcgaggcagcagaacgcaccgtgatggcgcgtggcgatctggcggcggacgagaaaaccaccatcgaactgttcgaaaaatcacgcgcctcggtggtctacatcaccaccgcgcaattagtacgcgatgtctggacgcgcaacgtgttctccgtgccgcgcggcactggctcgggcttcatctgggacgacgccggccacgtcgtcaccaacttccacgtcatccagggcgcgtccgaagccaccgtcaaactggccgacggccgcgactaccaggccgcgctggtggggacgagccccgcgcacgacatcgccgtgctcaagatcggcgtcggtttcaagcgcccgccggccgtgccggtcggcaccagtgccgacctcaaggtgggtcagaaggtgtttgctatcggcaaccccttcggcctggactggacgctcaccactggtatcgtctccgcgctcgaccgctcgttgccgggagaagcgggcggcccggccatcgatcacctgatccagaccgacgccgccatcaaccccggcaattccggtggcccgctgctcgattcggctgggcggctgatcggcatcaataccgccatctacagtccgtctggcgcctcggccggcataggctttgcggtgccggtcgataccgtcatgcgcgtggtgccgcaactcataaagaccggcaagtacatccgtccggcgctgggcatcgaggtggatgagcagctcaacgcgcgtctgcaggcgctgaccggcagtaagggcgtattcgtattgcgcgtgacgccgggctcggcggcgcacagggccgggctcgtcggcgtcgaggtcaccgcaggcggcatcgtgcccggcgatcgcgttatcagcatcgacggtatcgccgttgacgacgtcaccacattacaggcccggctagacgacaagaacgttggagatgttgtggtcttgttagtggagcgggccggcaagactcgcgagatgcttgtggaactacaaccgggagtttga

SEQ ID NO: 121251 - DNA, 966 bp, Enterobacter cloacae
atgacccgtcatcatccgagtgatccgcgcactgtgctcttgcaacaccgctggctcaaccgcctgcagaccgggctgttggtcctgaccctggtcgggatcgcagccgcagcagggagactgccatttggggaaggctgcctgtggctcgcgctgtttgccgttgcaggtgcgttgctgctggacccggtagccgcgtcggcgctgagctcgcgcctgtaccgcgtacggaccttgcacccgcaacaagcccacgagatgtgggccctgttgcgcgagctgcccgcccgtgccggtttgcccgccacgccggtgccgcactatatgcccagtgccgtcgtcaacgccttcgccaccggatcgaagcaggaggcatcgatcgccctcaccgatggcctgctgcgcagcctgagcccacgcgagctggcgggtgtgttcgcgcacgaggtcgcgcacatcgctaatgaggatctgcgtgtcatggggctggcagattccgtcagtcgcctcacgtgcctactggcccttatgggacagatcgcgatcctgctcagcctgcccgcgctgctggttggcgcggcggaggtctattggcctggtctattgttattggccgcatcgccccaactggccctgctcgcacagctcggcttgtctcgcgtgcgtgagttcgacgctgaccgccttgcggcggaactgactggcgacccgcaggggctggcgtccgcgctggcgaaaatcgagcgggtcagccgctcctggcgtgcctggctatggccgggatggggcaatcccgagccctcctgcttgcgcacgcgtccggcaacgcaagagcgcatcgcacgcctgctgacgttggcgcctgggccagcatcagcgttgccactccgcgcgccccattttttgccggaatccgctttggcgacgcgcccaccgcgctggcgcccgagcgggctgtggcgctga

SEQ ID NO: 121252 - DNA, 498 bp, Enterobacter cloacae; identical to SEQ ID NO: 101361

SEQ ID NO: 121253 - DNA, 1716 bp, Enterobacter cloacae
atgcagggcttgctcggcactacactaatcctgctggcggcttgcagcctggcggcgatggcgacggcggcgttcagagtgcccgccttgctggggtatctctctgtcggcgttgtactgggcccctcagtcatcggcgtgatcgcgccgggggagacgctgagctttctgtccgagctgggcgtggcgctgctgttgttcatggtcggactggaattctccctcggagacttctggctcgcccgcaggacggtgctgatggcgggcgctctgcagatgatcgccgtggccccgccgctgatcctgctattgatgtggctggggcagcccggccagagcgccgcgctgctcggcactgcggcggccatgtcgtccacggcgctggtcagccgacaactggccgaccaaggcgagctcaccacccgccacggacgcagtgccatcgccgtgctggtctttcaggacctggccagcgtgcccctgctggccttgctggcgatctgggcgcgcggcgagtcgccgaagatcgagcatgtgctgctcgaagtattcggtgtgctgctgctgttcgcggcagcggccctcgcctcgcgccgtctgttgcatggcctgctgggctgggtggcgcggcggggccacgaggaatcgttcgtgctcgtctccttgtgcgtggtggtggctgccgccgccgctgcgcacgcggtcggcgtatccgccgccctgggggccttcctcgccgggatggtgctgggcgagagcgacttccggcaccacatggaaagccacctcaggccgtttcgcgatgtgttgtcgggcgtgttcttcgtgaccatcggcctgcaactggacgcagcacagattctttcggcaccgctggcggtgctggcgtggctggtggtgctggtaccggtcaagatcctgctcaatacgctggccttgcgggcgacgcgcctgtccgccctcgatgcctggcgcacgggcatagcgttggggcacggcggcgagttcgccctgctgttgttgggcacggtcttgcagcagcatctgatccccgcgaccgtcgtccaacccatgctggtcgcgctggtgctcagcatggccctggcaccgctactgatccgccatcacgatgtacttgcccggttcttgagccgcaccggcggcgtcattcagccaccccaggctgaagaagtcgagatcgccgcgcagacgacgcgatatcgagaccatgtcatcgtttgcggcgcgggcgagcttggcctgacagtcagcgagattcttcgccacgccggcgtggcgcatctgctgctggaggcggacgcgcagaaggtcgaggccgcgcgtgccgccggcgcgccggtgttccatggcgatgccagtcggcccgataccttgctggctgccggcttgacgcatgcgcacttggtggtgctaacgttcgcccatgcccagcaagcgttgcgcatcgcccaggcgattgccgagcgccgtccggcgctaaccttgtgggtgtcatgcagaagtacgaccgcggccgatgcatttcgcgccatgcctaacgtgcgcgtgtatcagcaatcctttgccgcagctattgggctggcggaacaggtgatgtcgacgcttggcatgtcgaccgagctgattgaaggacacatcagcgcaatgcgccgccgtctcgacagcagccgttttccagggaattcatcgtcatga

SEQ ID NO: 121254 - DNA, 441 bp, Enterobacter cloacae
atgaagaatgatcttcaccttgtctgcccgcattgccagtccatcaaccgcgtaccgactgcgaagctatcggaacatcccaactgtggccgctgccagcagcccttgttcacgggcgagcccatcgagttgactacggcgacgttctcgcgccacgtggagcgcagcgatctgccgctgctggtcgatttctgggcgccatggtgcgggccgtgcaagatgatggcgccacagtttcagcaagcggcgcaccagctcgaaccgaggatccggctggcgaaggtgaataccgaggctgagccccacctggccacgcagttcggtatccgcagcatcccgacgctcgccctgttccagggtgggcgggagatcgcccgtcaggccggcgtgatgggcgcgcaggacatcgtgcgctggacgtcgacgcaagtgggacgctga

SEQ ID NO: 121255 - DNA, 1146 bp, Enterobacter cloacae
atgcagatacaatatagctatcgagctatcgacaaagagtttcatgaaccttggcagagagctttgggaaatgtgatcgagcacgccctcaagccattgctcgacaaacacactaaagattcagcgcgacttcaaatcgtccttgatcgcgacaagatcaagcggcaatttctggccagtggctatatgcacctgcccggcaaaaagattgtcagcgttactgcatcacataacgagctgacgcccctcgcgcagatgctcgcacagtcgttgttccgtcaggccaagaagcattttgaccgactgcatgctcaggatcaaatcaagcgcaaagcacgacgcgagcgcttgcgcgagctcaaggtgcggattgccgcaaaacccgcatcagccgcccatgaggccgaggtgacccaaatgcctctactgtcgaaacttgaggctgtcgcaaggcgtgagctggcttatctgcgggccgtcggcgatttaccgtgcgattatccgacgctgcgcgacgtggtggatgaagcgattgtccgagctaaggtggaatggcaatccgtgccgggggaaaaagaggcttacaccggtcttttgaagcatctgttcgccgtcctggataacgaagtggcaagcagccggcaatttggcgaatccgtttctctggacgcgccggtcgaaccggatgcccaagacgtggccgaggccatggtggaagaggaaatcttcgaattttatcagcacgatgacacactcaagctggccgatattttcgctggcagtcagcatcccgatgtcgcaacgatcgcggaacaggaggagctgattgatcggtcgagcgagttcgcttttgcatttgacctgctgaaggacatgccgcgtttgtggcggcgcatttttctgcttatccgtgtggacgggctgaatgccagcagcgtctctgaaatcctgctgattcctagtaaggaagatgctgtccgaaggtggctcatgcaggccgaagcattcatcgctgctcatctggaagaggccggagtaagcaaaaacgggaacgattggctccaaggcgttgattggtcggcattgtctgtgacccgaaacgaggcagcctcactgtggtccaaggaggcgaaccatgaagaatga

SEQ ID NO: 121256 - DNA, 612 bp, Enterobacter cloacae
atgaacacagacaccatcgccaattccaatgcggatgaccccaccaaagcactgtgttcgctgagccaaaattggtggctttttgtgctgcgcggtgtcttggcattgatttttgcagccctcgcgttctggatgccacaatcggctctgttggccatgaccatcatgttcggcgcattttccttggtcaatggcgcgttcaacttgtttgcagcggtgcgccatatccagaaaaaagagcgctggggctggctgctgttcagcggcattgtcggcatacttacgggcgtcgtcgtcctggttgctccttgggtcgccacgatagtcttggcttcttttttatgggctagcgtgggcttctgggcgattttcaccggtgtgctggagatatccgccgccgttcggctgcgtcgggaaatcaagggtgaaatctggcttgccctcagtggactgctctcgattatccttggtgctatcgtcttgtggatattttttacccgtccggtcgagtcattcgtggccgcaggctggctgttgggtttccatgcggcagtctatggcgtcacgcttttgttcttgagttggagtcttcgcaaaacgcgcctggggtaa

SEQ ID NO: 121257 - DNA, 888 bp, Enterobacter cloacae
atgaatgagcaaacaccgaatcccaatgcgacgaacgaaggaataaacgaacaggccgcggtaagcagccttcctgtcagtccagagtccaagcctgaagtcgtcacggaggtacagcctgaggttcagaaagaaacggactcacaggcggcagacaaacgtaaacaagtcctcgatgaggcagtctcggccttgtcgctgaccaaatcagcgctggccgcacttgacggcaaggacactgcacgcgcattggcaacgctggccgaagtgacgggaaagctggagctgatcgtcgcgcgcgaacccacgctcgccctggccggcgttgatgtgcgcaccatcgtgcacgacttgttcgccaacacggaaaccattgaggcgatgaccgacgaggcgctggatgccctcaaacatggcgaggtgcaacaggctcgccacgtgctggctttgctggccagtgaaatcgtgatcacggtcaccaacatccctttggcgtcctatcccgcagccgtgaaggcagtcgtgccgctgatcgatcagggcaagatcgaagaagccaaagccgcgctgcagtcagcgctcagcacgctggtcgaggagcgcagcgtgcttccgctgcccgtcctgcgtgcgaagctgctcctgaagcgcgccgagcccctggtagaagatggtcagcgcagcgaagcatccaatgagcgcctggagacattgttgaacgaagcccggcagcagttggaaatggcagaactgctgggctatggaaaaaggaaggactttgagcccctgtacgctgaactcaagaaaatcaaggaaaagacgggagggggaggctgcggaaaaggctggctcgatgaagtcaaggcaaaactgtccaggttgttctga

SEQ ID NO: 121258 - DNA, 915 bp, Enterobacter cloacae
atgaatatcaaacagccacaatacaccttctccgcacttgccctggcggtcgtcgtcggactgagcggaccggctctggcccaatcggcggcaggttctagcccaggtgctgcagcaccctctgccgcatccaaggcggcacagccacaggtagatgacaaggccgcccgggaagccgataaaaagcgtgccgagctcactcaagacgccatcacggcgctcaccaagacccaggaggctttgaccctccttgatgcaaagaagaccaaggaggcgcttgctgcgctggaactggccagcggaaagctggaactggtattggcacgcgacgccaaacttgctttagcgccggtcgatgtacgcgtcatcacccacgatatccacgccaacgtggaatcggtaaagaaagcggtcaagttgtctcgggagttgttgggtgatggcgaggtgcaaaaggcccggcccatcgttgccaatctggccagcgaaatcgtaatccaaaccgacaaccttccgatggcaacgtacccggcagcgatcaagtcggccgcacggctcatcgacagcggcgagatcgacaacgccaaagcggaactcgtccgagcactgaacacgctggtggtgacctcggtcgcctttcctctgcccgtgctacgggccgaagccgcgatggcaaaagctgaaaagctggccgagaccgacaggcgcgatgccaagcagaacgaggagctcagcaccttgctgtcgtccgtgcgcacggagatcgagatggcgcagatcctgggttatggcaagaaggcggacttcaaacccatcttcgatcaggtgaagtccattgagcaaaagtcggctggtggcaaaagcggcaagggatggttcgacgagttgaagacgcgcatccaaaagctgttttga

SEQ ID NO: 121259 - DNA, 459 bp, Enterobacter cloacae
atgtctgcattgactccgtgggaccccttccgggaactggatgaattgcaaaaccgcctggcgacgatgttcggacgaataccccagcgacagggcgcccgtaccggcaacgaagccatgaccacggcggactgggcaccaatggcggacatcagcgaggatgagaacgcattcctcctcaagctggatctgccggaggtccccaaggatgccgtgcgcgtcagcgcggaaaacggtgtgctcaccatcagcggcgagcgcaaactggaaaaagaggagcagggcaagaagttccaccgcatcgaacgtgcgtatggccgctttgtgcgcagctttgtcttgcctgacaacgttgatccgaccaaggtgacggcttctatgaaagacggcgtgctggaagtgcggcttgtcaaggccgagcaagccaaaccgaaacagattgaaatctcagtcaactaa

SEQ ID NO: 121260 - DNA, 192 bp, Enterobacter cloacae
gtggccgaatcgacccaggcgcgcatcgatcaggctatccgcgacatcgtgatgggcgtgttcgagcgcgcctaccggattctcgacatcaaccgcgcggtgctggagcgctgtgcgcgcgagctgctggcgcgggaaacgctcgacgaaagcgatatccgtcaattgactcaaggacttgttcggaactga

SEQ ID NO: 121261 - DNA, 687 bp, Enterobacter cloacae
atggaaaaaaagaatcaatggaataccggctactggatcgttgccctcctgctgttgctgagtttgcagagctactggcagacggcgaaaaccgtcgagccggtgccctacagcgagttcgagaaggcgctggacgaggggcgcgtggccgaagtgctggtgtcggatcgtacggtgaccgggcgcctgaagtctccggacagccggggcaagacgacgatcgtggcaacgagggtcgaacccgatcttgccgatcgcctgtcgaagtacgacgtaccctatgcccgcgtgttggagagcacctggctgagcgatgtgctgtcgtggatcctgccagcggtatccttctttggcgtctggttcttcctgttccgccgcttcgccgagaagcagggcatgggcgggtttctcaacatcggtaagagccgcgccaaggtgttcgtggaaaagaacaccggtgtgacgttcgccgatgtggcggggggggatgaggccaaggcggagctggtcgcgatcgtcgatttcctgaagaatccgcaggactatggccgtctcggggcgcgcattcccaagggcgtgttgctggtcggcccaccgggcaccggcaagacattgctggccaaggctgttgccgggtggccgaatcgacccaggcgcgcatcgatcaggctatccgcgacatcgtga

SEQ ID NO: 121262 - DNA, 192 bp, Enterobacter cloacae
atggcgggcgaggctgccgtgtccgactccatcagcctggcatgggcagcctccctggcatcgatcgcggtggcggtcgtggccgcgggtcacgcggtcgtctacaagcgtgatccgcggtcggccacgccgtgggggctgctcatcagcggcggcactgccctcccgctcgctggccatccgtttgcgtga

SEQ ID NO: 121263 - DNA, 2850 bp, Enterobacter cloacae
atggccagaaaacaatgccaggtctgcggccaacccgccaccgtgcgggtggaagccaatctcaacggtcgtaacagcaccatgctgttgtgcgacgaccattaccggcaattagtgcgccagcaaaagcgcaccgtttcgccgctggaagccttgttcggctcgcgcagcggcctgttcgaggacttcctcggcagtgacttcttccgcatcggcgaagacgcgacgccagttgccgccgataccgatgacgtggtcgatgcctcgtttggcgagcccgccaccgcaggttcgggtgcgccgcgccgtcgcggcagtgggttggccagccgcatcagcgaacagtcggaagccttgctgcaggaggccgccaaacacgctgccgaatttggccgctccgaggtggataccgaacatctgctgctggcgctggccgacagcgacgtggtcaagaccatcctgggtcagttcaagatcaaggtcgatgacctcaagcggcagatcgagtctgaggccaagcgcggggacaagcccttcgagggcgagatcggcgtgtcgccgcgcgtgaaggatgcgctcagccgcgccttcgtggcctccaatgaactcggccattcttatgtcggtccagagcatttcctgatcggtctggccgaggaaggcgaagggctggccgccaacctgctgcgccgctacggcctgacgccgcaggcgctgcgccaacaggtcagcaaggtggtcggcaagggcgccgaggatggccgcgctgagacgccgaccaacacgccagaactcgacaagtactcgcgcgacctgaccaagatggcgcgcgacggcaagctcgacccggtgatcggccgcgcgcaggagatcgaaaccaccatcgaggtgctggcccggcgcaagaagaacaacccggtgctgatcggcgagccgggtgtgggcaagaccgccatcgtcgaagggctggcgcagcgcatggtggcgggtgaagtgcccgagaccttgcgcgacaagcgcctggtggaactcaacatcaacgccatggtggccggcgccaaatatcgcggcgagttcgaggagcgcgtgcagaaggtgctgaaggaggtgaccgagcaccagggcgagatgattttgttcatcgacgaggtgcacaccatcgtcggtgccggccagggcggtggcgaaggcgggctggacgtggccaacgtgttcaaaccgatgatggcgcgcggtgaactcaacctgatcggcgccacgacgctgaacgagtaccagaaatacatcgagaaggatgccgcactggagcggcgcttccagccggtgacggtgcccgagccgacggtggcccaggccatcatgattctgcgcggcctgcgcgacaccttcgaggcgcaccacaaggtcagcatctccgaggacgcgatcatcgcggcggccgagttgtccgaccgctatatcacggcgcgcttcctgccggacaaggcgatcgacctgctcgaccaggcggccgcgcgcgtgaagctgtcggccacggcccggccggtggccgtgcaggagctggagtccgaactgcaccagctacggcgtgaacaggattacgtggccgcgcgcaagcagtacgaccaggccgccgagctcggcaagcgcatcgaagccaaggaggccgagctcaagaagctcgtcgaggactgggagcgggagcgggcctccggcagtgccgaggtcaaggcggaacacgtggcgcaggttgtctcgcgcctgaccggcatcccggtcaacgagttgacggtggaagagcgcgaaaagctgctgcacttggaacaacggctgcacgagcgcctggtgggacaagacgaggcggtccgtgccgtggccgatgccgtgcggctgtcccgcgccggcctgcgcgaaggcagtaaaccggtggctaccttcctgtttctgggcccgaccggggtgggcaagaccgagctcgccaaggcattggccgaatcgatctacggcgatgagcacgccctgttgcgcatcgacatgtcggaatatggcgaacgccataccgtggcgcggctggtgggcgcgcctccgggctatgtcggttacgacgaaggcggtcagctcaccgagaaggtgcggcgcaagccctacagcgtgctgctgctcgacgagatcgagaaggcacaccctgacgtctacaacatcctgctgcaagtgttcgacgacggtcgcctcaccgacggcaagggccgggtggtggatttcaccaacaccatcatcatcgccacgtccaacctgggttcggacatcatccagcgacggctgaaggcgcgtgaggcggctggcgaggagtacgaaaagaccaaggccgaggtcatggacgtgctgcgcggccacttccggcccgagttcctcaaccgcatcgacgagatcatcgtcttccatgcgctgggcaaggaggagatccgccacatcgtcggcctgcaactcgatcgcgtggcgcgcagcgccgccagccagggcgtgacgctcactttcgatcagacgctgatcgaccatttcgcggaagaaggctacaagcccgagttcggtgcgcgtgaactcaagcgcctgatccgcagcgagctggaaactgcgctggcgcgcgagatgctcggtggcggcatcggcaagggcgatcacgccagcgcacgctgggacgacaaggccgaacgcgtggtgttcgaacgcaaagagccaccgcagaccccggccgagccggagcagccggatgtcgcgaaggcgaccgagacgccgcacggcgacgctggcaaagactcgagcaagaagaagtcggcgagcgacgcatcttga

SEQ ID NO: 121264 - DNA, 570 bp, Enterobacter cloacae
atggacatcgatttcaagaagttggctccctggaactggttcaagaacgagcagcaagagcagcagaccgtctcttccctgccggtgcagcgcaatgacctgccagcggcgagcgggccagtcagcccgatcctgcaactgcatcgggaaatcgaccggctgttcgatgacgcattccggggcttcggttttccggcgttgaacatgccgcagtggccatccgattggtcgggcatgctgaagccggccctggacatccaggaaaccgacaagcagtacaagattaccctggaagtgcccggtgtcgaggagaaggacatccagataactctcgacaacgacgtgctgatggtgcgtggcgagaagcgccaggaacaggagaagaaggaaggtggcttccaccgtgtggagcgctcctacggcagctttcagcgtgccttgaacctgcctgacgacgccaaccaggattcgatcaaggcatcgttcaagaacggggtgctcacggtcacgatcgacaagcgcgaggtcagcgcgccgaagcagggacgctcgatcccgatcaacggctga

SEQ ID NO: 121265 - DNA, 282 bp, Enterobacter cloacae
atgaaagcgcacctacaggtgattttcacgctcgatgaattggctgcgtatttgaaagtcggcaagcggacgctttatcggctccccgcgcacggggaaattccggctttcaaggtgggcgggacgtggcggtttcctcaaagtgaaatcgatcagtggatcaatgatcagacccgagccggagcaaagaaggaggtgatgcgcaagcgtgaacagcagaagtcatccgagcagcccgtgtcgcctgggcgcactgcccgtcacagcaggcaaagggcttga

SEQ ID NO: 121266 - DNA, 492 bp, Enterobacter cloacae
atgcaggtcaactgctcaggcaatggacagcgcctggctcgtcagcctgcgtgtgccacaggcgcctcgatcaaacaccgatcctcacgttgtagccgagtgcccgcagccccttgctcgtctgcatgttccttggcggaaactcgtctgggcgcgcccagacgacgatttccccgaggctgctcaggccaacgtgcggaattgtccagtcgtcgcttcggatcgcgttccagagtcgggccgaaacacttccgttgccccagacaacgtagttcaacagtatccgtccggccaacacaccttcccgacaccgccgccgaaggccatggcccatcaagcgaattttccatgcgccctcagcgccgtacctacagcaaatctttcaaggctcaggtcattcaggagtgttctgaacccggtgcctccatcgcaaacatcgccttgggctacagcctcaatgcggctttgttgaataaatcgaacttttgctga

SEQ ID NO: 121267 - DNA, 741 bp, Enterobacter cloacae
atgaacagcatcattcccttgcagaattcaccagaacgcgtctccctgctgccgatcgccccgggcgttgattttgcgaccgcggtggcactccggcggatggccacctcaacaggtgccacgccggcttacctcctggcgccggaagtgagcgccctcctctggtatatgcctgaccagcgtcaccacatgttgttcgccaccatgtggaataccgggatccgtatcggtgaagcccggacgctcaccccggaatcgttcgacctggatggtctgcgcccttttgttcgggtgctgtcggaaaaagtgcgggcacgtcgtggccggccgccaaaagatgaagtgcgtctggtaccgctgacggatgccagttttgtgcgtcagatggaaagctggatggtcaccacccgcccccgccggcgtgagccgttatggccggtcacggatgagacaatgcgcaactggctgaaacaggcggtgaagcgggctgaagctgacggcgtgcatttttcgatccccgtgacgccgcatactttccgtcacagctatattatgcacatgctttatcaccggcagcccaggaaggtcatccaggcactggccgggcataaggatccgcgctcgatggaagtctatacccgggtatttgcgctggacatggctgccaccctggccgttccctttaccggtgatgggcgagatgccgcggagatccttcgctccctgcccccggccggctga

SEQ ID NO: 121268 - DNA, 972 bp, Enterobacter cloacae
atgaagcgtgctcctgtcattccaagacataccacacatactcaatcgactgaagatacttcatcaccggcgccggccgcgccgatggtggattcattaattgcgcgcgtgggtgctatggcccgcggtaatgcaatctctcttccggtaagtggacgggaagtaaaatttacccttgaggtgctccggggagactctgttgagagcgcttcacgcgtatggtcaggcaatgagcgcgatcaggaactacttaccgaagatgctctggatgatctcattccttcatttttactgaccggtcagcagactccagctttcggccgccgggtttctgatgtcatagaaattgcagacggcagccgtcgccgtaaagccgcaatcctgacggaaagtgattatcgcgttctggttggtgaactggacgatgagcagatggctgcattgtcccgactgggtaacgattatcggccgacgagtgcttatgaacgtggcctgcgttatacaagccggctgcagaatgagtttgcaggaaatatttctgcgcttgccgatgcggaaaacatttctcgtaagatcattacccgctgtattaatacggccaaactgcctaaatccgttgttgccctgtttgcacatcctggagaactgtctgcccggtcaggtgaagcccttcagaaggcttttgcagataaagaagaattactgaagcagcaggctgagactctccacgatcagaagaaagcgggactaatctttgaagctgaagaggtcattagtcttttaacatccgtactgaaacaatctcccgcatcaagagttaatctgagctcacgtcatcagtttgctccaggggcaacagcattgtataagggcgataaaatggtgcttaacctggataagtcccgcattcctgcggagtgtatagagaaaatagaagccattcttaaggagcttgagaaaccaggagtctga

SEQ ID NO: 121269 - DNA, 306 bp, Enterobacter cloacae
atgggtagcaaaatcgcaggtgtggttttcttattcttcactatctggggaatggcttcagtgattgaattgcagtactggcgtaacgctgatacctatcctgtctggctgacaaaacatctccggatctctcccgaaaataacgaaaagagcctgataaggataggaatggaaacctttgacaaggtatgtggtgataacaggggcctccttgccgtcacccaaaaacaaaacggtatgtttatgcgctgtgatgattcccccggatttttttcatggttcagcggcgtttacaaagtcagttaa

SEQ ID NO: 121270 - DNA, 252 bp, Enterobacter cloacae
atgacaaatatcattctgtgtgatgtgactgccagcatcagcgaacttaaaaacgatccggtggccaccgccagtgccggcggcggctacccggtcgcgattattgaccgcaaccgccctgttttttattgtgtgcccgcggctctgtatgaacaaatgctcgatgcgctggacgaaaaagacctggtgcaattgatcacagaacgtcaaaaccagccgctgcgtgaagtggatctcaatcagtatctgtga

SEQ ID NO: 121271 - DNA, 1122 bp, Enterobacter cloacae
atgggaaccccctggttccagctcaaagaggcgcagtttcctgaaaaactgtacgttttttccagcaactacgagctctacgcgagcctgagtaaccgtgtggtcgccctgctggaagagctgtcgccccgcgtcgaacaatactcaattgacgaatgtttcctggatgcccgaggaattggccactgtatggatctggaggattttggcaggcagctgcgtgggcatgttctcagtggaaccggactgacgatcggtgtcggcttcggcgccacaaaaacactggccaaatcggcgcagtgggcgtcaaaggaatggccacaattcagtggggtgctggcgctgtcgcccgaaaatccacgcagaacggcaaaattactcagcctgcagccggtggaagaaatctggggcgtggggaaccggatagcgaaaaagctgcacgttatggggatcaccactgccctgcagctgtcgctgacgaaccccacatttatccggaaaaacttcaacgtagtgctggagcgcacggtacgtgagctgaacggcgagagctgcatttcgctggaggaagcgccgccgccgaaacagcagattgtctgcagtcgcagcttcgggcagcggatcaccacctacgaagaaatgcgccaggccgtctgccagtatgccgagcgcgcggcggaaaagttgcgcggtgagcgacagtactgccggcatatcagcaccttcatcaagacgtccccttttgcggttaatgagccgtattacggtaacgtggccacggaaaaactgaacacccctacccgtgacacccgggacattatcgcggcagcggtcaggtctctggacaggatctggctcgatggccaccgctacgcaaaagcggggataatgctcaatgatttcagtccgaacggcgtcgcgcagctgaatctgttcgatgacgtgcagccacggccgcacagcgatgcgctgatgaaggtgctcgacggcattaatcattccggactcgggaaagtctggtttgccggacggggtattgcgccggactggcagatgaaacgggagatgctgtcaccggcatataccacccgctggaaggagctgccggttgcccgtttctga

SEQ ID NO: 121272 - DNA, 1008 bp, Enterobacter cloacae
atgcgtgcatcgttgctggcatctttaccttacatgatggctgagcctacagcttttcgctggttatgcttacaggaaagtttgctgaaggcgccaaatacggttgaagcttatgcccgtgggatcgatgattggctgcgtttttgtcgccagaatgatgtgagccctacagaagccagccgggagatcctggctttgtatgttcggcatcttaatatctcccgcaatctggcggctgccagccttcgtcatcgactcactatcgttcgattatattgtgactacctgcgagaagaaggattaatagtactgaaccccgttatgagaggcagctggcatcctggcggaggtgggcgcagggggctcattcaggcacagcgacgcctgccatggataccgagtgaccgtgactgggaaaacttacttatcgcagcccgccagaccacaatacgtaatcgttttatgctatctcttgcgtacgactgtgccctgcgccgggaagagttgtgctccgttgctaccggcgatattgacccttctcgtcgcttgctaacagttcgggctgaaacgacaaaaactaagcgaggtcgggttgtgccctattctgtcgtaaccggagagttatatttcctctggttagcagaacggcgacaattaaatacttcccgtggcccactgtttctttcttattcctgtcgcaacagaactgcgccaataacccggtggacctggtccaagatcgtaaggtcgttggcaatgcaggcggggctaccccaattgagtacgcataccttcagacatctatgtctgaccgatctcgccagagctgactgggatattcatgagatcgctacgtttgccggccatcagagtatccagtcaacgttactttatatccatcttagtgcgcgtgatcttacggaaaaatttaacgcaggtatggcgtcgatacatgaacatcggttacaccatttaaagggggacaatacggatggcaatgaaaactga

SEQ ID NO: 121273 - DNA, 1611 bp, Enterobacter cloacae
atggcaatgaaaactgaatatgatgcgccagccccttttgactacgaagtatggcaacctgatcctgactgggattgttctcccgaattacagccgattgaacgagatactttgataaagctggctcagtatgttgttggacgtcataaacaaaactggtcgaactgtgtaagacaaaggctttctcgcctgataattccactcagagcagcattaaagtggatgaatgccgcatccacaacaaccaattctgcaattcatgacatcattctggaaatgcaccggctggaaaaaaactactggtcatggacccaggacgactggctcgaagtgctgtgcagcagtgaagaggtatttcgcaaaaaatatggcagctgtggtaattgtcgacagtatgtcctcgcgattgcttggttactgtgcggatttaatcgacttgaggcggctggctgcttttatcattatcggctttctgtcaaagtttttggccgcccggcgacagaggcggcggtaaacaagcttcaggagaacatgcagcgcctcggctttgtcgctgctgacaataacattcgtaatgcgctactgctgtctatgctttgtcagcggcaggttgatcctgaaaaattggaactggaaacacttaagcgagtaataacttacgggcctgtttatatgcgtcgctctgcggccaccttgtcaaggatatttgctgcgatggggctgttcccagcgggcattgaccatcgtattcttgagcgcagacggcctcacggggaatatcgtgcaaccagtaacgttccggaagaatggttgcgatggtgtgaacgctggcgtaaaaccgctattaaagcaccatcatctgaactcagtacatggtaccgcatcctgcagtgtgggcgctggctgaaagccactcaccctgatatacattctcctgcagactggagccgggacatcgcacttgaatacgtagctgcagtgtgtcaaatgaaaataggccagtggtctgaaccgcgccatatgtatcagaatcgaataggccagttaatgacagcctctgcacgggcggggattttacaggctatcagagttttttttcgagaccttcaggaatgggggcttattatcgtccgatttaatcctgtcagaacgttccgtttaccccgcgctatccgggccagtattggccctgcaccaagagtcgttgctgatgatatatggagtaaacttgtctgggcagggttgaacctgcaggagcaggatctgcattatggtgaacaactttactatcgctacccattttcgatggttcgtgcattatgtgttctctggctgtttggtgggttgcgtcgtgatgaaattttgcggatgcgaacaggctgtatacgctggcaaaatgatgaacatcagggcggctctcggatatgtttgctggatgtccccgtgaacaaaaccagcacggccttcaccaaacctgttgatccaatcgtaggggaatacattgattgctgggaaaaagaacgaaatataggtaatgactccaacttattgatagtgttttatgttcagataatgcccgatgactttgtcatgcagctccaccgattttga

SEQ ID NO: 121274 - DNA, 405 bp, Enterobacter cloacae
atgaaatcattaaccgtagtgcgtaaaaaaagccctaattatcccgttgagttcaaaatcaaaatggttgaactctcgcatcgaccagagatctccgtagcgcaactcgctcgtgagcatgggatcaacgataatttgctgttcaagtggcgccagtactggcgcgaaggaaaactacgtcctccttcaacaacagaaaacaacgtgcctgagctgctcccgataacacttgatgccgaagatgttgttcctgcaacctccccccggtcacaacctgtagctgctgcggcacctgaatcactcaatatcagctgtgaagtgacgttccggcacggatcactccgtctgaatggtgccatcagcgaaaatatcctgaacctgctgatacgggagctcaaacgttga

SEQ ID NO: 121275 - DNA, 348 bp, Enterobacter cloacae; identical to SEQ ID NO: 16878

SEQ ID NO: 121276 - DNA, 1575 bp, Enterobacter cloacae
atgaacagcttacttcctgacgatatcgatgaactgaaacgtctccttgccgaacaggaggcgctgaaccgtgcccttctggaaaagctgaacgagcgtgaacgcgaaatagatcacctgcaggcgcaactggataagctgcgccggatgaacttcggcagccgctccgaaaaagtctcccgccgtatcgcgaagatggaagccgaccttaagcagttgcagaaagaaagcgatacccttaccggccgggtggatgacccggccgtgcagcgcccgctgcggcagacccgtacccgcaaaccgttccctgaatcacttccccatgacgaaaaacggctgctgccggcagcgtcatgctgcccggaatgtggtggtgcgctgagttacctgggtgaagatgccgccgaacagctggagctgatgcgcagcgccttccgggttatccggacagtacgtgaaaagcatgcctgtactcagtgcgatgccatcgtgcaggcccccgcgccttcacggcccatcgagcggggtatcgcaggaccggggctgctggcccgcgtgctgaattcaaagtatgcagagcacaccccgctgtaccgccagtctgaaatatacggccgccagggtgtggagctgagccgctcactgctgtcgggctgggtggatgcgtgttgccggctactgtcaccgctggaaggggcgcttcaggactatgtgctgactgacggtaagctccatgctgatgacacgcctgtcccggtgctgttgccaggtaataagaaaacgaagaccgggcggttgtggacgtacgttcgtgacgaccgtaacgccgggtcagagctggagccggcagtgtggttcgcttacagcccggacagaaaaggtatccacccgcagacccatcttgcggggttcagcggagtgctgcaggcggatgcgtacgccgggttcaacgaactgtaccgcaatggacagataacggaagctgcctgctgggctcatgcccgccgcaagatccacgatgtgcacgttcgcaccccgtcagcgctgacggaggaagccctgaaacggatcggtgagttatatgccatcgaggcggaaataagggggatgccggcgaagcgacgccttgcagaacgtcagcaaaaagctaaaccgcggctgaaatccctggaaagctggctgcgtgaaaaggtgaaaacgctgtcgcgacactcagaactggcgaaagcgttcacgtacgtactgaaccagtggccggcgctggcttactatactgacgacggctgggccgaggcagataacaacatagctgagaatgcgctacggatggtcagcctgggccgcaaaaactacctgttcttcggttcggatcatggaggagagcggggagcgctgctgtacagcctgatcgggacatgcaaactgaacggagtggagccagaaagttacctccgttatgtccttgacgtcattgctgactggccgataaaccgggtcagcgaactactcccctggcgcgtagcactgccaactgaatgtagtggtcaagtaatattggccacggttttacagtaa

SEQ ID NO: 121277 - DNA, 207 bp, Enterobacter cloacae
atggaacgcttcttccgcagtctgaaaacagaatgggtaccggtgaatggttacgcaggcaaggacgaagcccgacagcaaattaatggttacatattgaactactacaacagcgtcagacctcaccattataacggtgggttgacgccggaagagtctgagaacaggtaccatttttactgtaaaaccgtggccaatattacttga

SEQ ID NO: 121278 - DNA, 906 bp, Enterobacter cloacae
atgaccgtttctctggattcgccgctggggaccgggccatccgaacgccgccagcgtatcagacgcacgctgggccgcgccgcgggcttcgtcggcaagatggcgcgcaatccactcaccgccatcggcggcgggattatcctgctgctgctgattgtggcggcgtttgccccgctgatcgcgccgtacaacccgctggtgcaggacctcaataacgcgctggtcgccccgaacgcactgcactggttcggcaccgacgagtttggccgggacatcttcagccggctggtgtacggcgcgcgcatcacgctctacatcgtgctgctggtctccgtgaccgttggcccgctggggctgctgctgggcgtcaccgcaggctacttcggcggcagggtggacgcggtgctgatgcgcgtcaccgatatctttatctccttcccgagcctggtgctggcgctggcgtttgtcgcggcgctcgggccggggctggagcacgtggtgattgcgattacgctcaccgcctggccgccgattgcccgtctggcgcgcgccgaaactctctctctgcgccaggccgattttatctccgccgtgcggcttcagggtgcttccccggtgcgcgtactgtggcgtcacatcgtcccgctgtgcctgccgtcagtgattatccgcatcaccatgaacatggcggggatcattctcaccgccgccgggctgggctttcttggccttggcgcacagccgccggagccggagtggggagcgatgatctccagcggtcgtacctacatgatggagtgctggtgggtggtgactattccggggctggcgatcctgatcaacagtctggcgttcaacttcttaggagatggcctgcgtgacatcctcgatcctcgtagcgaataa

SEQ ID NO: 121279 - DNA, 1014 bp, Enterobacter cloacae
atggcaatcaaaaaactcgatgatggtcgatatgaagtggacatccgccctactggacgtaatggaaaacgcatccgtaggaagtttgataagaaaagcgaagctgtcgctttcgagaaatacacgttgtacaaccaccacaataaagaatggctatcaaaaccaacagacaagcgacgtctgtcggagctgacacagatctggtgggatttaaagggtaaacacgaagagcatgggaaatctaatcttggaaaaattgaaatcttcacaaaaataacgaatgacccatgcgcatttcaaattacgaaatcgcttatcagccagtactgcgccacccgaagaagccagggtattaaaccttcgagtatcaatcgtgatttgacatgtattagcggcatgtttacagccctgattgaagcggagttattctttggtgagcaccctatcagagggacaaaaaggcttaaggaggaaaaaccagacacaggctatctcacgcaggaagaaattgccttactgcttgcggctcttgacggcgacaacaaaaagattgcgattctttgcctgagtactggagcacgttggggagaagcagctcgtttgaaagcagaaaatatcatccataaccgcgtcacgtttgttaaaacgaaaacaaacaaaccacgcaccgtcccgatctcagaggctgttgccaaaatgatcgcggataacaaacgaggttttttattccctgatgctgattaccctcgcttcagacgaacaatgaaagcaataaaaccggatttgccaatggggcaagccacacatgcactaaggcacagctttgccactcatttcatgattaatggaggaagtattatcacgctacaacggatactaggtcacacacggattgagcaaactatggtttacgctcattttgcgccagagtaccttcaggacgccatttctcttaatccgttaagaggtggtactgaggccgagagtgtccacacagtgtccacagtagagtaa

SEQ ID NO: 121280 - DNA, 276 bp, Enterobacter cloacae
atgagcaagcaagtaacactcatgactgatgcgattccttatcaggagttcgcaaaactaataggaaaatcgacaggagcggttcgtcggatgatcgataaaggaaagctgcctgtaattgatatgaccgatccacaatcagcttcaggtcgtgcaggtgaatattgggtataccttccggcatggaataacggactaaaactggcttatgaaagccgtcctaaagagattcgtgacggctggttgatgtggttaggtctcggtgaaccacgttaa

SEQ ID NO: 121281 - DNA, 171 bp, Enterobacter cloacae
atgaatgagcctcgttgtattgctcagttattgcgtaacgaaagccccagggcgattgacttcaccatcacccacggtaaggggcgtaagggaatcattatccgcaccaaaaaacagagtccgttaaaaaaggctctgacctttctgaaaagccggagggtctggaaatga

SEQ ID NO: 121282 - DNA, 501 bp, Enterobacter cloacae
atgacagtgatgacgctcaatctcgtcgaaaaacagccagcagctatgcgccggataattggtaagcatcttgccgtccctcgctggcaggatacatgtgattattataatcagatgatggagcgcgaacggctaacagtttgctttcatgcgcagttaaaacaacgtcacgcaacgatgcgttttgaagaaatgaacgacgtcgaacgtgaacggctggtttgtgcaattgatgaactgcgtggggcattctcaaaacgccgtcaggttggcgcaagtgagtatgcatatattagttttttaaccgtcagtcagcgccgtactttatttatgcacgcacgactgacagaaaaagaatttaaccagccatactggcgaattaatgaagaatcatgttactggcgtgatgctttattccgtgcattacgtgaattattcagcctgtttgagtatgcgccgacaattctgacgtcggtaaaaccagagcaatatctgcattaa

SEQ ID NO: 121283 - DNA, 225 bp, Enterobacter cloacae
atgcatacagtttctgaaaatcagtgcggtatatacgcattactgctgcaacaggccagaaccgaagcacaggccgacgctgcgacgcgcttttcttctcatcttgacgccatgattcgccacatcacaaaggcggagttatcccgcgtggagatagtcgagctgctcagtcaggagtcggaaaaatttcacaatatcggattgtctcgcggggaggtactttga

SEQ ID NO: 121284 - DNA, 303 bp, Enterobacter cloacae
atgtcctgttctcgttcggttgtattactgaataacgccttaaaaatcgccgttatgaaaaatggtgatttgtctcttattcaacttggtattgataaagagaagcgcgaaataactgaatctgttatcgcaatttatcagagtgaattaaacctcctgtctgatgtggtcaatttacttgttaaacgcgctgtattccacaagcaagtttcctcagtggatgaactgacaaaattaatgacagaactcgccagttattgcgctgatgaatttaagaagctgaacgacaaaaggagctggtaa

SEQ ID NO: 121285 - DNA, 225 bp, Enterobacter cloacae
atgccggacaacgtagattttattcaggaacaacaggctgaattactggagcgccagattaacgcggcaagggtaaaacattgctgtgcttctgcgctggtttgcgaagagtgtgacgcgccaatacctgctgcccgtcgtgcggcttatccgtcagccacgcgttgtgtttcctgtcagtcagtctttgaagcaaaaaacaaacattaccggagaacggcatga

SEQ ID NO: 121286 - DNA, 276 bp, Enterobacter cloacae
atgagtattcgtattgaaattggcgaacgttatgtcgttaccagtgacagctttcagtttattctccacgagaaaaagagagcggaaagcggtaaaaacgccggtcaggaatggctggcggtggttggttattacccgaaattaagccagctcgtttccggcctgatgcatcacgatattctgaccggaagcgcaaagtcttttgctgatttaaacgcgcaggttgagcaactcagcaagcgttgttcagaggcttttggctcatatggccgttaa

SEQ ID NO: 121287 - DNA, 2277 bp, Enterobacter cloacae
atggccgttaaagcctccgggcgttttgtccctccgtcagcatttgccgcaggcaccggtaagacgtttgccggtgcttatgcatggaacgcgccacgcgaggctgtcgggcgcgaaagaccccttacacgtgatgagatgcgtcaggtgcaaggtgttttatccacgattaaccgcctgccttactttttgcgctcgctgtttacttcacgctatgactacatccggcgcaataaaagcccggtgcacgggttttatttcctcacatccacttttcagcgtcgtttatggccgcgcattgagcgtgtgaatcagcgccatgaaatgaacaccgacgcgtcgttgctgtttttggcagagcgtgaccattatgcgcgtctgccggggatgaatgacaaggagctgaaaaagtttgccgcccgtatctcatcgcagcttttcatgatgtatgaggaactctgcgatgcctgggtggatgcgcatggcgaaaaagaatcgctgtttacggatgaggcgcaggatcatctgtatggtcatgttgctggcgctgcacgtgctttcaatatttccccgctctactggaaaaaataccgtaaaggacagataaccacgaggcaggcatattctgccattgcccgtctgtttaacgatgagtggtggactcatcagcttaaaggccagcgtatgcgctggcatgaggcgttactgattgctgtcggggaggtgaataaagaccgttctccttatgccagtaaacatgccattcgtgatgtacgtgcacgccgccaggcaaatctggaatttcttaaatcgtgtgaccttgaaaacagggaaaccggcgagcgcatcgaccttatcagtaaggtgatgggcagtatttctaatcctgaaattcgccggatggagctgatgaacaccattgccggtattgagcgttacgccgccgcagagggtgatgtggggatgtttatcacgctgaccgcgccgtcaaagtatcacccgacacgtcaggtcggaaaaggcgaaagtaaaaccgttcagcttaatcacggctggaacgatgaggcatttaatccaaaggatgcgcagcgttatctctgccgtatctggagcctgatgcggacggcattcaaggataatgatttacaggtctacggtttgcgtgtcgttgagccacaccacgacggaacgccgcactggcatatgatgcttttttgtaatccacgccagcgtaaccagattatcgaaatcatgcgtcgctatgcgctcaaagaggatggtgacgaaagaggcgctgcgcgaaaccgttttcaggcaaaacaccttaaccggggcggtgctgcgggatatatcgcgaaatacatctcaaaaaacatcgacggctatgcactggatggtcagctcgataacgatactggcaggccgctgaaagatactgccgcggctgttaccgcatgggcgtcaacgtggcgcattccgcaatttaaaacggttggcctgccgacaatgggggcttaccgtgaactacgcaaattgcctcgcggcgtcagcattgctgatgagtttgacgaacgcgtcgaggctgcacgcgccgccgcagacagtggtgattttgcgttgtatatcagcgcgcagggtggggcaaatgtcccgcgcgattgtcagactgtcagggtcgcccgtagcccgtcggatgacgttaacgagtatgaggaagaagtcgagagagtggtcggcatttacgcgccgcatctcggcgcgcgtcatattcatatcaccagaacgacggactggcgcattgtgccgaaagttccggtcgttgagcctttgactttaaaaagcggcatcgccgcgcctcggagtcctgtcaataactgtggaaagctcaccggtggtgatacttcgttaccggctcccacaccttctgagcacgccgcagccgtgcttaatctggttgatgacggtgttatcgaatggaatgacccggaggtcgtgagggcgctcagaagcgcattaaaacacggcctgagaagaccaaaccgtcagcaaagaaacggaagcccgttaaaaccgcatgaaatagcgccatcggccagactgaacaggtcggaacgaatgcaaatcacccgtatccgcgttgaccttgctcagaacggtatcaggccgcagcgatgggagcttgaggcgctggcgcgtggcgcgactgtaaattacgacggtaaaaaattcacgtatccggtcgctgatgagtggccgggattcacaatggaccattga

SEQ ID NO: 121288 - DNA, 1332 bp, Enterobacter cloacae
atgaacaataacagtaagaaaactttgagtaagaaaagaaccaagaaagccaaaaagaagtcgcttacccctgaacaaaaagcattgcaagcagaacaagcagcaaaaaaaacgcaaattatagagaataggcgctctattacagctcatgctattaatctttttcagcaatatacagcactccgtaaaaaaggattagatagttccactgctactttgcaagcttatgctgattatgaaaaagtacatggacataaattccttagttctatctctatgtggacaaaaatcaaaactggagcagggattcggatctatgatcttgagagacaagagagccgtaaatcgcttaatcttgctaagattccgacccgtttagaggctaagcgtagtgtactgacacagaaccaaaagaaagtacataaccagaatgcaaatacattacgcttaatcggtggcaaaaagctacctgtaacatctatggggcttattgtatgccctgtctgcgagatacatataaaagatagtgctatagagtggcatttacgacacaaccacgtagatcatgtagataacccgttgactaaccctatagtagctcctattgataccttagaagagactgtagaaatacgtgatctactaattggtgataaaacacttccgattaaatctagtactattaatatggggagtgacaagaaagataaacgttattttaataagcaagtttatcaaacggcattgctaacaatgacacaatcagaagcgtggaaactcgcgactgatgaagaatctagtatgacttttttaagcaatcagtacataagtccattaacatcatccgaacccaataatgaaatatctcttatcatggatggaacggatatagccattaatgaaagtctaactaatcctttcaaggccgcaaacgatacctgtgctacaggacgaacagtcgaggttactcacaaagtccgtcatgctggagatcaagctgatttcaaacgccgtgtttgggataacttcaatggcagatgtgctattactggctatccattgccagaggggatattggaagccgcacatattgaagcaataacagaatcagcaaataataacacatctaatggcctgttacttgaagtaagtttacaccgaatgtttgataaaggattaatggggattaatccagaggacttaacggttcatttttctattaattgtatccacaaaactatgtttgagggtaaaactctacaaccgcatcatgtagaacttgatgctggaaagttgatgacaaaatggaaaaagttccatgataagcgttaa

SEQ ID NO: 121289 - DNA, 420 bp, Enterobacter cloacae
atggtgacgcttgatacggtttattggaaatttggttatgcttcggaagcagctcaattactggagactgagttgataaatgttatcactgagtatgatatgagtcaggggaaagatatacagtcgctgaaaaaacagtttttagaaatggataaatacacgctgggtaaattgaattacgcactgaagtctaggatggtggaggatgctgatacactggagtatgtgtcagatgctcttaaagccagaaactacttggcacatgatttttttcgcgctcataattttgccaaagataccccagcaggacggcaaaaaatgctcgatgatttacaaaaaacacacaacattatttttgaggcataccggaaagtactgctaattagtggcatcaaaattccacctttagaagatgattag

SEQ ID NO: 121290 - DNA, 1035 bp, Enterobacter cloacae
atgagcaagaaaaaagggaaaacaccgcaacctgcggcaaaaaaaatgaccgccagcgccccgaaaatggaggcattcacctttggtgagccggtgccggtactcgaccgccgtgacattctggattacgtcgagtgcatcagtaacggcagatggtatgagccaccggtcagctttaccggtctggcaaaaagcctgcgtgctgccgtacatcacagctcaccgatttacgtcaaacgtaatattctggcttcaacgtttattccgcacccgtggctttcccagcaggatttcagccgctttgtgctggattttctggtgttcggtaatgcgtttctggaaaagcgttacagcaccaccggtaaggtcatcagactggaaacctcaccggcaaaatatacccgccgtggtgtggaagaggatgtttactggtgggtgccgtccttcaacgagccgacagccttcgcgcccggctccgtgtttcacctgctggagcccgatattaatcaggagctgtacggcctgccggaatatctgagcgcccttaactctgcctggctgaatgagtcggccacgctgttccgccgcaagtattacgaaaacggcgcacatgccggatacatcatgtacgtcactgatgccgtgcaggatcgcaacgatatcgaaatgcttcgcgaaaacatggtgaagtcgaaaggccgcaacaactttaaaaacctgtttctctatgccccgcaggggaaagccgacggcattaaaattatcccgctcagtgaagtggcaacgaaggacgatttttttaatatcaaaaaagccagcgccgctgacctgctggacgcgcaccgcatcccctttcagttgatgggcggcaagccggagaacgtcgggtcgctgggcgatattgagaaagtggcaaaggtctttgtccgcaatgagcttatcccgttacaggacaggatccgcgagataaacggctggctcggtcaggaggtcatccgctttaaaaactactcactggacactgacaacggctga

SEQ ID NO: 121291 - DNA, 1773 bp, Enterobacter cloacae
atgaccatcaccacagacaccactcttttgcacgacccgcgtcgtcaggcggcgctgctgtactggcaggggttttccgtgccgcagattgccgccatgttgcagatgaaacgcccgacggtgcagagctggaaacagcgcgacggctgggacagcgttgcccccatcagccgtgtcgaaatgagtctggaagcgcggctgacccagctcattatcaaaccgcagaaaaccggcggtgacttcaaggaaattgacctgctcggacgccagattgaacgactggcacgggtaaaccgctacaaccagaccggcaacgaggcagaccttaatccgaacatcgctaaccgcaacaaaggcgggcgacgcaaaccgaaaaagaattttttcagcgacgaggctatcgaaaagctggagcagattttctttgagcagtctttcgaatatcagttgcactggtatcgcgccgggcttgagcaccgcatccgcgatatcctgaaatcccgccagattggcgcgacgttttatttttcccgcgaggcgctgctgcgcgccctgaaaaccggtcataaccagatttttctgtcggccagtaaaacgcaggcgtatgtgttccgcgaatacatcatcgcctttgcccggctggttgacgttgacctgaccggtgacccgattgccctgggcaataacggcgcaaaactgatttttctcggcaccaactccaacaccgcacagagccataacggcgacctgtacgtcgacgagattttctggatcccgaattttcaggtactgcgtaaggtggcatcaggtatggcctcacagagtcacctgcgctcgacctatttctccaccccgtccacgctggcgcacgacgcctacccgttctggtcgggggaactgtttaaccggggacgcgccagcgccgctgaacgcgtggaaatcgacgtcagtcataacgcccttgccggtgggcttctctgtgcggacggccagtggcggcagattgtcaccattgaggacgcgctgaaaggcggctgcacgctgttcgacattgagcagctcaaacgtgaaaacagcgccgacgattttaaaaacctgttcatgtgtgaatttgttgacgacaaggcgtcggtgttcccgttcgaggagctgcaacgctgcatggtcgacacgctggaagaatgggaagactatgcgccgtttgccgccaatccgttcggctcccgcccggtatggattggttacgacccgtcacaccgtggcgacagcgccggatgcgtggtactggcaccgccggtggtggccggtggcaaattcagaatacttgagcgtcaccagtggaaaggcatggactttgccactcaggctgaatccatccgcaaactcactgaaaaatacaacgtcgaatacatcggaattgatgccaccggcctcggtgtcggcgtgttccagctcgtgcgctcgttctatcccgccgcgcgcgatatccgctacacaccggaaatgaaaaccgcaatggtgctcaaggcaaaagacgttatccgtcgtggctgtctggaatatgacgtcagcgccaccgacatcaccagctcgtttatggctatccgcaagaccatgaccagcagcggacgcagcgccacctatgaggccagccgcagcgaggaagccagccacgccgacctcgcctgggcgaccatgcacgccctgttaaatgagccactcaccgccggtatcagcacctcgctgacatccaccattctggagttttactga

SEQ ID NO: 121292 - DNA, 855 bp, Enterobacter cloacae
atggcaaaaaaagtctcaaaattctttcgtatcggcgttgagggtgacacctgtgacgggcgtgtcatcagtgcgcaggatattcaggaaatggccgaaacctttgacccgcgagtctatggttgccgcattaacctggaacatctgcgcggcatcctgcctgacggcatttttaaacgttatggcgatgtggtcgaactgaaggccgaaaagattgatgacgattcggcgctgaaaggcaaatgggcgctgtttgcgaaaatcaccccgaccgatgaccttatcgcgatgaacaaggccgcgcagaaggtctacacctcaatggaaattcagccgaactttgccaacaccggcaaatgttatctggtggggctggccgtcaccgatgacccggcaagcctcggtacggaatacctggaattctgccgcacggcaaaacacaaccccctgaaccgcttcaaattaagccctgaaaacctgatttcagtggcaacgcctgttgagctggaatttgaagacctgcctgaaaccgtgttcacagccctgaccgaaaaggtgaaatccatttttggccgcaaacaggccagcgatgacgcccgtctgaatgacgtgcatgaagcggtgaccgctgtcgctgagcatgtgcaggaaaaactgagcgccactgagcagcgccttgctgagatggaaaccgccttttccgcacttaagcaggatgtgactgacagggcggatgaaaccagtcaggcattcacccgcctgaaaaacagtctcgaccacaccgaaagtctgacccagcagcgccgcagtaaagccaccggcggtggcggtgacgccctgatgacgaactgctga

SEQ ID NO: 121293 - DNA, 1074 bp, Enterobacter cloacae
atgcgccaggaaacccgctttaaatttaatgcctacctgtcccgtgttgccgaactgaacggcatcgacgccggtgatgtgtcgaaaaaattcaccgttgaaccgtcggtcacccagaccctgatgaacaccatgcaggagtcctctgactttctgacccgcatcaacattgtgccggtcagcgaaatgaaaggggaaaaaattggtattggtgtcaccggctccatcgccagcaccagcgacaccgccggtggcaccgagcgtcagccgaaggacttctcgaagctggcgtcaaacaagtacgaatgcgaccagattaacttcgatttttatatccgctacaaaacgcttgacctgtgggcgcgttatcaggatttccagctccgtgtccgtaacgccattatcaaacgccagtcccttgatttaatcatggccggttttaacggcgtgaggcgtgccgaaacctctgaccgcagcagtaatccgatgctacaggatgtggcggtcggctggctgcagaaataccgcaatgaagcaccggcgcgcgtgatgagcaaggtcactgacgaggaagggcacaccacctctgaggttatccgcgtgggtaagggcggtgattatgccagccttgacgcactggtgatggatgcgaccaacaacctgattgagccgtggtatcaggaagaccctgaccttgtggtgattgtgggacgtcagctactggcggacaagtattttcccatcgtcaacaaggagcaggacaacagcgaaatgctggccgctgacgtcatcatcagccagaaacgcatcggtaacctgccggcggtacgcgtcccgtacttcccggcggatgcgatgctcatcacaaagctggaaaacctgtccatctactacatggatgacagccatcgccgcgtgattgaggaaaacccgaaactcgaccgcgtggagaactacgagtcaatgaacattgattacgtggtggaagactacgccgccggttgtctggtggaaaaaattaaggtcggtgatttctccacactggctaaagcgaccgcagagcctggagcgtaa

SEQ ID NO: 121294 - DNA, 744 bp, Enterobacter cloacae
atgacgagtcccgcacagcgccacatgatgcgggtctcggcagcgatgaccgcgcagcgggaagccgccccgctgcgacatgcaactgtctatgagcagatgctggttaagctcgccgcagaccagcgcacactgaaagcgatttattcaaaagagctgaaggccgcgaaaaaacgcgaactgctgccgttctggttgccgtgggtaaacggcgtgctggagcagggcaaaggtgcacaggatgacattctgatgacggtcatgctgtggcgtctggataccggcgatattgccggtgcgctggagattgcccgttatgccctgaagtacggtctgaccatgccgggtaaacaccgccgtaccccgccgtacatgttcaccgaggaggtagcgcttgcggccatgcgcgctcacgctgccggtgagtctgtggatacccgcctgctgacggagacccttgaactgaccgccacggctgacatgcctgatgaagtgcgcgcaaagctgcacaaaattaccggtctgtttctgcgtgacggtggtgatgccgccggtgcgctggctcacctgcaacgtgcgacacagctcgactgtcaggcaggcgtcaaaaaagagattgaacgactggagcgggagctgaaaccgaagccggagccgcagcccaaagcggccacccgcgccccgcgtaagacccggagcgtgacaccggcaaaacgtggacgcccgaaaaagaaagccagttaa

SEQ ID NO: 121295 - DNA, 510 bp, Enterobacter cloacae
atgatgacgctgattattccgcgaaaggaggctcccgtgtccggtgagggtacggtggtcatcccgcaaccggcaggcgacgagccggtgattaaaaacacgttcttttttcccgatatcgacccgaagcgcgtccgggaacgtatgcgccttgagcagaccgtcgcccccgcccgtctgcgtgaggccatcaagtcaggcatggcggagacgaatgcggagctgtacgagtaccgcgaacagaaaattgccgccggttttacgcgtctggcggacgtcccggcggacgacatcgacggtgaaagcatcaaagttttttactacgagcgcgccgtgtgtgcgatggcgaccgcgtcgctttatgaacgttatcgcggtgtggatgccagtgcgaaaggcgacaagaaggccgacagcattgacagcaccattgatgagctgtggcgagatatgcgctgggcagtggcgcgcatccaggacaagccgcgctgcatcgtgagtcaaatctga

SEQ ID NO: 121296 - DNA, 204 bp, Enterobacter cloacae; identical to SEQ ID NO: 32641

SEQ ID NO: 121297 - DNA, 282 bp, Enterobacter cloacae
atgacagcagaagaaaaaagcgtcctgtcgcttttcatgattggggtgctgattgttgtcggcaaggtgcttgccggtggtgaacccatcaccccgcgtctgtttatcgggcgcatgttgctcggtggttttgtctcgatggttgccggtgttgttctggtgcagtttcctgacctgtcactgcctgcggtgtgcggtatcggctccatgctgggtatcgccggttatcaggtgattgagattgccattcagcgccgctttaagggtagggggaaaccgtaa

SEQ ID NO: 121298 - DNA, 498 bp, Enterobacter cloacae
atgccggttattaacacgcatcagaatatcgccgcctttctcgacatgctggccgtgtccgaagggacggcaaaccatccgctgacgaaaaaccggggctatgacgtgatagtcaccggactggacgggaagccggaaatcttcaccgactacagtgaccacccgttcgcacatggccgaccggcgaaggtgtttaaccgtcgcggtgaaaaatccacggcctcaggtcgctatcagcatctttacctgttctggccgcattaccgcaaacagcttgccctgccggatttcagtccgttgtcacaggacagacttgccattcagttgatccgcgaacgcggtgcactggatgacatccgggcgggacgcattgagcgagccatttcacgctgtcgcaatatctgggcgtccctgccgggtgccggttacggtcagcgtgagcattcactggaaaaactggtcaccgtctggcgtaccgctggcggcgtaccggcttaa

SEQ ID NO: 121299 - DNA, 426 bp, Enterobacter cloacae
atgaagaaattatccctttcactgatgctgaacgtgtcgctggcgctgatgctggcactgttcctgatttacccgcagagcgtggccgtcaattttgtcgccgcctgggcgattctggcgacggttatctgtgtggttgccggtggtgtcggcgtgtatgccactgagtatgtgctggaacgctacgggcgggagctgccgccagaatcgctggccgtgaatattgtcgcgtcgctgtttttgcagccggtgccgtggcgcagacgggcggcggctctggtggtgatggtggcgacgtttatctcgctggtcactgccgggtggatttttaccgcgctgatttacctcgtggcgtcggtgttcttccggttgatacgcacggcctgtcgtcagcgttttgaggggcgggaaccatgtcaaagctga

SEQ ID NO: 121300 - DNA, 426 bp, Enterobacter cloacae
atgtcaaagctgatgattgtgctggttgtgttgttatcactggcggtggccggtctgtttctggcgaagcatgaaaacgccagcctgcgcacctcgctggacagggcgaacaacgtcgccaacgggcagcagacgaccatcaccatgctgaaaaatcagcttcatgttgccctcaccagagcagacaaaaacgagctggcgcaggtggcactgcgtcaggaactggagaacgcggcgaagcgtgaagcacagcgcgagaaaaccatcacgaggttactgaatgaaaacgaagattttcgccgctggtacggcgctggcctgcctgatgctgtgcgccggttgcaccagcgcccggtctgcacagacgccagtgattgtcgccaacgcttgcccgaaagtgagcctttgccagatgccgggcagtga

SEQ ID NO: 121301 - DNA, 159 bp, Enterobacter cloacae
atgccgggcagtgacccggagacgaacggcgatttaagtgccgatatccgacagcttgagaacgcgctggcacgctgtgccagccaggtaaaaatgattaaacactgtcaggacgaaaacgatgctcaaacccgacagcctgcgcagggcgctgactga

SEQ ID NO: 121302 - DNA, 468 bp, Enterobacter cloacae
atgctcaaacccgacagcctgcgcagggcgctgactgatgccgtcacggtgctgaaaaccagtcccgagatgcttcggatattcgtggataacgggagtattgcctccacactggcgacgtcgctgtcatttgaaaagcgttacacgctcaatgtcattgtgaccgactttaccggtgattttgacctgctcatcgtgccggtgctggcgtggctgcgggaaaatcagcccgacatcatgaccaccgacgaaggccagaaaaagggcttcacgttttatgcagacatcaacaatgacagcagctttgatatcagcatcagcctgatgctgaccgagcgcacgctggtcagtgaggtggacggcgcgctgcatgtgaagaatatcccggaacctctgccgccggagccggtcacccgcccggtggagctttatatcaatggcgaactggtgagcaagtgggatgaatga

SEQ ID NO: 121303 - DNA, 453 bp, Enterobacter cloacae
atgaatgagtttaagcgttttgaagaccggctgaccggactgattgaatcgctgtcaccgtcagggcgtcggcgactgagcgccgaactggcgaaacgtctgcggcagagtcagcagcgtcgggtgatggctcagaaagccccggacggcacaccctacgcgccacgccagcagcagagcgccagaaaaaagactggtcgtgttaagcgaaaaatgtttgcgaaacttatcaccagtcgttttttgcatatccgcgccagcccggaacaggcatcaatggagttttacggcgggaagtcaccgaaaatcgccagtgtgcatcagttcggtctgtcggaagaaaaccggaaagatggtaagaaaattgattatccggcgcgtcccctgctcggctttaccggtgaggatgtgcagatgattgaagagattattctggcgcacctcgaccgttag

SEQ ID NO: 121304 - DNA, 636 bp, Enterobacter cloacae
atgaacactctcgcaaatattcaggaactcgcgcgcgcactgcgcaacatgattcgcaccggccttgtcgtcgaaaccgaccttaacgccggtcgctgccgtgtgcagaccggcggcatgtgcaccgactggcttcagtggctgacctgtcgtgccgggcgttcgcgcacatggtgggcaccttccgtgggggagcaggtgctgattctggccgtgggcggtgaacttgacacggcgtttgttctgccggggatttattccggcgataaccccgcgccgtctgcgtcggcggatgccctgcatatccgtttccctgacggggcggtgattgagtatgaacccgaaaccagtgcactcacggtaagcggaattaaaacggccagcgtgacggcttctgattctgttactgccacggtgccggtggtcacggtgaaagcatcaacccgcgtcaccctggacacaccggaggtggtctgcaccaacaggctgattaccggcacgctggaagtgcagaagggcgggacgatgcgcggcaacattgaacacaccggcggtgaactctcatcaaacggtaaggtactgcatacccataaacaccccggcgacagcggcggcacaaccgggagtcctctatga

SEQ ID NO: 121305 - DNA, 348 bp, Enterobacter cloacae
atgacagcgcgttatctcggaatgaatcgcagtgatggcctgactgtcactgaccttgagcatatcagccagagtatcggcgatatcctgcgcacaccggtcggctcacgggtgatgcgtcgtgattacggctcgttgctggcgtcaatgattgaccagccgcagaccccggcgcttgagttgcagattaaggtcgcctgttacatggcggtgctgaaatgggaaccccgcgtcaccctgtcatccgtcactacggcgtgcagttttgacgggcgaatgacggtcacgttaaccggccagcacaacgacaccggccagccactttcgttaaccatccctgtgagttga

SEQ ID NO: 121306 - DNA, 909 bp, Enterobacter cloacae
atgccgattatcgacctgaaccagctacccgcaccggatgtagtcgaggagctggactttgaaaccattctcgctgaacgcaaggcgacactgatttccctttacccggaggaccagcaggaggcggtcgcccgtaccctgatgctggaatccgagcctctcgtcaaactgctggaggaaaatgcttatcgtgagcttatctggcgtcagcgtgtgaatgaggccgcacgggcggtaatgctggcctgtgctgccggtaatgaccttgatgtgattggtgccaattacaacaccacgcgcctgattatcaccccggcagatgattcgaccatcccgtcgacaccggcagtgatggagtctgacaccgattatcgtctgcgtattcagcaggcgtttgagggcttaagcgtcgccgggtcggtgggagcctatcagtatcatggtcgaagtgccgacgggcgtgtcgcagatatctctgtcaccagtccgtctccggcctgcgtcaccatctctgtgctgtcacgtgaaaataacggtgtcgcatccgaagacctgctggcggtggtgcgtaacgcccttaatggcgaggacgtcaggccggtggccgaccgcgtgaccgtgcagtctgccgccatcgttgaataccagataaacgccacgctttacctttaccctggtcccgaaagcgaacccatacgcgctgctgccgtgaaaaaactggaagcgtacatcacggcacagcaccggctggggcgcgacatccgtctgtctgccatttatgccgctttgcatgtggaaggcgtgcagcgtgtcgaactgactgcaccgctggccgacatcgtgctcaacagtacgcaggcgtctttctgtaccgaataccgcgtcgtgaccggaggctcggatgagtga

SEQ ID NO: 121307 - DNA, 531 bp, Enterobacter cloacae
atgagtgattcgcgactgctgccgaccggctcatcaccgcttgaagttgccgccgcaaaagcctgtgcggaaattgaaaaaacgccggtcaggattcgtgaactgtggaacccggatacctgtccggcaaatctgctgccgtggctggcgtgggcgttttcggtcgacaggtgggatgaaaagtggccggaagcgacaaaacgcgccgttatccgcgatgcctatttcatccactgtcataagggcactatcggtgcaatccggcgtgtggtggagccgctcggctatctcatcaacgtgacggagtggtgggaaaacagtgacccgcccggcaccttccggcttgatattggtgtactggaaagtggcatcacagaggcaatgtatcaggaaatggaacggctgattgctgatgccaaacctgcaagccgtcatcttattggcctgaacattacccgggacattcccggctacctgttcgccggtggtgtggcttacgacggcgatgtaattacggtttaccccggataa

SEQ ID NO: 121308 - DNA, 1878 bp, Enterobacter cloacae
atgagcacaaaattcaaaaccgttatcaccactgccggtgcagcaaagctggcagcggcaaccgcaccgggagggcggaaggtcaacattaccacgatggccgtcggggatggcggtggtaaattgcctgtcccggatgccggacagaccgggcttatccacgaagtctggcgacatacgctgaacaaaatcagccaggacaaacgaaacagtaattatattatcgcagagctggttattccgccggaggtgggcggtttctggatgcgtgagcttggcctgtacgatgatgcgggaacgttaattgccgtggcgaacatggccgaaagttataagcctgcccttgccgaaggctcagggcgttcgcagacctgccgcatggtcatcatcgtcagcagtgtggcctcagtggcgctgaccattgacaccacaacggtgatggcaacgcaggattacgttgatgacaaaattgcagaacatgaacagtcacgacgtcaccctgacgcctcgctgaccgcaaaaggttttactcagttaagcagtgcgaccaacagcacgtctgaaacgctcgccgcaacaccaaaagctgttaagacggtaatggatgaagcgaacaaaaaagcgccattaaacagccctgcactgaccggaacgccaacgacgccaactgcgcgacagggaacgaataatactcagatcgcaaacacggctttcgttatggccgcgattgccgccattgtagactcgtcgcctgacgcactgaatacgctgaacgagctggcggcggcgctgggcaatgacccgaattttgctacctccatgactaatgcgcttgcgggtaagcaaccgaaagatgccactctgacggcgctggcggggcttgctactgcggcagacagctttccgtattttacggggaatgatgttgccagtttggcaaccctgacaaaagtcgggcgggatattctggctaaagcgaccattgctgccgttatcgaatacctcggtttgcaggaaacggtaaacagggccaggaacgcggtgcaaaagaatggcgataccttgtccggcgggattacttttgaaaacgactcaatccttgcctggattcgaaatactgactgggcgaagattggatttaaaaatgatgccgatggtgacgctgattcatacatgtggtttgaaacgggggataacggcaatgaatatttcaaatggagaagccgccagagtaccacaacaaaagacctgatgacgctgaaatgggatgcactaaatattcttgttaatgccgtcattaatggctgtcttggagttggtacgacgaatgcactaggtggtagctctattgtccttggtgataatgataccggatttaaacagaatggagacggtattcttgatgtttatgctaacagtcagcgtgtattccgttttcagaatggagtggctattgcttttaaaaatattcaggcaggggatagtaaaaagttctcgctatccagctctaacacatccacgaagaatattacctttaatttatggggtgcttccaaccgtccagtggttgcagagttaggcgatgagtccggatggcatttctatagccagcgaaatacagataactcggtaatatttgctgttaacggtcagatgcaacccagcaactgggggaattttgattcccgctatgtgaaagatgttcgcctgggtacgcgagttgttcaattgatggcgcgaggtggtcgttatgaaaaagccggacacacgattaccggattaagaatcattggtgaagtagatggcgatgatgaggccatcttcaggccgatacaaaaatacatcaatggcacatggtataacgttgcgcaggtgtaa

SEQ ID NO: 121309 - DNA, 528 bp, Enterobacter cloacae
atgcagcatttaaagaacattaagtcaggtaatccaaaaacaaaagagcaatatcagctaacaaagaattttgatgttatctggttatggtccgaagacggaaaaaactggtatgaggaagtaagtaattttcagccagacacaataaagattgtttacgatgaaaataatattattgtcgccatcaccagagatgcttcaacgcttaatcctgaaggttttagcgtcgttgaggttcctgatattactgccaaccggcgtgctgatgactcaggtaaatggatgtttaaggatggtgccgtgattaagcggatttatacggcagacgaacagcagaaactagcggaattacataaggcagctttgctttccgaagctgaatccgtaattttgccgctggagcgcgctgtcaggctgaatatggcaacaggtgaggagcgcagtcgactggatgcatgggaacgctacagcgttctggtcagtcgtgtggacccttcaaatcctgaatggccggacatgccgcaataa

SEQ ID NO: 121310 - DNA, 1098 bp, Enterobacter cloacae
atgaaacataaaattaataaaattaacaatgatttttataaaaatttttatctaagagaaacattctccgatgatattattatgactcacggagtccctgagatttccaatgacgattataaaagcatttcattaaagaatagattatgtttcactataagaaaaagctccccgcataaaaaaatacaagaaagacttataaaaaatttcctagtaaaagttcctcttagctcacctgcaattgcctatcgtaaaaaattaaactatttgaattttctagaacctcatatccatggtgagaacttttgtcgaattgacttatgtaatttttttcataacataaactataactttgcaagggagtgtttcaaatcctactttgaagatgaatatctggtaaataaaaaaatcaaagttattgatgcatttttaaatagtttatctattgagattgtagtcaacaataaaaagaaaaaaatatttccaatgggattcgccacatcacctttcatatccaatataattttcagaaagttagatattttaattaaaagtttgtgtgacaaaagaagcatcatttacactcgttatgctgatgatatgcttttttcgagctccgggaaagacaaacttcttggaagtgaacattttgacaacgagatatcaactattgtcaatacggcaggactgtccctcaacaaacataaaaaaatatttaagaaaggcataatctcactaaacggctatgtaatagaaaataaaaatggagggggagagagagggagtataagaatatctaatggaaaaatgtatttaatacggaaagcactagataaatttaaaaagggatattctaaagagcatatttgcaaaaaagtattttctgttaaatcaccaactgtcaagtataataacaatgcagatcagtttgtaacggatttttataattcacaattctctaataagttagctggttatcgttcatatttaatatcattagtaaaatttaatgataaattcagatgttttcacgaaaacgaaatcaccaaatactcagtgattattgatgaaatttctaatgcactgctaaaaccctag

SEQ ID NO: 121311 - DNA, 2265 bp, Enterobacter cloacae
atgggtttgcaaagcataagaataaaaaacttactatcatttaatgatgtaataataaattccctagaggatgtaaattgcattgtagggatgaataatgttggcaaatccaatcttatgaaaatattgaaatatttttacgacaaacttgacgacataaaagtaatacctcctgattttcattctagttatactccttcagggtcaataacattgacttatgatgtaacaagaataaagagaattgtaatgaaccctaataacaatggtcgctttcacaagcatatttataacactttatttaagccacaatcattcatccgaaagccgcagaaattctgtcttcctttcatatctcctttgggtttccaaagaaaaagcacttatagcattacactcacaatttctaaagatgactccgtaacttggtcaattagcacaccaaatgcccggcatctaattaaaactctatttccttttttccatattgaaaccagacacattgacttatacgactggaatagcatatggaaaatgctcagcagtataaattcctttaatttctctgaaataaaaaaagaagaactccttgagtttttgaatgagaaaatatcaactaagcggggtagttacaagaagtatatagaaagagttgaaaatgtaatccatactaaaccttacacctataaagataaagtcgttaattatctaaaaatagttttagatggcgatattttcataaataaaggtgaagaactacatgttcagtcggatggcacgaactctcacaaatatcttgaaattatacttagcctattaatttcattaacaagaacagaatttatcaatccaattatatatattgatgaacctgaaattgggctacatccaaaacttagcgagaactttattgagaacataagcctgacatataaaaagtatgataaaacccatgaggaaattgagcctggaaaatattcaacaccatatccaactcttatatttagcactcattctccgagtttactaaaactcacgctaaaatctttcttacataaacagcaggttttgcatttttcaaaagaacgtgacaactcgaccaaaatttcaaaattaaactctaaatataatgacattagatttataaatatgcttagcgataatgaggcccgtctattctttagtgaatacattctatttgtagagggcgccacagaagttgaattgtttagaaattataatctgcaaaagctgtttccagtacttaaaaggttagatgtgtatgattgcgatgaagtaatgttgaaaaatataaaccccagctactcaaatgcagccatcccatttctagtagtaaaggatattgatcagattgccgttgttgacttcgaacatgaacaatttaaatttaattcgaaagggaaatcaattattaataaaatcattaagagagataaactacactatttttcgacataccaaaaaccttttcttaacgcagcaaaatttcttttaagccaagatgaaaggaaagtaacattcagtgaaaatggcctaaaattcagacacttcagtataggcagagttataagcgcagttaattttttatcctctaaagataatgtttattatacttctacaacgatagaaggctcattgatcaatgaattctctttagagacattctctttatggatcattgacatagtaatgagaagctttaatgtaaataataaaaaccctgtaaaaatgattaatgctctgctgcaaaaatacgatattaaaacccaatcaaaacaactttttcccaaaatactttcaaaatgtgaaacaaatcataacctaccattgcgacacatgagattattgaaaatcattaaaattagatatgctaaagaaataattgatgagtttaaaaaaaccatccccgacgtaaaagaccaagttgctatcttgcgccttatttttagtggcaaaacagaaactcttgtaagtatagaaatgcattataaaattgatcaaaaaccgatacggcaagatatattggattatatcaaagcattaaagtcagaaaatttctcttttatgagttcttacataggaaagacttctggatgggttacaagcttcattgattttagccttaatcattattcagccctagataaagaaaatgtcgaaaaaaaattccgcttggcttttcctgaaatttcgcatatcatcgatcatgcttcttcttcgatagaagctggagggctcaaatga

SEQ ID NO: 121312 - DNA, 1191 bp, Enterobacter cloacae
atgagtgactatcatcatggcgtgcaggtgctggagattaacgacggcacccgcgtcatttccaccgtatccactgccattgtcggcatggtctgcacggccagcgatgcggatgcggaaaccttccccctcaataaaccggtgttgattaccaatgtgcagagcgcaattgcaaaggccggtaaaaaaggcacgctggcggcatcgttgcaggccatcgccgaccagtcaaaaccggtcaccgttgtcgtgcgtgtggaagacggcaccggcgacgacgaggaaacgaaacttgcgcagaccgtttccaatatcatcggcaccaccgacgaaaacggtcagtacaccggactgaaagccctgctggcggcggagtcggtaaccggtgttaaaccgcgtattctcggtgtgccgggactggataccaaagaggtggctgttgcactagcatccgtctgtcagaagctgcgcgctttcggatatatcagcgcatggggctgtaagaccatttccgaggtgaaagcctaccgccagaatttcagccagcgtgagctgatggtcatctggccggatttcctcgcatgggatacggtcaccagtaccaccgccaccgcgtatgccaccgcccgtgcgctgggtctgcgcgctaaaatcgaccaggagcagggctggcataaaacgctgtccaacgtcggggtaaacggtgttaccggcatcagcgcatctgtattctgggatttgcaggagtccggcaccgatgctgacctgttgaacgagtctggcgtcacaacgctgattcgccgcgacggtttccgcttctggggtaaccgtacctgctctgatgacccgctgttcctctttgaaaactacacccgcaccgcgcaggtgctggccgacacgatggctgaggcgcacatgtgggcggtggacaagcccatcaccgcaacgctgattcgcgacatcgttgacggcatcaatgccaaattccgtgagctgaaaacaaacggctatatcgtggatgcgacctgctggttcagcgaagaatccaacgatgcggaaaccctcaaggccggaaaactgtatatcgactacgactataccccggtgcctcctctcgaaaacctgaccctgcgccagcgtattaccgataaatacctggcaaatctggtcacctcggttaacagcaattaa

SEQ ID NO: 121313 - DNA, 519 bp, Enterobacter cloacae
atggcaatgccgcgcaaactcaagttaatgaacgtctttctgaacggctacagctatcagggcgttgcgaagtccgtcacgctaccaaaactgacccgtaagctcgaaaactatcgcggtgcggggatgaacggcagcgcaccggtagacctcggccttgatgacgatgcgctgtcaatggagtggtcgctcggtggcttcccggattcggttatctgggagctttacgcagcaaccggcgtggatgccgtgccgattcgttttgctggctcttaccagcgcgacgataccggcgaaacggttgccgtcgaagtggtcatgcgtggacgtcagaaagaaatcgataccggcgagggtaaacagggagaagacaccgagtcgaaaatctccgtggtctgtacctatttccggctgacgatggacggtaaggagctggtcgaaatcgacaccatcaacatgattgagaaggtgaacggcgtcgaccggctggagcaacaccgccgcaatatcggcctgtga

SEQ ID NO: 121314 - DNA, 276 bp, Enterobacter cloacae
atgaacaaagaaaatgtgattaccctggacaatccggtcaaacgtggtgagcaggttatcgaacaggtcacgctgatgaaacccagtgccgggacgctgcgcggtgtcagtctggctgcggtcgcgaactccgaagtcgatgcactgattaaggtgctgccgcgcatgactgcaccgatgctgaccgagcaggaagtcgccgcactggaactgcctgaccttgtggcgctggccggtaaggtggtcggttttttgtcgccgaactcggtgcagtga

SEQ ID NO: 121315 - DNA, 2448 bp, Enterobacter cloacae
atgagtaacaatgtaaaattacaggtattgctcagggctgttgaccaggcatcccgcccgtttaaatccatccgtacagcgagcaggtcgctgtcgggggatatccgggaaacacaaaaatcactgcgcgagctgaacggtcacgcatcccgtattgagggattccgcaagaccagtgcacagctcgccgtgactggtcatgcacttgaaaaggcacggcaggaagccgaagcccttgccacacagtttaaaaacaccgaacgtccgacccgtgctcaggcgaaagtgctggaatccgcaaagcgtgcggcggaggacttacaggcgaaatataaccgcctgacagattccgttaaacgccagcagcgggaactggccgctgtgggaattaatacccgcaatcttgcacatgatgagcagggactgaaaaaccgtatcagtgaaaccaccgcacagcttaaccgtcagcgtgatgcgctggcgcgtgtcagtgcgcaacaggcaaaacttaacgcagtaaaacagcgttatcaggccggaaaggaactggccggaaatatggcctcagtgggcgctgccggtgtggggattgcggcggcgggaacgatggccggtgttaagctactgatgcccggttatgagtttgcgcagaaaaactcagaattgcaggccgtgctaggtgtggcaaaagactccgccgaaatggccgcactccgcaagcaggcgcgccagctcggcgacaataccgccgcctcggcagatgatgcagccggtgcgcagattattattgcgaaagccggtggggatgttgatgccattcaggcggcaacgccggtcacgctgaacatggcgctggcgaaccgccgcacgatggaagaaaacgccgccctgttgatggggatgaaatccgcctttcagctttcaaacgataaggtcgctcatatcggggatgttctctccatgacgatgaacaaaaccgccgccgattttgacggcatgagcgatgcgctgacctatgccgcacctgtggcaaaaaatgccggtgtcagcattgaagaaaccgccgcaatggtcggggcgctgcatgatgcaaaaattaccggttcaatggcggggacgggaagccgtgccgtgttaagccgcctgcaggcaccgacgggaaaagcatgggatgcactgaaagagcttggtgtgaaaacctcagacagcaagggaaacacccggccagtatttaccattctgaaagaaatgcaggccagttttgagaaaaaccggctcggtactgcccagcaggctgaatacatgaaaaccattttcggggaggaggccagctcagccgccgccgtgctgatgactgccgcctcaaccggaaagctggacaaactgaccgctgcgtttaaagcctcagacgggaagaccgccgagctggtaaatatcatgcaggacaacctcggcggtgactttaaggagtttcagtccgcttatgaggcggtggggacagacctgtttgaccagcaggaaggcgcactgcgtaagcttacgcagacggccacaaagtatgtgttaaaactcgacggctggatacagaaaaacaaatcactggcgtcaaccatcggcctcattgtcggtggcgcactggcgctgactggcatcatcggtgccattggtcttgtagcctggccggttatcaccggcattaatgccatcatcgcggcagcaggcgcaatgggggcaattttcacgacggttggcagtgctgttatgaccgccatcggggcgattagctggccggttgtggccgtggtggccgccattgtcgccggggcgttacttatccgtaaatactgggagcctgtcagcgcattctttggcggtgtggtggaagggctgaaagcggcatttgcgccggtgggggagctgttcacgccactgaaaccggtgtttgactggctgggcgaaaagttacaggctgcgtggcagtggtttaaaaacctgattgccccggtcaaagccactcaggacaccctgaacagttgccgtgacacgggtgtcatgttcgggcaggcactggctgacgcgctgatgctgccgcttaatgcgttcaacaaactgcgcagcggtattgactgggtactggaaaaactcggggttatcaacaaagagtcagacacacttgaccagaccgccgcaaggactcatgccgccacgtatggcaccggtggttatattccggcgaccagctcttatgcaggttatcaggcttatcagccggttacggcaccggctggccgctcttatgtggaccagagtaaaaacgaatatcacatcagcctgacgggtggtactgcgccggggacacagcttgaccgccagttacaggatgcgctcgaaaaatacgagcgggataaacgtgcgcgcgcccgtgccagcatgatgcatgacggttaa

SEQ ID NO: 121316 - DNA, 480 bp, Enterobacter cloacae
atgatgctcgcgttaggtatgtttgtttttatgcgccagacgctgccacaccagaccatgcagcgtgaatcagattatcgctggccgtcaaattcccgtatcggtaaacgggacgcttttcagtttctcggtgtgggtgaggaaaacatcacgctggccggtgtgctttatcccgaactgaccggcggaaagctgacgatgaccacgctcaggatgatggcagaggaaggccgggcgtggccgttgctggatggcaccggcatgatttacggcatgtatgtcatcagcagggtaagtgaaacagggagtattttctttgcagacggcacaccccggaaaattgattttacgctgtcgctcacccgcgttgatgaatcactggccgcgctttatggcgatatcggtaaacaggcggaatcgctcatcggtaaagctggcagtatggcgaccagattcacggggatgacgggggcgggataa

SEQ ID NO: 121317 - DNA, 1164 bp, Enterobacter cloacae
atgctggatgcactgacatttgatgcaggcagtacgctgacgccggattacatgctgatgctcgacagcagggatattaccggcaatatcagcgaccgtctgatgagcatgaccctgacggataaccggggctttgaggctgaccagcttgatattgaactgaacgatgccgacgggcaggtcgggctaccggttcgtggcgctgtcctgacggtgtatatcggctggaaaggttttgccctggtatgcaaagggaaattcaccgttgatgaggttgaacaccggggcgcgccggatgtggtcaccatccgcgcccggagtgcagattttcgcgggacgctcaattcccgccgggaaggctcctggcatgacaccacactcggtgcgattgttgaagcgatagcctcccgtaacaggctggaagccagtgtcgctccgtcactggccggaattaaaatcccgcacatcgaccagtcgcaggagtctgatgcgaaattcctgacccgtcttgcagaacgcaacggcggtgaggtgtcggtaaaaatgggaaaactgttgtttctcaaagcggggcagggggtgacggccagcggtaaaaaaatcccgcagattaccatcacccgcagcgacggcgaccgtcatcattttgcgattgctgaccgtggagcttacaccggcgtaacggcaaagtggttacacaccaaagacccgaagccgcaaaagcagaaggtaaaactgaaacgcaaaaagaaagaaaaacacctgcgcgcactggagcacccgaaagcgaaaccggtcacgcagaagaaagcgccaaaagtaccggaagcgcgcgaaggtgaatacatggccggtgaggctgacaacgtttttgccctgactacggtatatgccacgaaagcgcaggccatgcgcgccgctcaggcgaagtgggataaactgcaacggggtgtggcggagttctccatcagcctggctaccggtcgggcagatatttacacggaaacaccggttaaagtgtcaggctttaagcgcgtcatagacgagcaggactggacaatcactaaggtgacacattttctgaataatagcggcttcacgacgtccttagagcttgaggtcaggctttctgatgtggagtacgaaacagaagatgatgagtga

SEQ ID NO: 121318 - DNA, 219 bp, Enterobacter cloacae
atgtttcattgtcctttatgccagcatgccgcacatgcgcgtacaagccgctatatcactgacacgacaaaagagcgttatcaccagtgtcagaacgtgaattgcagcgccacgttcatcacttatgagtcggtacagcgatacatcgtgaagccgggagaagtccacgccgtaaggccacacccgttgccgtcagggcagcaaattatgtggatgtaa

SEQ ID NO: 121319 - DNA, 993 bp, Enterobacter cloacae
atgaataagttgaattacgccgaagcgtaccttgcagcggcgaaagcctggtacgaaggtgaacgagccaagagtggcgcgataaataccaatgtaatgaatgcaggactgatcgtctcacgtatgatggctgatggtatgcctatcactgacgaacgtctgtacagcgaaggaaaaagccaagtacgagggctcagtggtgccaccatatcaaagattctggaacaacatggcgaaacccgcgtttttacccgtgaaggtgggcgtacgtccagagggactattttccttgctgctgcatttcgggatgtacttaacaatactcaagtaaatggaaatgagcctgtcgacacaaaactagtttccaaccagctcgaagctttcttcactcaatgcgtgcgtctggactattttgacaaacagagaataacagtcgacctagactacaacaagccagttgcatctgtggtaagcgatattcttaaagcgtcggcggaacgttcagacaaacccactggagctgtgctacagcatcttattggagccaaactccaattgcgctttcccaatgttaaaatcggcagtgacagagccaatgcagctgacttacacactgaccgtgagggtgattttcaggtgggtactactgcattccacgtgaccaccgcgcctatggagaaattgatttcgcgctgtgtcgaaaacaaacgcgcaggctacaggccggtcatcctaactcttgaaagcaaagtcattgcagcacgccagatggctgataacgttggtatgtctgaacagatagccgtccaggcagccgaaactttcatcggtaacaatattgaagaaattgctatctatgacggcgataaaatccgtgagggtctcgcaagactgatacgtacgtacaacgtccgtatcaatactatcgagatagataaatcccttatgattgatgagcctcgttggatcgttaacttactgaccgactcctga

SEQ ID NO: 121320 - DNA, 1140 bp, Enterobacter cloacae
gtgaatattataccgattcggggcgatgccgaatggaccgctttggaattctttgctggtatcggcctggcgagagctgggatggagcaggcgggaatcaagactgtttggtctaatgactatgacctgaacaaaaaatcgatgtatgaaggccattggaaaactcacaagctttttctggcagacattcataccctgaatagcgaagaccttccaactgcagatgttgcctgggcctcttctccctgcactgatcttagtctggcgggtaagcgtgtcggcctgcggggaggccgggaatcgtccgccttcttcggttttactgatttgcttgcagggatgaatgaacgcaagcctgaagtgatcgtcctcgaaaatgtcacaggccttgcctcctcccataacagagaagatttgagggctgcggttaaagaatttaatgagttaggttatgcagttgacgcaatcactctggacgcccgacgttttgtgccacagtcccgaccaaggttattcctgataggagcaaaaaatcctattgatggaggcgaacaggattcgtgcctgagaccagactggctttcctggctgcataaagacgctgaagtacgcaccttcatgatgcctttacctaaagcacctgagctactaagccaagggttcactcttgagattgaggctatcccagacaccgaccctcggtggtggaatgctgataaagtttctctttttaaagagtccatggcatcggtacagcgtgaaaggttagaacattttgtcaatctagactgtacaactgcccgcacagcctatcgtagaactcgtaatggcattcccgtatgggaaatgagagcagaagacatttcaggatgtttacgcacggcacgtggcggttcctccaaacaggcggtggtgatcatgggtaggggcgcactcaaaatcaggtggatgaccggacttgagtatgcacgtctgatgggggctggctggtacacgctggaaaatttgcgcgactcacaaattcaatatggttttggggatgccgtcgctgttcctgttgttggctgggtcgcccggcacatgatcctccctcaccttgaggccgcaaaaaaagcgcagggaataaaagtgaatgaataa

SEQ ID NO: 121321 - DNA, 201 bp, Enterobacter cloacae
atgcagtgtttagatttaacatttgaagtcatcagcaataccaatgctaccgccaactatacgggtggttgctctggagaacgtagcgactgttgtactcgtgtatgcacacgagctggtaacgacgagcaaaactcagcgtcgaatttagatgcttgggaaaaatacttggaggttaacgccggcgttctccaatattaa

SEQ ID NO: 121322 - DNA, 1125 bp, Enterobacter cloacae
atggactccaaaatatataaaataaaagaaactgtagatattttcatatcgagtgaagataatactgataatgtcaaactcacattccatgtgatgacaacgcgtgatagattagaaataaaaactaataaaaatgtcgctcgatttattgccagccttgatggtataaaaactataaatgatatagttactgagatggggtccctacgctcaaaagatgtcgataaattaattacttttttactaaatcaacattttatttatgatgtaaataacatttgcgatattgaacctcgtttttcacgacaaattacattttgggacgattttgtccttgaacgacctggtgtagacactcaacatattttagagagcaaaaaggttgttttatttgggtgtggagctgttggagcaaaaattatagaaatacttgtccgcgcgggtgttaaaaatatagtcttggttgattataagtcccttacaaagtcaaatgcagcaaggcattgttattataactataagaaaatcggaaaaccaaaggttgatgtcctgtcagaatttttgagttggatcgatagtagagtaattataacaaaacattttgaaaaacttatacctactactaatctatcctctatcattcctgatgatacagatctgattattaatacttgtgatgagccttatataggtcatacttctttaaaacttggtcgatatgcacaagcaagagctattccgctgtatgtatcaggtggatttgatgcccacttaatgagttcaggagaattaatattccctccacatacaccctgtatagattgtgcccaaaatacattttcaaaggcattaaaaggatggaagcctgtatatagcatagtcaataatcctcaactggatctttcaaaatctgtctatgataattatattcccggagggcctggtggattagcaatgatgaatggtttttcagctaacctaagttgcatgaaattaattcacttcctgttggatgattcagcattttcatatgtaaatagtcggtatgaataccttccaaacgaaggcaaaatgactaattttgaattggtaaaacaaagtggatgcaaaatctgtaatgaataa

SEQ ID NO: 121323 - DNA, 1083 bp, Enterobacter cloacae
atgaataattttagactgcgacaaagtattggtatcgtcgtaaatgatgatactgtagagttttttaaatcaaatattagagaaagtataaaaataaaaatcagctttccaaatatagttgaactcttaaagatgtttgatgggcaaacttctcttcaagaaattgtagcaaattattcaggaatcgatattcaacaacttgaaaaattagctttgtttttgaatgaaaacaatataattatcgttcaagattgccaataccctgcagagcttgtcactgaacaatatagaatgatcaatacatttgaagactactgtcataccaccagtgaggttttagaatgtataattaatcttaaaaaatcaaaagtaatgattgtaggtattggagcagtcggtagtaatgtggcaacgtatcttgctcattgcaatgttggttcgataatttttgtggatcacgataatgtagatataagtaatttacatcgtcagttttattttgaagatgcaattaactctgataaaaatatggcgttactcaactctttgaaaaagatatctcctgatattaatattgacattatcaatgacattatcgatgatgatttttttaaaagaaatattctaccctctgatatagatttgataataaactgcgctgatgaacctaatgtggattacaccagtaaaataatcgccctctttagtatgactcataatatcccacatatagttggcgggggatataatcttcatcaaacccttatcggtcagacaattattccatttaagtcagcatgctttaattgttttaacctatttttgggaaaaataaatagcaaagaccttgtcaatgtgaagaaattgcaccgggtaaaacgaaaattaggttcattttcaccactatcaggtctggctgcaagccttgcaagcttggacgctataaaattacttgccgggaaagttgagcacttgcaacaagaaaataaaagggtcgaatttagtctcagaagtttatcttttaacgtccaagatgttccacgtgatcctgaatgtgattggtgtagaggaaagtatgaataa

SEQ ID NO: 121324 - DNA, 2127 bp, Enterobacter cloacae
atgaataagattatttttgagggaatcgctacccataatttaaaaaatttagatattactataccatttaatacaataaccgctatttatggccgttcgggcgcaggaaaaagttctttagcattttcatcaatttatcaattatgcaaagatgagtttgatgctgtagaaaacggttatttgaatgaaagtgattataaagttgtaaatttcagtgggttaattcccgctgttgcgataccacaaagaaacacaaataacaaccctcgttcaactatatattcatatctgaatatagctcaagctttgtcatctttaaaaatcaaaagaaacgtagcagtacctaattatgataaattaaaaataaacaattataaaaatgaatgtcctcactgcttaggccttggcgagatagttagtgtggatgaatctgaattaattaatgaaaaatgtagactaaatcaaaaaccatttttatgttggcggactggtgagttatctgattattatcaccaattacttatggtctattgtgataaaaataatataaaagtagatgatacttttgattcactatcacttgaaaagaaaaacctaatactatatggagaaagcgctgagaaattatcttttagatttaaacacaaaggaaaaacgaagcaaagaagagcgttttataaaggcgtaatgtcttttgctaattcgaatataggacggagccaaaaaaattcaaagtataaaaaggaagaaaattgctcattttgtaatggaagcagaattaaccaagaaacagcccaacttgatgttttaggatttacatttgatgattttttactatctcctatatctgaattatgtaataccctgaaaaaaactataggtgactcagtattaattagagtgttgtccgcaataaataatatgggattgggatatttaaatttgtctcgttcaattcccagtctttctgggggggaaatacaaaaacttattttcagcaggcttttaacatctaatacaacaggtattctgattgttatcgatgaaatatcatcccaaattaaccctgtcgattttgaagatatctttcaaaagttaaaaaaattatcagaaaaaaacacagttattttagtagagcactcgcagtatttcatagatcttgctgatcagcaaatccatgttggcaaatacgctggttcttctggtggggaaatttgtgaaaaagaaaaaattcagccgctaaggaacctcaatcccaaaaataatatatctgattactattattttgaagggcttaataaaaataacgtcattaatcaaaatatacgtatccctaaagagtgtgttactgttttttctggaatctccggatcggggaaatcatctttagctaaagctatttgtagtcttaccgattcaatttatataagccaaaaattatcatcatatacaggacgttctactgtcgcaactatcacggatttgaataaattaattgcagaatttttctccgatacaacaaaattagatatagagtattttcttccaaacaaacttggtggatgtaaagtttgtgaaggtaagggcgtgataaaatatgaaaggggttttgaaaaggatatctacatatcatgtcataaatgtgagggtaagctgtttgaccacaatatagatgaagtaaagtctcagattaatggtatgaatataatagatgtatatgatactgagttgaaagagttaagctctttttttaataacactaagattaatactattcttgaaactatcgattatcttggaatatcacatttgaaacttaatagaaaaacgcagtccctgtcaggtggtgaaatgcgtagaataaaattatgtgaaatactatctaagtccagaaaaacaaacaaaatattgtttattgatgaacctgtcgctggacttgattctgagacggcttcgaaggtgctgaattttatatatcaaaaatctaaattattcaatgcaattgtcattatagagcacaggcctgaggcagatgactatgccgactttaaagtactaattggccctttgtcaggaaaggaaggtgggagagttatagaacaaaagatcattgagtcagttagatga

SEQ ID NO: 121325 - DNA, 1230 bp, Enterobacter cloacae
atggcaaaaatcgctaagaagctcactgacactgaaatcaaaagcaccaaacctgccgagaaagaggttaacctttttgacggcgatggtttgctcctgcgaatcgctcccctggagaagggagggaagaaaaattggtatttcagatatgcagtgcctgtgaccaaaaagcgaactaaggtgagcttaggaacctatcctcaccttacacttgcgaaggcacgagctttacgtgatgaatacttgtcgttgcttgcaaatggtatagacccacaagttcataacacccagaaagccaatgccctgaaagatgcaacggaacatacatttcaaacagtagccaagaagtggcttgatgagaaagtcaaaacgtcaggcatctcccaggaccatgctaacgacatctggcgaagccttgaacgaaatattttccccggtctgggtaatgtgccaatcaatgagatccgtcccaagctcttaaaacagcatcttgatccaattgaacaacgaggagtactggaaactttgcgacggctcatttccaggttgaatgaaatcttccgttgggcggctacagaagagctgattgaatttaaccccgcagataatctgggccaacgtttcagtaagcctaaaaagcagaatatgcctgccctacccccctctgaactccctcgttttctggcagcactgaacaatgcatctgtccgtttagaaacaagactactgattgaatggcaacttctcacatgggttcgccccggtgaagctgtccgcgcaagatggtctgatatagatatggataacagcatgtggaacatcccggctgaatttatgaagatgaaaaaatctcataaggttccattaagcaaagaatctcttcggatacttaaatctatggaattaatcagtgggcaccgcgagtgggtatttcccagcataaaggctcccttaaaccatatgcatgaacaaacagccaacgcagcaattatccgtatgggttttggaggtgaacttgttgcccatggaatgcgatctattgcaagaacggcagcggaagagtcaggaaaattcaggacagatgcacttgaagcggcccttgcccactcaaaaaaagacgaaattatcgctgcatataatcgggcggaatatattaccgaacgagtagctctcatgcagtggtggggagattatgtccaggcgcaacagcttaaaatttttgctgcctga

SEQ ID NO: 121326 - DNA, 1023 bp, Enterobacter cloacae
atggcaaaaccggactggggagagcttcagcaacggttcctgtccgaacatgccgcaaccggcgtatcaccaaaggaatggtgtgaagcgcagggactgaactacgctaccgcccgacgatatatcaaaaaaacttctgcgcaaaaacctgcgcagaaaaaaatgcgcactgcgcagaaagataaaagcgcaaatgaactggtggatgatgatggacttactgctcagcagtgcttatttgtcgcggagtatctgaaggacaacaacgccaccgctgccgctgcacgtgctggttatagtgacccaaactacggccgtcagctcataacgaatcctaacgttgcgcaggccattgcgcatcagcagaaagcctccattgcgcgcacgcttggcggtgccgatgaagtcctcgcgcagatttggcagctcgccaccttcgatgcaaaccagctttcacagtatcgtcgcggcgcgtgtcgttactgctggggattcggtcaccagtaccagtggcgcgatatggtggagttcgaagagaaacgcctcgaagcgcttgaacggaaaagtcgcgagcccgtcgatgtaggcggctatggctacgatcacaccagagaggctaaccctggctgtccgcgctgtaacggcgatggtattggtcaaccgtatttccctgatacgcgaaagctcccggcaacttctcggctcgcttactccggcgtaaaagtcggtttagacaaaacagtaaataccgaaggaaaccagtccatttcaggagagaaaaacttcactggccctttgaaaattaccgcagcatatccgcaaattactttatgggcgactgcccagccaaacggcacttatggtcgggtagttacattcggtagtgagggtaacaaaaccttcattgctgcacggcaatgggaaggcggaaataacacttgcgtgacctatctgcccacttttaaggacggttatttggtaatccccccatttttaaccgggcagataagtagaatcagataa

SEQ ID NO: 121327 - DNA, 630 bp, Enterobacter cloacae
atgaaccaatcacaatttcagaaggcggctggtatcagcgccgggttagctgcacgctggtttccgcatatcgacgccgctatgaaggaatacggcataaccgcaccgcttgatcaggcgatgtttattgcccagatggggcatgaaagcaccagatttacccgactggtggagaacctgaattacgcggttgaaaacctggtaccgacgttcggcagccaccgcatcactcaacagcaatccgccgcacttggcagaacggcaacgcaaccggcaaaccagaaagcgatcgccaatctggtatacggtggtgagtggggaaaagaacaccttggcaatcaggtcgctggtgatggctggaaatatcgcggtcgtgggctgaaacagattaccggcctgagcaactatcgcagttgtggccaggcgttgaaactggaccttgttactcatccggagctgcttgaaaaggatgaatacgccgcgcgctctgccgcatggttctatgcctcccgcggttgccttcttcattccggcgacattgagcgcgtgacactgttaatcaatggcggccgcaacgggctggataaacgccgtgcgctgtttaatctggcgaaatcagttttggtgtga

SEQ ID NO: 121328 - DNA, 282 bp, Enterobacter cloacae
gtggtactaaatgacccaacagcaactatcaacgcgctgctctgcgccggagttgtaattactctgatgttttaccgccgtggtgattcgcggcatcggccatggatttcgcgtttagcctggctgattaccgtcacttacagcgctgtaccgctggcgtacctgtgtgggatctacccgcattcatcatgggccaccattgcggccaatatcatattcctttccgtgctggtggccgtcaaaggcaacgttgcacgtctggttgatcatctgaggcactaa

SEQ ID NO: 121329 - DNA, 294 bp, Enterobacter cloacae
atgggggtgagcgtggctatttatcgcagcaaaaaatggctcgccgccgtcgggcagatcgagcattgtgttctttgcggagcatgggggacgcaggtggcacaccggaacgaagggaaaggcatgggattaaaaaccgatgactgtgcgacagctgcgctctgcgtttgctgtcatgacagcattgataacgggaataagctgaacagggaggagcgtcggcagcttatggaccgcgcgattgttttgacagtgattgaagttgcccgccgcgggctggtggtgcccgcatga

SEQ ID NO: 121330 - DNA, 381 bp, Enterobacter cloacae
atggataagaaaaccgcatcgctgggcttttctgctctgtttgttgcgagtgtcgcttttgctgaaactacaagtaactgggttgaggttaccacagctgatgatggcgttttttcagcaaaagcagggacatacaggaatgttaaaggtgattcatctgccttgttcatgtatcaaacaaaaaataaaaaagtagagtattacaaagttagtattaaagatgccgactgcgatagtggatatggagagttaaaactcttctatatggatgggaagttagctttcaaaggtgattatgttgccgaagggaacagcgtcggcgctggtattggtgattttatgtgtgccgttagaggtgctgctaactcacaaaaacgttaa

SEQ ID NO: 121331 - DNA, 420 bp, Enterobacter cloacae
atgattaccgagaaagacaacgttttttattgtgactgcggattctcctttgagagggggcgcagcggtgcgcatagctgtgaacttggtttgcgtaagaaacttgccgagtcagaagccaagctcgctgcgctggctgcggagaatgcggggctgaaaaaagtcccggcaactgacagcgaaacaatgctgttggctttggacgcattcaacacgcacggctccatgaggcctgatgtgggcttacagcaggcgataaatgtcgtaatgcaacgtagagaaaccccggccaccgacactttcctagctgaagttcgggcgcaagcagtggagatgttcgccaaagagatgcatgcagatatcagcggtgatgatgcccgcgagttcgccgcccaacttcgcaaaggagcagcatcatga

SEQ ID NO: 121332 - DNA, 357 bp, Enterobacter cloacae
atgagcaaatcattaaatacacgctgtatccgccgctgggaagttgagttcaaagggctttgtgattcaaaggtgagtccgtggtggcgtaagcgcgatctccacggctatatccgtgaatgcgcccttacaactgctgactgcatggttgagaacctggcctataacaacgcaatgcatgatttttttgctgaaaacggtgatgaccgtggctggtctccagagttctcggtttggtacgacagcagccgtcgtgagcagtataggaaagaagcactcagctacctcaatgaagaggccagcaacgacgagatcgacgaagagattcagaacgagctggaggcctggtatgactga

SEQ ID NO: 121333 - DNA, 642 bp, Enterobacter cloacae
atgactgagcgcggaatgatttttaacagtgaaatggtgcgcgccatcctcgacggccgaaagatacagacgcgcaggattattaaggactgcacggtcggaagagacccaatttcaaaattcattcagatcgggaagaagtttatcggctgttacccggaagatgttcccgaactaatcagggagtgctgcccgtacggagtaccaggcgatcgcatatgggtgcgggagaccttccaggggcctctctttgatttcgagcaaatggaagcctatcaggaagattcttcgaaattcaaaaagccagaattttgtgtctacaaagctgatggaaagcgagctcctgagttttttgacgctgacgacaatctgcattgtggctggcgcccgtcaatacacatgccgcgctgggcgtcccgcatcacgctggagattaccggcgttcgggtcgagcagctgaacgatatcagtgaggaagacgcacgttcggagggaatttctggctcctcggtccgtgacgtaaaagaggcttacgcagcgttatggcggtctatctacggttctgacagctggcgcgctaacccatgggtctgggtgatcaagtttaagcgtatcgaaggagatggccatgcgactgattaa

SEQ ID NO: 121334 - DNA, 468 bp, Enterobacter cloacae
atgggcttcaaaataagtcgctcccaagcgctaatcgaagttattactcagtttccaatcactgagctccctatacaagaattcgaagagtataagcgggaatgcatcgattatgatgacgttcccgctcctcccatccaaattcaactagctcatcctgctcacatagaaactattggacgtgacaagctcatggagcgtccggttgaggctaggggtgaagaactacatcatgttcatatctggcaggaaggttgttgctgggaagatggtgatgggcttctagttcagtgggcttcaacaagcgatagttacgttgtctattcttactttattgacagagataaggaccatcacttctatgtcattgactactgcaacgacaaagctcacgcgttgattgaagacaagcaacaagtcgcagagtggacccgccaagcccaagagttcagggtcaaaaatatttaa

SEQ ID NO: 121335 - DNA, 147 bp, Enterobacter cloacae
atgacacaaaaacgcgaaattagaaccagtgataagccgcgccagactgtgcgtcgctcagctgagtataaggcgcgtctgagtgcagcttctgccatgctggctgataaaatggacgagaagcgtattgcatgggcttcaaaataa

SEQ ID NO: 121336 - DNA, 747 bp, Enterobacter cloacae; identical to SEQ ID NO: 116806

SEQ ID NO: 121337 - DNA, 558 bp, Enterobacter cloacae
atgatgaataaagccacaactctctcagctaatattacaacacgctctaactggcactggcaggataatatctggacgctgggcctttatggtacagccgtcggagcgggaacactgttccttcccgtggaaatcggcacccgtggtccggttatttttctggttatgctcctgctggggctgccgttatccctgatcccccatttactcctttgtcgtgtgtatatgcgtgaagagaagactgaaaacggcacgttgccgatcttcggctctttcttcagcggaaggggtgaaaagctgatcaccctgttctattgtgtgaccttcttcccggtaaccctggtttacggggtggcgctgattaatgcgctgagtaatttactggtggagcatctgcatattaccgccatcagccgtgggccattgtcgtttatcgtggttgctgcgctgtatgtggtgcttagcaagggccgggacagagtcgtggccattatgagcgcactggcgctgccgttcgcggcatctgtactgctgatcgccgtatcacttatcccgtga

SEQ ID NO: 121338 - DNA, 960 bp, Enterobacter cloacae
gtggactccatattttctattggcatccagtcattatgggacgaattgcgccacatgccagtcggaggagtctggtgggttaatacggatcgtaatgaagatgccatcagtctggtaaaccagacgatagcggcgcaggggaaggattcccgcgtggccgtcattacgatgggcgaagagccgaagtcaatcatcaggctcgacagtgaccgtgggccccagacagtacgattattttccatgcctgcggaggctgacagtctatactttttaccccgcgatattcagtgttctattgttcccgaacactatttactgattctaaaatgctctaataacggcctgcaaaatatcccgtctgaaaaactgctgaaatggctggaaagaatcaacagatgggcaaaaaatcaaaattgcaccttattggttgttaacccaggcagtaataatgacaagcttttttcacttttaatgagtgaataccgttccctctatggcctggccagtattcgtgtccagaccgacagccatctttacgacgtggctttctggtgcaatgaaaaaggggtgagctcccgacaacaacttaccctcaaacatgtcggggatgagtggcatcttgctcaacaagaagaaacagtagttcagccacgcagtgatgaaaaacgcgttctgagccatattgcggtactggaaggtgcgcctgcactgtctgagcactggtcactgttcgataccaatgaagccttatttgatgaggcgcgcaccacgcaggcggcgaccattatcttctcgttgatccagaataaccaaatcgaaacgctggcaaggcacatacacacattacgtcgccagcgcggcagtgcgttaaaaattgtggtgcgtgaaaataataccagcctgcgcgccaccgatgagcgcttattactgggctgcggcgcgaatatggtcatcccgtag

SEQ ID NO: 121339 - DNA, 441 bp, Enterobacter cloacae
atgaaaaaacaaaatcactcaaccatgacaagttacctctctaaaacaaaaaagaatacagatctctaccgtttgtataatccacacttctcagtattctgtaaaaatagtactgaagatcatgatttttatcttaattatttttccagacatatggtgacggaaagaaacattctgaccatatttgctatccatacctttttctcttatggcatggacaaaaaagagaccataaaagcctttactcgtttccttaaagaggagaataacgacgttttttatcagtcattttcttttcgtggctgcaatatcatttacacaaacaaaaaaggagaagtgaaagagatctcatggttttccttttcacggatctatgacgagatcgttaagataaaagaatatgaatacaacaatgacacctggcacaaaatggccgcttaa

SEQ ID NO: 121340 - DNA, 954 bp, Enterobacter cloacae
atgagtaactatacagaagataatttatttgacagtaaatctaaaaaagacgtccagaattgcattgctgcaggcattgacattaacacactaaatgaacacggtgaaaacgcccttttcggttgcgacagtatcggagctttaaaagccatgattgaagcaggcatagcgctgaaccatacagattgttacggtaataatgccctgtttagcagaaaaagcccacgggcactagggctgttgataaaatcaggtattaacgttcaccacaaaaataataaaggccagtcctgtcttcactggcagcactacgacatagattgtgcggaactcctcattaacgcgggcgttgatatccacagcacagataacgaaggacaaacgcttctttacaacctccacgatcatgacgtctttgattactgggtaaataaagggggtgacataaaccacagagattataatggcaaagcggtgctggaccttccgactgacgacgagtggtggatatatgatttcagtattaatgccctcaaacgccatgttgatagaatagacagcacaccagttttatttaaacatatttcaactgaggcgttgcctctgattgctttgcttcatgaaaaagggcgtaatatccttatcgctgaacactgtaccttcgcattatatgtcaaaaacatgaagtccttctttacctcactgaaaaaatataccgatatcagtcatgttcagttttataattgttatcatgacggacatattggtgtctatactggtattgagacagtaaaatggtttattcgaaatggtatcagagtggacgacgatatactgagacagcgtgctgactctgataaaatttttgactatataaccggaagagagaaaaaagattttctcaaaatcatgaaaccagaaatcacccatgcgccgaagagaaaaagaatgtga

SEQ ID NO: 121341 - DNA, 408 bp, Enterobacter cloacae
atgaataatgatataaacaatcataatgacataacaaggttatcaaggcgtgggaaattccatactgacaaacttccccctgatgaaatacgaagccactgcgtcagtgtcagattaaatgaagaagaattaattattctcgacagtaaaagaggccagtataaaaaaggggaatggctaagaatggcttccctgaacaaactcccaccggttctgcccgaaataaatcgcgaagcatggattacactcggcagcctttctcaggatttaaattacctgctgaatcatctcgacaagaaaagccctgacagcgaactaacccgtacagaactctttgccctgcgcagacaaatcaaaactctcagggatcaccttattccttcaacatttctggagccagaccgatga

SEQ ID NO: 121342 - DNA, 1188 bp, Enterobacter cloacae
atgaaaggcatgcagaaaataaaaaggggtaaacagtttgcgggcgtggtgctttacagccttaaatctggttcacaccacaaaattacgccttacgtcatcggtggtaatatgaccggaagttcggtggctgagcttatcagtgagtttgaaagttctaaacaattgcgtcccgatgtcgccaaacccgtctggcataattcacttcgcctgccaaagggagaagcactgtcagccagacagtgggcggcatttgccgacgattatatgacctggatggggttcactgaaacgcaccttcgctgttatatccttcacgacgatgccgacgggcagcatatccatatcattgcaagtcgcattaacatggtcggtggaaagctgtacctggggaaaaatgaaaatctcatcagcacccgcattatcagcgaactggagcgaatacacggactcactgaaacaacacctgcaaccagtagtcgccctcaggctaaaagaaaaccctcacgcaatgagctgatgatggcagaacgaacagcagttccctgcactaagtctcagttgcagaccctgattgataatgtcttaacgcatcgtcccgatttactgacttttatcgacatgctggaacagaaaggtgtgacctgtaaacccaatatcgcgtcgaccggaaaaatgaatggattttcatttcagtaccagggcattgcctttaaagcgtctcagcttggaaaaaagtatggctggtcttctctgcaaacacagattgattttacaccagagcacctggctttactgaaaaaagagcaacagcagactgtgccagtgccatcatgcgagcctgaagaacaggctgcaaaccgggaaacgattctggagaaaatccttcagcttgaagaaaaaattcgcctggaacgacaacaggaaacagtgagagtcattcaactcaggagcaaactgcacaatacagctcgtcagataccccgccagcgtcgtctgcattcgtggcttgtattgctcggccatattgtggcacttctcaggcgcaggggcatgtctctgttacatgccactgcacatcctttccaccaaatcctgcacctgcatcttctgacaccctgtcattccatgacaacaaatcccattaaagaacaattagttaaaaataacccacatcctgcaccataa

SEQ ID NO: 121343 - DNA, 273 bp, Enterobacter cloacae
atggataataaaacgattagctgccccttctgctttacacaaagcccgcacggcgtgcggatttgcaaaggttgccatgcaaaagtggcctatggtgaaagtccgctcagtgtggcattcctgtttcaattcgtggcattcggtctcgcctggttagtattttcattgaccggcagcactcctgtctcagtcattacattttttgccagcgtcattattctgatctgcataattaaaaagaaatatgcagacagagttgtttttatacggtga

SEQ ID NO: 121344 - DNA, 387 bp, Enterobacter cloacae
atgaatagattcatgatttctatgttttttatttctgctttccttatttctggctgttcaatatcaggcaaccagcatctaaaaaaagaaacatcacaaagtctgcagtcgaaaattatcaaaaataaaacgacgaaatcagaaatcattaccgcattaggtgagcccgaaaccagaactacacttgatagtggcaatgaagaatggacttattccatggataacaatcagtttgatgccaccacattcattccagtggtcgggttgctaacaggcggttcgcagacgcaggccaaaacgctggaaatcgaatttaaaggcgaaacggtcagcaagtggacgttctctgaaaacaacagcaagatgaaaaccggtcttattcaataa

SEQ ID NO: 121345 - DNA, 321 bp, Enterobacter cloacae
atgaaaacatatgcatttaccacactcattgcgtccatttttttgctgagtggctgtaccggtgaaccgtctgagcaggatatttacactgcgatgaataaggttgtggagcagacgaatgccatcgttaaatccatagcgagaaacgatatcacgcctgacatgctgcgaacgttaaaatcagtcaaaaaacacgactgcgaaaaactatcggataaaagctataaatgcaatgtaacagctgttgtcgataacgaaaaacgtacagcggctgtcacgctggtcaaaacggatgatggctggcaggtcgttgataagtaa

SEQ ID NO: 121346 - DNA, 426 bp, Enterobacter cloacae
atgagtaatatttgtgtttcatctcaagaagaaaagtttatatttgttgttgataaatatataacacaccatcgcgacaatgttaataacaataatttttacagaaaactttatgtgcttttcgctggataccatctgaagtatttttattcacgggcgcaatatcgcaattcgtgttatcacgttgataatatcatgcagatgtttatgggggttgtttctaccctgaagacccctctgctcaggcaactcgcaaacagtgacacattgctgcattgcctgaattcgctcgtgaattatatttcaggcaatctggatgaagcagagcacatttatgctgatttactggcacagtatgaaaagaaacgcattgcacgttctctgacttatacaccaccaggatccgtggtcaggaaaaggctgtga

SEQ ID NO: 121347 - DNA, 564 bp, Enterobacter cloacae
atgtcaatcacaagcgttgtattaactaaagaacaaaagtccattattgcagaagcgttagaggttatgcccgaagatctggaagaaataaagattaaagcaagcagttataaaaaaacgtccttcagggacgatttctcaatgatctttaaaggtaatatggcgacactcgccagaatggatttgacgcccacagcattcagaattgttctttatctcttctcagccattgattatggcaatattattcctgatttttcacagtctcgtactgcgagagaacttgggctaaataaatctaacgtctcacgtgcattcagagaattatttgagagaaaaatactgatccgtgacaccatagataatcaggtttaccttaattctaatttgtgcgtaaaaggtattccccgtcgtttcaatgaagatctgatggataaattcagaaaatccagactggaaactgaagactttgcaaattcattcaacttttatcgtgcagggagtaaaactaagccagttaaaaattccagaaaaagataccctgcagacggcattccattttaa

SEQ ID NO: 121348 - DNA, 276 bp, Enterobacter cloacae
atgaaacaaagactccccacttacctttaccagaataaattatcagataaacaacgggatctgaatgatactgttcactatgtattctggttgctcacattaatcgcttcgtatacgccagataaaagcattgtttacctcagttttcatcgtgctatgtccattacacagcaggaagggatacctattatacccgccagattttatcaggccatcgataaattgattgatatgaagattattatgactactaaatttaaatatcagtatcgttaa

SEQ ID NO: 121349 - DNA, 276 bp, Enterobacter cloacae
atgaataattcaatcagagtaccggaagataaagattttgtatgtgcatttgtaacttcaccgaatagcttgtatgaggctcttgaagcctattgtaattatgtagatccagtcgaagagatagcgtttgagcacgtccttctttatgtgttgtgttctatactggtcgagggtggtacagatgttaccattaatgatgagttacaaatgtgtattgagcacattgtcaatgaaaaaaatagtatcagaaataataatgcagataaaaagatgtaa

SEQ ID NO: 121350 - DNA, 207 bp, Enterobacter cloacae
atgaataatcaaaacacccgactcattcgcttgccagaagttatgaacaaaactggctatggcaaagcttggatttatcgcttgatcaatgaaggcttatttccaaaaccgataaaaattggcacgcgtgccattgcttttattgaaagtgaaatcgacgaatggatagtgtctgctattgaacgttcacgtaaaaatgcagcctga

SEQ ID NO: 121351 - DNA, 855 bp, Enterobacter cloacae
ttgaaaaactggtcaccagagaatactaaagaaatcaaagcctggcttgacatagataactatcgcaagctcgaacacatcagtctgaatgccttgtattacgaactctgggcaagagcacttctgtacaagccagggcctactgacgaagaaaaaaaaggattatgggtgtacatgactgaaattttcagtggtaacccccatcttttcaaaggaaagcaactcgattatccaacagttcacgacactctttacagccctccgcacctttttattactgatatcacccggcttgctgaacttagtgtgatggcccttagtgtgaatctcttcacctgggagaaaggaaacgatgaatattgtgtgaatacaccccaccacgaagcttatgtatcacaactcttgtctcccttatgtgagaaaacggtgttgctggaaatcgatctcggtagtggtacagatgatgaaatagccgaatcgataaaagcggctctgccacaatggaggttggtgaaaggggtggaagttaaggaaaccggtatcgtccgtttcggctatggaaccattaaaaaaatcataaattacaggttgattgcgatgctggacatcttactctgggcaacaaggaaagaactaaggatctcagatgatcgcctctcccggcttctttatactgatgaagatgaagaaactactacccgtttagggtatcacattaaagactcggatcgaccgcttgccatgaaagctgcaacaatagacttcattaaacagttcaattttttcatgaaccgaaacccccacctgaaaaacatgagagtttcagatgtaatgaaactctctgattctaactga

SEQ ID NO: 121352 - DNA, 2145 bp, Enterobacter cloacae
atggattggttaactccattatcaactgactggtttatgaacaactttgtagacaaataccttaatccagaagcgataggcgctttctctggaataatggcgttgtttcttcattttcttttagttttaggtggagtattagcagcttatgttttgattagtggaactatggtcacggctcatgatggtgaaatgttaggtaaaaaatggtcttctatgtggcttcccatcagaacagctttaggaacggctatgcttcttcctatgccaacaggcttttgtgccattcatatggtgatttactcattgataaaaactggaattggtttagcaggaacaatgatcccaatcgctattgcgttcataaccatcttttttgattactcaagtgtaagctctaatcttgaaataaggaaacttgctaaagatacacttttaggtgcgacgtgcgttaaaatctataacgaagaaacagcaagagagtttgctcaatcatctaagtatttcagaggtaatattcaatatttcagcgttcaaaacttcgagtcaaaaagcgatggaaaaagaataataggttataactttggtggtttaaaagacgactggagcactggtgataaatctcaaatgtgcggctttcttagattagatgtatcaagctctggtgaacaacaaaatgctcttgcttctggttctggatataaacctttagttgatgttgcttcgatacaaaatgcggttcaacaagctcaggctaaagcacttaataaaatggttttagatgcgattgcttactcagagactttagctaatcctgatcctaccaacacgaaagcagtaaatgataagattgaagaaatgtcattggaatataaaaaatcaatgaatgaagctggaaaattagcaatggctcaagctattaaaattgactctatcgcagatataacggaaaaaggctgggcattttttggtgcttactacatgaaaattgttcaggcgataaatggaactaacgcagcaatgaatagtattccagcttcttctggtcaagcttctgaacgtttaaattatttagctgatagatttgaacctcgctttagcaaagtcaaaactttaataaatggcactgacaagcttaacgctgatactactaacatagcgggtgaagacagttcattatttacaagcttattaagaggagcaaactcaaacggtggttggttcatgggggatggtaaagtagatcaattgttatctattacacagcaagtaaacgtaggtaatcacgttcttaatggtgtagcggcaatggggataggcgcaagctctgtttcattgttagcgttgatacctaaactctcagatgtgttgatagcagcaggtactgtgatcgggccgttcttctcgttcttgatgatcgtaggcttgataaacggcatcatgcttgcttacgtaatccctatgataccttacatcatctggatggggattgtgctgtcatacatggctacgtgtatagaagcttatgtagccagccctatgtgggttttagctcacttagcgccggatgctgatgacgttgtaggtaaacaaggacagggctatatgcttacactggtgttaacactaaagccggggttagcaatatttggtttccttgcttctttcgtgatgatgtgtgcgggggctgccctcataaacgcaacgttcttgatagctacaagttttgttgactcaggttggttgggtattacttactcaatagcaatgattgctgtttatatgtgtttaaacttaaacaatacgatgaacgctacaagagttatgtctactcttcccgacactgttttagaatggataggcgcaagaggaacttcattaagcggtaaagtaatgggcggttcagaagaagctcttagtaatgcgaaaagcaatactactaatactgttgaaagagcagggcaagctacagcaagttctatgtcaaacatggcaagaaaccgtgagaaaaaaagagatattgaacctaaaggcggcaatgaaggtaatattggtaaaggtagtaatcaagaggcgactaataacacgccagcagataaaggaaatcatggtcagtctataacagatttaaacccaaaggaataa

SEQ ID NO: 121353 - DNA, 600 bp, Enterobacter cloacae
atgaaagataaagaatttgaagataaggtaaaaaacactgctaaaaatattttaaagtcatacactaccgttaatccaaaaaagattgcgaataatttatatgactcggcatctaatacggttaaagttcctatagaaacagctcgttctaatatagagctttttaataggtttaaagggaataatgataagaaactatcttatgaagaattgtatagtctaaagaacgctgatgaaaatttaagacaaaaaaattatacaaacttctctatagcttctttagtgatgtttgtttttatgcttggcgtagctataatgggtggttataaaatctataccggaattgatacagcagcaaaggttttatcatttatgtcatttggatcgggcgtattcttatcatttgctgtttattttagatgtgtagtaagagcctattgtttaaaatacgcaacagttgataacaagcttaatgctttaaaagggattgataacattttacccaatccattctatgatgttagagctacaacaaacagtgaagataaaccaatagttgctttccttgaaacaaaagaagagcaagaaagaaataaataa

SEQ ID NO: 121354 - DNA, 246 bp, Enterobacter cloacae
atgacattacttagcactttcaactacatcccagcttttattgttggtttagtaatgatttttttatctgttaaagtagttcttttaccaatggctgatttaatcactaaaatcagagacaaaacaactgatgttgctatttaccctcttagtgtttttatgggtgttccggctatcgcagtcttttttgtagctgtatcttttacagtaagcatgtttgcttacatggttggattagttcactaa

SEQ ID NO: 121355 - DNA, 1104 bp, Enterobacter cloacae
atgagtaaagataacgatttaaatgattttgaacaggctttttcaatggatgctccaatgcctgaattccctgattatgagattgtggccgacaacgtagccccagctgcagctccggttaagaagccagaacctgaaccagaagttaaccttgagcatgacatgatggaagtaaaaagccgtatagatagctttaaagacgtgctcaatatcggtgacaagttcggtatgagtgatgagcaaaggaagatgattaagaaccagctttcagaactggaactcacttacgttaagctacagaagacgcttaaccttgaagagccagctcctaccgcttccctgatagaacctaagaaaccagaagaggccaaaccaaccgttccggctgctgttgtctccgctgctgatagcataccagctcaagacttcactgatctggacaagtttacccaaatgaagaatgaagaggctaaacatcctgttaaggccaagagtcttaaagaccgtatcaagtctgttcgttctaacatccgtgaagaagaagagggggagatcaagaaggataacagacctcaatatgtgaaagacttcgaaaaaaatctcatgcctgaaaccgagttgaatgttaaaaccaacggcagaagccgatatttaaccaacgatgaattaaaaaatctttttggtgataactatcttcattcaagagataacattgaggaaggaaaacttacttcaagaactcactatttcggggatggtcttttaattaaagaaacagaagacgctatagctattcgtggtagacgtaaagctaatgatattgctgttgatttgattgatgtggctaaacaaaaaggatggaacagtattgttttaactaagggtaatcctgtctttatggaacaggcttatataagtgctataaaaaatggtatcagagttgaagctacatctcttaaacaagaagaagaatttcagatgatacacaaagcctatgatttagatcgctacatgaagtttggcgaaccaaaaaaagaagagattaaaaaggaagaacttatgcctgagtatcaggttaaacgtggtagaagtttaaaaatgtaa

SEQ ID NO: 121356 - DNA, 438 bp, Enterobacter cloacae
atggatgagttttctttagatacgttaaaatcatatatagacagaaatcaaacttcactattctatgattatctcactaagcaccaattagacactaatatgaatattttgtcttggtgtcttttgtctattttttcaaagtcagaaaatgaaaaccatcaatactataatttgttctgtttagtagtggggttgttcaaagatgttaataagccaataaatggaagactgccattagaaatagcttactcaattaataacattaagttttatatccatcttcttttgaatggagcagatccccaaaagaaaaatagcaaatacaaatccacgtatgaaataataatcaaagatgagaatgaaaagtttctttcctatataatgcggtatgagcaaagtctgattaatgaaatacagaaaagaaaaggcactcattga

SEQ ID NO: 121357 - DNA, 918 bp, Enterobacter cloacae
atgactgtatctatccaaaacaccccatcttcaagcctaaagccactaaagcccctttaccgttgggctggcggcaaatctaagctactcaaaagctacaatccacatttaccagatttgaacagcgtaagcgcatacgtagagccgttcttcggggctggcgctctctttgcgtctgttaagtctacatacaaccagatccccacaatcatcaacgacattaaccctgagctggtaagtctactcaataccatcaaacacgattttgaagcgttctgtatcgagctgcaggagctggaagcggcgtatctgtctatacgctctcatgaagtcaggaactaccgtttctatcagcgtagagaacagtattggaaagaacagattggtagtgtccgggcatcggccttactcctgtttttgatgagcaccggctttaacgggatatggcaggtaaacaagaagacaggccgctatggaacaggcgcaggaatccttaaccataagagcagtctgtttgattactcactcctgaacgagtggcacagagctttacaggcaacgtctatccattgcggttcttatgctgatctcgatgttccagcaggggcttttgtctactgtgatccgccttacagggatagctacgccgattatggccatgcattcactgatgaagaccacaaagaccttatcgaatggtgtcggcagcttcaggagcggggctgtgttgtgtggttagccaacagagaggcaaatgatagcttctttgaagaaaacgcttctgatgcttctgtattgcggtttgacattacctacacagccggaagaaaaaagaaaacggaaaacggacatgaagcagtaaaagctaaggatttgctgatgatttggaataataaaaacatgattaaagccgcttaa

SEQ ID NO: 121358 - DNA, 456 bp, Enterobacter cloacae; identical to SEQ ID NO: 104033

SEQ ID NO: 121359 - DNA, 294 bp, Enterobacter cloacae
atgagaaagaagtttagacctgtggattttcatacaagcaatatgggaaataactatataactttagaatgtatgatgtcagcaccatttcatgaacattcaccagagcttttcgctaaatgtttagcagaagtccccaaaataaacaggctacttattgatagacgtaagtgtgagaataaggaacattacgaaaaggttttgatggttgctgatatgtgtttatcaatgatgatgattgagcgccgtatgggtatcgttaacgaagataatggttattttaatcaaaaataa

SEQ ID NO: 121360 - DNA, 381 bp, Enterobacter cloacae
atggaatacatgaacgtagtgagaagtgattttgaagagttcgcaaaagaaaacgtagaaggttatgaacatagtaaaacattaatgatggctgaatatgtatcaaacaaggattatcctcaacttgaatatgttccatttttttcatttgaaggtagtaagttgttgtttacttataatcaactggaagaaaacagaataaataaagctgtattaaagtatgctgttaacctttgctttaatagtgatatgagtaataaatatggagatattgaggctttaagtaatacgtattccgctgtttattactgtttactcgataacatgtataagacattaaagaaaaaagacattgagagtgttttatattggcttgattaa

SEQ ID NO: 121361 - DNA, 432 bp, Enterobacter cloacae
atgaaagacaacaaagaactaaaaatagcaactataacaactaatatgttagcaaaatacatttatgaaggaataattaaacttgatgatgagagtttagcaaagtatgaagatttagctgagtttcaatctcataaagttgatatagatgtttatgatgttttagaggatatagaagcatatctaaatgacgttatagatttattagaaacagatgttttttgtgaaaatattctaactaactttaatgggaaaaatcatgaatatgaagcaatccattttgatacagaagaagagttaaaagaatttcttttagaagaagatctatttatcattaataactctttaatcattaactctgtttctgatgatttagatgcttgcacacaagttttagaaatgcttgaagctaataaaatccataacgattaa

SEQ ID NO: 121362 - DNA, 567 bp, Enterobacter cloacae
atgagtattattttaaacaaagtaaaagcatttacaaacacaaaagaaaacagaattgaaaaacttttattcagcaatgatattgatttagtgaaaagagtattgataactcatcctgatattaacttaaactttataaacgatgaaggtaaaacagctttgtttggtgctgactaccttaaagcagaagctttaataaatgctggcatcaatataaatgctaaagataaagacggcaatacagcgttgttcttctctgattatatgacttcaaatcttcttttaaacaaaggggctaatgtcaatcatagaaacaacattggtatgacagcgattttcagagcagacagatcaaaagcaagcttgcttataaaggctggagcaagagttaacttcaaatcccacgtagacaacactacagcccttcaaatggcttacataagacgtgatgaggctgttatgaccgttctaatcgaagcaggggcagacatacaccacaattggagaggctactcagctcaagctaaagcattcatgacaaccattaacgaaagacaagcagcataa

SEQ ID NO: 121363 - DNA, 387 bp, Enterobacter cloacae
atgaaaaataaagttgttaaaacaaaaaaagatgatgattcctataatgaactgtttgaaacgcttataatgttaatactggcattggttttggtatcttttattgaaagcaccgaaaacaaaatgagcaccgaagaaattagtttatataacctacaaactgatgttatgaatatcatgctttatgatacaccaataccaataataaaatcattaacagaagatcaaaaatcaaagctgattattataaacaggaatatagataattgtatggaaagaaagcaacaattaggtgcttcaggattatcagaatgctataaaaaaaatgaattcttatttaatgaacttaaggttggtttttcagatagattgatttttaataattaa

SEQ ID NO: 121364 - DNA, 804 bp, Enterobacter cloacae
atgagtgaaccatcaggaaataaaatagttagtttttttaaaaagcatgatatggcattacattatatcattcctgttttactgattatcatatcgcaaataatgagggtggtagtttcagaagagtttttaaataaccataaacttattcaattcatttctattgaaatgccactaatggcaggggtgatgtttttaatgtttttggcaatcatagcaatatggcattttgctttatatttgttaagtgcgatgatacaaagtaaaagattttatatccagatcataccgataatttcttttataagtttttggcttgctgcgataatagctacaaatgaaataaatcaggtgaaaccagaagatattttaacctcaccatatttttatactttatttttcatatatacagttgggttatggttatcatcatgtttcttgtgtgtatcttcagttatagctgatgagatcaaagacatgaatattaaatcgaaatttgtattgagattgaaaaaatcaggaaaaggcgaggacataatacttgctgtattactaataatgttaacggcaatatgcttaggtacatggtttgctttatataatgccgagggtcttatttattataaatatacatatatagcacttccattcattcttatcttagcaagtgtagtcatgttattaattgaaatttgttttggtctattttcagacgacaaggtagaaaatttaaaaagaatgaaaaacaaaaaactaaataaaagacaaaagagattattaaaaagagaaaaagagagaacttaa

SEQ ID NO: 121365 - DNA, 294 bp, Enterobacter cloacae
atgaaaaaagacataacaaaagagttgaagcgtttaggtttacacaatggtaatgagttcatagcaaaagcgaccttgatagaagggcagagagcagaaagtatcttagcacttatagaacgcttaggtagacgcaaaatcattcctgatagtgttaaacattgtttcagtcagattaaggcagcatacaggttatccggctacatcaatcaggccattgttgttatagcttttaaagcctatgtgagcgagccagcagagaattttaaggcagatatatattggagtatttaa

SEQ ID NO: 121366 - DNA, 129 bp, Enterobacter cloacae
atgggaacggaaacaagagaaaaagaaatagaaacatggtcagattttattgatgagtttctcaaggaaggtggtgttatatatgaaagtcaaaacaaacaaaaaagagaggtggcatatgatagataa

SEQ ID NO: 121367 - DNA, 342 bp, Enterobacter cloacae
atgatagataaaataacaagaatattaaaagagtattcagatgatgatagtaaaagaggtaaattattaaaagatttctctatgttcgttattaggtttggggtttttgttatgctgtattgctcgacaaccattctcttaaaaaatgagttgggcataaacaaagaagtcgctgataaaatgtttatatactattcatatggagttggtttttatatggcaggagctttattaccttgggtgtttcgtcaaaaatacaacattatgaatatttttgaaaaggataagaatatcaaatcaaaagaagaaaatgaaattgaaaaaaacgacaaaggagaatga

SEQ ID NO: 121368 - DNA, 558 bp, Enterobacter cloacae
atgataaatagttttagattattaaaaggcagaaaaagtaaaaaagggttttcactattagaattgcttttaacgttaggtgttatagctggaataataatagccgcttttatagtttttcctaaagttcaggcttcacaaaagatagataaagagagcagaaacataacagctattcaggctggggtgaaatcactctatggcggcagggctaagatctcatcattgaatactgatagcttcattgcgtctaagaacgcccctgacaacatgatcttggacggtaagttagtgaatgagtggaaaggcaatgtaagcgttgaatacagcggcaatcacggtaaatacaacattatgtatgatgccgttccccctgatgcttgcgcaaaactcattacagcggtttcaggtaattttgtgagtatcactgtatacaacgacaacgggagcactgatgttaagaacttagaagaagggtatggaatagacataaccaaagctacagccgcttgcgcatcacaagaaagctcaactgttatgtttacatccatcatttaa

SEQ ID NO: 121369 - DNA, 546 bp, Enterobacter cloacae
atgacacacatattaagtaagaaaaggaagaaaggattttcattgttagagttgttgttggtttttggtgttatagcagcaatcatagtagcggtttttatggtttaccctaaagtaagttcaggccaaaaaattgacagtgatattaaaatattgggaacattaaacgcaggtataaaaaatctatacgccggacaagctgactttacaggtttatcagtagacgcagttatcaagtctaagatagttccagaagacatagttgatgataatctgatttgggatagttggggggctaacattcaaatagaaccctactacgatggaagcttttatataggatttgagaacatatctgtagatgcttgtccgaagtttgtttctcaagcaggagcaagttattttaaaatagttgttggatctacagaagttaaaaatatagaaaatggtttagagctaaatatggctactacaacatcggcttgcgctaatggtgaagatggatattcagacaaaccaattacagtttacttttacgataaataa

SEQ ID NO: 121370 - DNA, 207 bp, Enterobacter cloacae
atgagaaataaagttttagaagcgtggttttatatagttgtagcaatgatatttacgggatattcattttacctgtttttcgagacaacagacatatcaagatatggtgtaataggtattgtttttaatctgatttcgttaaagctgttatatgagtcttacaaaataaacaaagagataaaaagagaggtggttaatgaaggataa

SEQ ID NO: 121371 - DNA, 216 bp, Enterobacter cloacae
atgaaggataattttttagttaggatatttgcttttctcgtaatagcatttatattttggaatgatacaagctttaccgccaacttgatttactctgtaataatggctacgttagttattgacaatattcttatgatgaaagtagcaaacagaggtcagatttataaagggatgagtataaaattgctaaaagaaagtttttttaagaaaagttaa

SEQ ID NO: 121372 - DNA, 435 bp, Enterobacter cloacae
atgagcgatctttctcacttatcaaacatccgttctctgcgtaaaatcgctaatgaaattggtgatgaagagttcttagtgttcgctgaaaaggttgaagctgtaaaagaagagatcaacaagcgcattgaagaagagaagcaaaagcagctactggttgaagacaagcttaaagctactactgaactactccagtcagaaggctttgaagtgagcttagacagcgtgagagcgttcctgttaggccaagagcttcctgcaccgggtaagggcgctaagggcgttaaacgtggttctgtagagcctaagtatgcttatacaaacgcagatggtgaagaggtcttatggtctggtcgtggtcgtccaccaaaacctattgaagaagccatcaaaggcggggctaaaaaagacgatttcctgatcaaaaaagactaa

SEQ ID NO: 121373 - DNA, 474 bp, Enterobacter cloacae
atgaaatcatgtgatacgaataaaaaactactactggatcttttggcgttcatagcttttgacatgctggatgagaaatacaacaacaataagttaatcataacaaacagagctaaaaaatatttagacaataactacagtggtagatttgattacatcatgaatttaaagcatggagctatcgcctcaacattcatgaaagagggtgtggagggtcatattttcgcttacagtgataaagatgaagatattgaggatttatttgattatgttgtcagagataagttaagggcttacatagataacacaaaatacaatcaggatgagttaactaaagagatagagattttagctaaagagtttcacaatggatatatgaagaactattcattcctaaaccaaatattattgtatgtatgcggttgctataaaataaaacctcgccttgaaaaacctatcatgattgctttataa

SEQ ID NO: 121374 - DNA, 504 bp, Enterobacter cloacae
atgagtgaaacaaactggttagaaattgaaagtaaaaatcatataaaagtgattaatgatacaaaaataaacaagcaagatgaaaagatagctatacgtgttgagcgtagtttattacgaaagataaaggctataagtatgggtagcatttcatatgctgtttgctcgttagctgattatgctcttaatgatgtgataaagaataaaaaacatcttgttctcaagagagagaaaacaggcaatgtgtcttatcagttgagagattacagtgatagcgacaccaaccatatatctatcacttgtgagcgtagcgacataagcactgatcttacaagaactacaatttgggcttacgaaaactttatacaaagaataaaagcaaatacaaactcatactatacgatagctgttatcggtcttgttaagtatggaatggatttgctggatagcaaaaacaaaacattgatgattacaaaaaaggagaaacaatatgaaatcatgtga

SEQ ID NO: 121375 - DNA, 552 bp, Enterobacter cloacae
atgggcaatacaaaagaatacgtaattcatccttttgtggcgggtgaatgttcgatagataagtttgagtcagaagaaatagcagtaattgatataataacaagagaagagatagtgtattgcgatcccggatgttatttgattagcagatcgctattaaacacattaatagaaagtaatgttaattgtgtgaacatcattaaacatgaagatttaaaaataaagtttagtgttaaacacaatatggaacatccgaataagagcataccaaaatggtatagattgataccgtttagtaaaggagaagaaagtaaagaaatatacttgaacgaaaacaatgatcttattgtaaatgaaagaatactcaatctattaaaaaggcatagagtaagaaggctaaagatagaagagtatgaagatgaacatgaagcaaagataatagaagaagaaaaggctaaaccagtattcataacagagcaaaataacacaatgaagcaaatcatcatttttattgtgataatgtctgttgtcgcttattggttctttaactaa

SEQ ID NO: 121376 - DNA, 966 bp, Enterobacter cloacae
atgaaaaagaaaaccaccacgcccacaccccacgatgcgacattccggcagttcctgacgcaaccggatattgcccgggatttcatggagctgcatctcccggcagagttgcaggccatctgcgacctcagcacacttaaactggaatccggctcgtttgttgaggatgacctccgtcagtatttcagcgacgttctctatagcctgaaaaccaccggcggcgacggctacgttcacgtgcttattgagcaccagtcgtcgccggacaggcacatggcgtttcgcctgatacgttacgcggtagccgccatgcagcgccatctggaagcgggccataagaagttgcccctggtgataccggtccttttctatacaggtaaacgcagcccctatccgtactccacccgctggctggatgagtttgacgaccccgtgctggcaggcaacctctacagcaacgctttcccgctggttgatgtgaccgttattccggatgatgacatcgccggccaccgcagtatggccgccctgactttactgcagaaacatattcatcagcgcgacctcgctgaactggttgaccgtctggcgcccattttgctggccggatacctgtcttcatcccaggtcatatcactggtacactatatagtccaggcaggcgaaacagccgacgccgaagcctttgtacgcgaactggcactgcgtgtgccgcaacacggggacgcacttatgaccatcgcacagcagcttgagcagaaaggtattgagaagggtatccagcaggggatcgagcagggcatccagctgggtgaacaacgtggtattgaaaaaggccgtaatgaaggcaaactggaaggcaagctggaagttgcccgcaccatgctcaggagcggcattgaccgcagtaccgtgatgaaaatgaccggtctgactgaagacgacctggcgcagatccgccactga

SEQ ID NO: 121377 - DNA, 369 bp, Enterobacter cloacae
gtggccaccctgaaaattccgctcgagcgacgtaataagcgtaccggcagaaccgaaaaggcgcgtatctgggaggtcactgaccggacggtacggacctggctgaatgaagcagtggagaatgcggccgctgacggggtgtcattctctgtgccggtcacaccgcacacgttccggcacagttatgcgatgcacatgctgtatgccggcattccgctgaaggtcctgcagagcctgatgggccacaagtcagtgagctcaacggaggtctacacgaaggtgtttgcgctcgatgtggcggcacgtcaccgggttcagttccagatgccggggaccgaggcggtggcgatgctgaaagaacgaatttaa

SEQ ID NO: 121378 - DNA, 1530 bp, Enterobacter cloacae
atgagttttaatgctaaggatatgacccagggcggtcagatcgcgagcatgcgtatccgtatgttcagtcaaattgccaatatcatcgtgtactgtctcgtcattctcttcggcatcattgtcgcgattacgctgtcggttaaactgacctggcagacgttcgtgaacggcatggtttattactggtgtcagacgctggcccccatgcgcgatatttttaaatcccagcctgtctataccatccgttattacggccatgagctgaagtacaacgcgcagcaaatactgcaggacaaatatatccagtggtgcgccgaccaggtctggacggcctttattcttgctgccatcatcgcggccgtggtgtgcgttattaccttctttgtcaccacctggattctgggccatcagggtaagcagcagagtgaggacgagataacgggagggcgccagctgactgacgacccgaaagcggtggcgaaaatgctcaggcgcgacggtctcgcatccgacatcaaaatcggtgagctgccgcttattaaggactcggagatccagaacttctgtctgcacggtaccgtcggggccggtaaatcagaagttatccgccgtctgatgaactacgcccgccagcgtggcgatatggtcatcgtgtatgaccgctcctgtgagttcgtcaaaagctactatgatccggccacagataaaatccttaacccgctggatgcgcgctgcgctgcatgggacctgtggcgggagtgcctgacgcagcctgacttcgacaacgtttccaacacgcttattcctatgggcacgaaggaagaccccttctggcaggggtcgggacgtaccatctttgccgaagccgcatatctgatgcgcaacgacaaggaccgcagctacagcaagctggtcgacacgctgctttccatcaagattgagaagctgcgctcgtacctgaaaaactccccggcggcgaacctggtggaagagaaaatcgagaaaacggccatctccatccgcgccgtgctgaccaactacgtcaaggctatccgctacctgcagggcatcgaaaataacggcgagtcattcaccatacgcgactggatgcgcggcgttcgtgaggatggtaaaaacggctggctgtttatctcctccaatgctgacacccacgcttccctcaagccggttatctccatgtggttgtccatcgccattcgcgggctgctggcgatgggggaaaaccgtaaccgccgcgtgtggatcttcgccgacgagctgcctaccctgcacaagctgccggacctggttgagatcctgccggaggcgcgtaagtttggcggctgctacgtcattggcattcagtccggcactgttgcaaagttagcgatgaggcagccttttgtcttattcaaaggccttacatttcaaaaactctgcttaccaggcgcatttcgcccaggggatcaccataataaaatgctgaggcctggcctttgcgtagtgcacgcatcacctcaatacctttga

SEQ ID NO: 121379 - DNA, 675 bp, Enterobacter cloacae
atgcgagtgttctatgggatgttgggagtttttgttttcctgtcgtgtaccttgagtgtaagggctagcgacgactactacactaacttaaaaaaagatgcgaattctggaaacgcattagctcaatataagctaggtgcaatgtatttggtcgtatctggtgattataaaaaagctttttattggactaataagtcggcgattcagggtaattcagatgcccaaaataacctaggtctgctctattattatgggcaaggtgttgataaaaatataaaaaaagcaggctattggtgggggaaggcagcagatgcagggaatgcatctgctcagaatgacttggcaatgctttataaaaatggattattgaaagatgcccgttgtgataaaataatggatttgcttaactcctcagctcaaaaagattttgagttggcatatttgaatattggaaacctgtattctacaggtgagtgtgttaatagggatatgcacgaggcggtgatctggtgggagaaagcatccattaaaaataacggacaggctgagtttaatttggcaggggcttatatgagaggtgatggtgtatttccaggttctggaatggcagatatctatttgaaaaaatcatgctcacatggatatgcaggagcgtgtgatttacttaaaaaataa

SEQ ID NO: 121380 - DNA, 201 bp, Enterobacter cloacae
atgagcttaataagaaaaatgacattacacacacacccacgagggatcgaattagaaacaggacgcaaaagggttataagtcatagagatgaaaacgggaaaaggtggattattgaaatgacgctaagagatccagaggaagagttaaaaaacaaaaaagaggaagaatataacgccaaacagataaaaaataacagataa

SEQ ID NO: 121381 - DNA, 1476 bp, Enterobacter cloacae
atgtcttatgggaataataaggcatacgcggcaaatgtcaacctgcccaaggtgccatttttgccagagtatgccaataaaaatggtgatcggttaaacgaaagaaaaggtaaaagtttaagacttgcaaagctctactatctgcaagcggaacgcttggaaggtgccaaagcggaagcaatgaagaaacgcgctgggcgtgttttcgggtgttccagccatatggagatggctattggctctggcggttacgggtattcactttttagccatagatgcaaagaccgatcttgcaccacctgccaacgtgtgcgtgcgtttgtgctccaacaaaaaatccgagaaattacgcctgcgctaatagagcaaacaaacgcaaaagacgggctaatttttggcacgttaactataaaaaacccgccaattgttgaattaaaagactatttaaaaataatgagtaaagcatttgctcgtatgtttaaaaggaaagagtttaagataggtttaggcggttttaggtgttttgaggtaacacgcggcgaatcaggcgcggatttttgccatccccacattcattttttattacaagttaaagcgtcatattttgcgcgcaattcccctttatatattaatagcgacaaatgggcggaagcctggacagattgcttaaaattagaagtggaaaaaacagggcgcgtttttaatatttcagactatccaaatggtaaggcttttgtaaaaattctacgcgtccaagcccctgattacacaagagaaaatcgaaaatacgcgaccgttgaaatgctacaaaatcaagatcagattgttaattatattttaaaatatacagcaaaggaggatgagggttcaaaaaaggcacttgttcaaaatgatgcttttttcttcgagtatgataaacaaataaaaaatatccgcgcaattgctttcttcggcgtctataaaaaattaatatcagaactaccgccaagagaatataacgaaaaggaaataagaaaggatttaaataataatcaggctaaattttatagcgtcatctgggatgacgatcataaatacattgctattgaaacgaccgaagaagaagctttaaacaagaaaagaacaaacacaataaatagcataaaaacaacgctaacagcacaacttgaaagcaaaaattatattttagatataatgatcgcggcaatgaagaaaggagattttttaacagtcaatgaagaaataaaaaatcataatatccttgctgaccgcacatataaaacatttaaaagaatggaaaaggcgggtgaattagtggaaagaaaaagcggattttatcagcctttccatgattatttatttaaaagcgttatttatgaaaaaatggaaagtattataagcgccgaagaactggaaagaattaagaaagaaattgaatttaatattgaggtaatagaagataacccgccattttaa

SEQ ID NO: 121382 - DNA, 546 bp, Enterobacter cloacae
atggataatttaacccttttagatatgttcaaacacggaaccgctacctggtcggcggtttcgtcttttgtcgttgtgcttttttggtgtgttggttgttggctggcatttattgctattgttaattataaaaacgcggcagatggcaaaagtggaatagcaaagccgatagtacaaacaataatagcagctttaatggttgccatttctcgctttattccaattttaagcgctactttaaacaataaagcggcggaattttcacctcagagccttttaagcgatatacctacaactgacccgatgggcttagggctggcgttcacaagcgttttattgtttgttcaaatgttaggcaccatcgccatttttcggggcttcttgatgatatgggaagcaacgaacaagggcgcaggtagtggtcttattggtaaaagctggacgcacatcataggtggcgttttagctgtaaacatacagcttacaatctcgacggtagctgctacgttttacccaggtgttgatctgtcgtttttgggtctttga

SEQ ID NO: 121383 - DNA, 297 bp, Enterobacter cloacae
atgagcttacaacaacaaaaagagagattaaaaagagaactcgcggcgttagaaaaaaaagaaaaacacttaaaagatcaggcgaacgctaaaaatatgaaagcaatcgcggcagaaattttaaaatatgatttagaaggatacgacaattttaaaaaagttgtcggattgttggcatattttgattaccaagacgacgattttaaaaatggattaatgaaatgggctgaaaacgaattagaagaaaggaaaactaaaaaagtagctcgcacatttaaaaaaaaaccacaaaaataa

SEQ ID NO: 121384 - DNA, 564 bp, Enterobacter cloacae
atgaattacaacactttcaaaaataaatattacaatgaaaatagcgattgtagcgcttatttttgtggggaatttaataaattcaataaatttaattatttgaatgagcgaaaaaatgaagaagataaattaaaaattaacactaattcaaatgttgattatttagctgattactttcacaaaacatatataaatagtttaattaacgagcgtctttttgcaaagcagagcaattttaaagagttagtttttgattattacgaggtaaacgcatttaaaaagcactttaaaaaatactttaaaacaataaaacaatataaaaaaaccaaggatatattaagtgacgctttcacttttagagcgccagatttgatgggttattcacacacgttttatttttgcgtggacaaaaaagaatttgataaaaacggaaatgattatttggaagatttgcagctatttttgagtgaagaaatagaaaagcagatcgaaaaaatagaaagagaaaaaaaggaagaagacgaagaatttgaaagattaaaattaaaacttggtaaggcttaa

SEQ ID NO: 121385 - DNA, 1419 bp, Enterobacter cloacae
atgtatcataaaataataggaggtaaaaaaagcaaaggtcaaaggaatataaaaaaaagtattgaatatttattgagagagaaaaacccagaacaacagaaagacataaaaatattatcaacaaccacaaaacaagacctaatcaattttgaaaattatattttagataaaaacaaatcaaacccatacgtgtgtggtgttttatcatttgaagaaaaatccatatcagaagaattaaaaaccaaattaatcacagagtttgaagatattttatttgcagggattgaacaagaaaacagacctccagttatgtgggtagaacacaacgacaagggcagggtagaattaaattatttaacatttaacagtttacaagacagaagatcatacactgtatatttagataaaagagatcgtgggttggtaaataactactctgaaataattaattatgaaaataatttatcaagtccatttgaagagaaagaaaataaaaacacattaaccaacaaaccaaaaaccaatattccagaagataaaaaacaatttattgaaaatattaatactgaaataatggcattaattattaatgaagagttggaaaatagagatcaaaccatcaaacatattgaaaacatgaaaggtgttaaaataaacagaatacgaaaaaatcaaatatcaattaaatctgatttgtttgatgacgataaacccattgtcctgaaaggagatatatatgaagagggaagagattacagcgattatagaaaagaattcaacccaaaacctacaagagatccagagtttgttagagaaaaactcacagagcttaaaagaacatttgcagaaagaattgaaaaacgagaaatcagaaatagatcaaagtttaaaaaaccatcgttcaaaaatatatcagaaaatagacaaagtattcaaagagaagatcaagatattggatataaatatactaacggcgattttatcaatgttagtaataacgatggtttttcaagtatgtatattcgcactgataatatggagattgtaaacaatgagtcaattaatacagaatataaaactaaaacagcaacagaagaaacagcaggaactacaagagcaagagatattgaaaaaattaatcagcaacaacaatttgttagttcgagacttgaagaagctggaagaaaacaacagcaattcagaaagtcgattgatacaactgaaggaagatttggagtatgtagaagatctgtacactcaattatttctacttttggaagatacatacgaacgttttcagcatatacaaggaagaatgaacacaggcaaaaattcgaaaaaagacgaaaaatcgaagaagaaaaactcaaaatcaaaaatcagggaagttacaacagaagacgatataaaccatattaa

SEQ ID NO: 121386 - DNA, 348 bp, Enterobacter cloacae
gtgagctacaaggatagataccataggaagcacagcgtcacgctatgcttcaatgacgaagaatttgcacaggttgaagaactggcttctatgctgaaaaagccaagggcgaaagccataagggagttaatactcaataaagagtttaaactcaaaaaagaaatttccaaaaatgaaaatggtgatgtgtattatcagcttcataaaataggtgttaatattaaccagatagcaagagcaataaatactgatattgataaatttatttcccatgagtttgcagaagattttataaatttattcgaagaaataacaaatgagatagaagatattaaaaggagaatttaa

SEQ ID NO: 121387 - DNA, 1413 bp, Enterobacter cloacae
atgataagattgaaaaaggtatttaatttaacagaagaagaaatagttttaacgaacgaaatagcagaagcaattagcaaagagccaaaagtagaaactcacgaagtgaatataaattttattgatgttttacctataataccaaacccccataatttaggtttatcagaaaatatagatccattatctttgatatattctaaatttgttagtgaaacagacatacccccagctttaccgatattttcatttttaagctatttaagtgcttttagtgttaataacaatataatgtataagcatcctacaagcccagcggattacttaaacacttggactttaatacttgcaccttctggtgcagcaaaaaccacatcagcaaaaattattgaaagttctataccaaaagatatagaagaaaagccaatgattagacctaattttgaaggtgctgacggttcggcagcattcatttcagagttagcaaaagcagaaaagaaaattgataatttcggaaaaccaatacagccgattttctggatagaagacgaatactcccagtttatgaaaaaattaatgccgggaggttctatggttgaaaccagaaaaacaatgttaaagatccatgataatgataaagcccgtagagttacgaagaacgatactattgaaactgaaagtatcgttatgagtggtttatttttgaatactattgatagttttgcaagaaactttgatcaggaaagtattaatgatggattaggaagaagacacaattttgtttatgcagaaagaggtgaaaaagttgtcccaacttggacagtggaagaaataatcgaatcactcaaagagggattagataatttcttttcaactgtaaaaacaaatgtaatttatacatattcaccagaatgcagaaaaatctatgaccatttttatatggtttacaaagaaaaatttgatcacatattaggggaggaaacaaacggaacatttttcagaacatattttatgttaagttggaaatatgcagcaatatatcatattttgctgaaagaagaaggaaccgaaattcaggcaaaatcttttgactatggcataaaagtttcattaatgtttttatccagtataaaaagatttttagattacaaagtagatttaaaatctggtgccaaagaagttagaaaggaatatttaaaaaaagcagcagaaaaagaattaaacaacttgcaaaaatacaaagattttttgcttgataatgtagaaattacattgcgagattttaatagaaaatttagtcttaaaaaggttgagagtttaaaagtccttaaaacaatcagagaaaacaaattaataaaataccatccattgtttgaagttttggcaaaagaagaagccaaagcgaaaaaataa

SEQ ID NO: 121388 - DNA, 255 bp, Enterobacter cloacae
atgaaactgatcactctactgaacaagcattttgatactgatttaaaggagtatgaggacgagaacggcgttaaccaccccgctatatgggtttatgagaaaggtgaagactgtgagcctgtcgtggtgcttaaagctactgaacagccggagatctggaaggttggaaacgtatactcagctcttactcacaatgcgctgttatcagagactgaactcaaagcgttagtgaaagctggcaaggtaatgaagtga

SEQ ID NO: 121389 - DNA, 312 bp, Enterobacter cloacae
atgaaaaaaacaaaaacattatttgagcaattaaaagatagagctaatcagctttcggcgggtgaagcaataatagtgcttgacgaaatcaataaaaaagaagggtttgaaaatgctgttatctttctcaacagtagaatgaaacatattagaaaggcaattcttaaagacacgttcacactacaaggctgtaggaacgtcaatcttgagctggcaaacgagcttatcgctatagttcaaaaggaacagttatcagccatcatacaggccacaacaaccaacaatgaagctaccaccagaaagcgtatgtaa

SEQ ID NO: 121390 - DNA, 312 bp, Enterobacter cloacae
atgaatacaaacactttaaatacagtttacaactcaatgataaatactatgaatatggttgagtttgatttagatagcggatttattttgtgccagaatgaagattatgattatactgaaataggaagaacttattacagcagaaatgggaatccaacattctatttgatacatgataatgaaactcactttttaatcaaaaaaaataacacaatttacaagagagtcaaaaaagaaaatatttcagaggttattccagcattgttagagcttctaaaaaaagatggtcatcaaataacaatgaaacactaa

SEQ ID NO: 121391 - DNA, 654 bp, Enterobacter cloacae
atgcttgctatctcgatttacaataaaaaaggtggtgttgggaaaagtctcttcagcatcgttatctcttcttggtttggacacaacggcaaaaagacaactctgttagacctcgatccgcaaggcgggagtttgctctttgcgagcatcgcagaacaggcaggaacaaaactaacgtttaacgtagctcgtaagccaacctctaaagatgttgatgtgttcgtatttgaccacagccccggcattcatagcggtggtgatggtcagcttgccccgttcgtaatcattccaactatccttgatgccagctcatacagtgctacgctcaagagcgttcaagaactacgtgaacagggtaaaacagacaatgattttatcgttgttcctaaccgtgttgagatccagaacaaagaacagctcgacctgttaatcaagctacaagaagaacacagggcagcaggccatgagtatgatctgccatacatcaaaaagcgtgttgcctatccgcgttcatacaacaacggcgtcaccatctttgaagacaagacgggcttaccactggtatctgatgcccgtaaagagtttgagttgttgatggaagctgtaggccagaaaatcaaagccggtgttgaggctcgacgcaataaaagttaa

SEQ ID NO: 121392 - DNA, 372 bp, Enterobacter cloacae
atgacagaccacaaaaaagaaaaatctaaaaaacctgccggatggctcgatgatatggagacttttgaaaaattgtctctggaaacggccttttccgatcccaatgctggcacatactgggcgcatcgagaagaagacttaggagaactccagccgttcactacgtcatacgttcgttgcgactttaaagtagtagcggaagatgaaccccgcttaattggtttccgtgttcctaaagctctggaagagaagtttaagcttctttcccatgatgctttatcaaatactattcttgctcttgctgatttaaaagcagatgagttaatcagagaaaataaatctattcattttactaagaaaaagaaatcctga

SEQ ID NO: 121393 - DNA, 249 bp, Enterobacter cloacae
atgagtgagaaaacaatagaacgtcaagttatagaccagatcttagaacttaaaacaaaaaacgagaaagagttagttggtagattaaaaattttagaagaggaaaaggaatatatgagaatggagtatgaacacattataagtgaattaaaagataagcttgaatgtgctcggaaagaaaatgaatggcttttgtctgatatttatcatattcaaagcatcattaaagagggtgatcatgacaagtaa

SEQ ID NO: 121394 - DNA, 282 bp, Enterobacter cloacae
atgacaagtaataataactggaatggaacaacaagaaaagatgatgaaatttcattagatgactcgactatcacaatatccttatcaaaagaagatgaagagacagaaaagaaacagtctttaaggaagagatttaatatcgaaaatcatttagagaatgctgctatgtcaggaggtgttattgtaatgatcttaggtatgattatctaccttcctgttatccttgtgatgatgacagggttgatgataagagagttgatagacacggtgagagaatggtga

SEQ ID NO: 121395 - DNA, 375 bp, Enterobacter cloacae
atgctcaaatacaaaagcttgaaagattttcttgatgaacagaaacagcaagagctatataaaaaaaggcttgctgaaaagctctattacactgttaaaaagggaacatcagaagagatattatcagttttcaagcagtgttctgaaagtagtttagatttcaaacaggtgaaacatgactacttacttgaatactttgatacgttcagatctggatataacaaaccctcaattcttatcacccgcctgattatcagttatcaaaaaaacatttccgtaaaagctatccagtcattttataacaatatttattacaggcatcttctggatgatgaagagttaatagagttaacttctcttatcattaaagattaa

SEQ ID NO: 121396 - DNA, 369 bp, Enterobacter cloacae
atggattacgcacaaagtaaagaactatctttacacattataagctctatgaatttgagcgttcactttaacaaatacgaagtagataacgaaaaagatttagatggtattaaatatataatcgaaagaaacaaagcaaacataaagatcagcacagcaaaaattaaagttgttgagcagggaagcttgttattcttatcaagtaaaatgagagatacgttaacagctactgatttattcattatttatactgatgttgatgagaataatgatgaagagatcacaaaaaaactaagagactttgcttttagacataaagcatttgttgttcagataaccaaaagcaggggtggttatgataatagataa

SEQ ID NO: 121397 - DNA, 309 bp, Enterobacter cloacae
atgataatagataaaatacagtattgtgattatgactacacgttaaaaaagatcaagcatggaaactactatcactttaggatttataaaaaacaatcaaatcataaagtagttagaggaacagaacctaaatatttagtaaaaagggaagttgatcttttaacagataaaagagtatatgccggaaaagataaagcaaaaatagaacagttcgcagagtcaatgaaggatgagttaacaaacatagtttttgacgtgatgagtaaaaccaatagcgttgatacaaaaataagcagagcaggagaataa

SEQ ID NO: 121398 - DNA, 303 bp, Enterobacter cloacae
atgatatttttaacattggttattatagtgaatttattgatattcattaacatagggagttttgttagctgggtttcagagcacaaaatttatggaatatggtataaaagaatatttaagatcggttttcttttcttgttcgctatgtttattgccagcattttaggaggtgaagcagttcagacagcagctaaatctttcttcttttatattgattgcgtcattgcgtttgtcttgatgactatagttcacgccttttacatcaaactaaaatccaaaaagaacacgtccaaacccgcataa

SEQ ID NO: 121399 - DNA, 300 bp, Enterobacter cloacae
atgaagaagcagattttagcagcagcggctcttgtggcttcgctggcgctctcaggttgtggtgatgatggtatctatggaacgtatgaaaacgctcagtacggcgctgttctcgacgttcaaaaggatgtaatcaagttcaggggtgaaagctttccggtgaagtcatgggatgaaactaaaaagcccgtatacatcgccagaactcaacatagcgttgtcgggtcatggacgttcaagcttgagaagaccaaagacggcggcgttatctatcaaggcacaaagtttaaaaaggattaa

SEQ ID NO: 121400 - DNA, 228 bp, Enterobacter cloacae; identical to SEQ ID NO: 10398

SEQ ID NO: 121401 - DNA, 2172 bp, Enterobacter cloacae
atgaatagagaaaatacagaaatggaagctgaaaagcttcttgataatatggatttgtcattagatgatgaagaacaacaatctgatgaagatacaactttaacgcatcctgaaattgatgctttcgataatgctaaattatacgacgagcgtattactgatgaagctttctatgcttcaaataactacgctattcatcctaaaggcttctttaaaaggatttacccaaaagatggtaatccttactggaagcaaattcacaactattttgctattccatacttaaagctttccactgctaaacaaggttcaggcgtaaaaaccttagaagctaatactggttatacaagtgttcgatttctcaataacgatttagaagtaaatgaagttgctctttcttcatcggatcgagcagagtttaccagctctaaatcacgtcttaccttgaacgattggacgcctcctgcgggttctgaccgttcagaagtgtataaagccttcatggaggccgcacaagctggctatgagcctcatgtaaggccaaatggtaaagtctatcctgctttcatcaagcgcatgacaggctacacacaaagaggctgggtgactcctgaccttcatatccgctctaagcatgatctgtatgtcggcaaggttgctactcagagtgaaaagaaaggtgatcctgaaatccagaaggaaactacaagagagataattaaacactctccggcagttcgtattttcttagctggcacatatgcgtcatacacaaaaggccgtatttgtatttcagatgagttttgcccgattgttaactacacgggtgaaggtgaaaaaggtaaatctacaactcttaaaatatgtgcggctacagaaggttctccagctaaaggccgtatgattattgaagctataagttcagaagttggcgttgaaaactttgctactgcttataatcatggccctgtttttcttgatgagattgacgagctacttagaacaaatgacttaccacaaaggataatgcgccttaccaacggcggtggtagagttattttcgataaagataacacttttaaacaacctaacgtttggaacggtatgttcttcacgacttccaaccaatcactaagacaaagtgttaaaggtgatggcaaagagtcggctattttaactcgtcttattgaaatagatattcatgatcctgaccttcatatcttcttccctgacaagaatgatggaggtaaagtttctcagtggatgtctaagctttcagagaattatggtcatatatatgatgaaattatcgcatatataacaaaaaacgctgatgaacttgagcaaaaacttgctgattttgaatctgagttattaactacagaagagttaagatatttcaaaaagaaccgccgttcagcgcatactttagctcttattatgcttggtgctgaaattatggaaagcgttttaggcaaagaaagtgctatgttaactcatgaagcaataaacatttataaaaataaatatgctcaggatattaacgaacaaattgattatgctgattataaatacatttctcatattgagcgtctttatgaatggattaatgctaacaaaggcatgatctcttggagtaagtttgcttatgctgaacaatcagatgatataaacgaaagtatcagcagaacgcagaaaaaagcggctcaaacgcttactaacaatgctactcatagaggttcggttttagcggaagttaagatcaatagagtcatggaacacgctgatgattttgacggaacaatagttttcaacgctatgggcatcaaacacctcaaacaacatgctcaacttgattttaacgagctttgccaatctcttgagaagttaggtatggttgaacatgacgcgaaatttacagataagaagaaggattatttaggtttatccactacaagaactgttcgcttaacattgaaacctatagatgagctaagttccaccatgttcactacaaagaatactgttcttgtgaacgatagtgagaaaacagaaggacaaaccgaaattcttaatcaaaacaatgctgatagtgagtttaacataaacaaaatacttgaagcttccgctcaatacgaagaagattattccgcttactttgatagaacataa

SEQ ID NO: 121402 - DNA, 1524 bp, Enterobacter cloacae; identical to SEQ ID NO: 77500

SEQ ID NO: 121403 - DNA, 258 bp, Enterobacter cloacae
atggaaaaggttaacatctatgatgccaaaactaacctgtccaagatcgttcaagaggtcgcccggactggtgagccagttgtgatcgcaaagaacggtcacgctctggtaaaagtcatcgcatacagagaagagaagcctaagcgtaaattaggtttcatgctcaacaaaggtagcgtttctgatagcttccttgataactttgatgatatgaacgctgatgaaattcaagatatgtttgaagggaaatatgagtaa

SEQ ID NO: 121404 - DNA, 402 bp, Enterobacter cloacae
atggattacctcttagataccaatatcttaatattcatgggttttcgtcctgatcgcttaaagcaagaggttgtagagctgttggaagacaccgaaaaccgcctgttcttctctgctgccagcgtttgggaagtcgtaattaaaagtagtcttaacaagccctttgacgttgataatccaacgttgtttagagatggtctgtttgaagctggcttgattgagatacctgttaaaagtgagcatacgcttgttgtagccgatttgccggagaagctacacaaagacccgtttgaccgtcttatcgtggctcaagcgaagcataacaagcttcctttaattaccagcgatagcaagctgattgagtttgtcagcgactacattaccatcatacctaaccgataa

SEQ ID NO: 121405 - DNA, 276 bp, Enterobacter cloacae
atgaatagaacaaactttaatgtaataatgaaagatatagtagcggagcgttttgatgatgaaagtgaagctttgacatttcttgtctctgaaatgagagctaatggatattatattaacccaaatgattattatctatgttgtgttagaggtggtttaaatattactaaactagatcgcattcaaaactacggtaaaaggtttaaagcacatcagataaaagaagagttaaaatcagtttatgaacacattaaagaaaaatgtaaagaatactga

SEQ ID NO: 121406 - DNA, 327 bp, Enterobacter cloacae
atgtcaaaattaaatagtgaagattttaacgcaatgaaagaagctggttttattaatgaatggaaaaaacccggaagtgatgaagttagatattacatcaacactaaagagataatcaatctatggtcagaagataagattgaattaggttattcaagaagagaaaggtctgagttagaagcacataaatggtggtatgttgagtctaaaaatggtggttttgttttaaaaacatctatgagttataacaacactaagcataaatatatattcccatcactttcaaaagtattgatagaagcgtctaaaagcgatctttctgactga

SEQ ID NO: 121407 - DNA, 267 bp, Enterobacter cloacae
atgaaacgatcacgttttactgacagtcagatcatcaccattctcaaacaggctgaggcgggtacgccggttcctgaactgtgccgggagcatggcatcagcagtgccagtttttataaatggcgctcaaagtttggcgggatggatgctgcactgatgagccgactgaaagagcttgaagaagaaaatcgccgactaaaaaaaatgtatgctgaagagcgtctgaaggccgaaattattcaggaggcgatggcaaaaaagtggtga

SEQ ID NO: 121408 - DNA, 822 bp, Enterobacter cloacae
atggctctgcatgcagttgaacaccgggggatcagtatccgtctggcctgtcagctctttgtcgtcagcgaatgttgctaccgatacaggcgcttactgagtcaggaaaatcaacggattgctgactggctggtgcgcatcacggacagccagcgaaactggggcttcggcctgtgttacctgtatctgcgtaacgtgaaaggctttgcctggaaccacaagagaatttaccggatttactgcgaactgtcgctgaatatgcggataaaacctaaaaaacggttgaaacgtgaaaagccggaaccactgagggtccccactggcagtaacgagagttggtcaatggattttatgcatgatcagttgtcagatggtcgctccgttcgtctgctgaatattattgatgatttcaatcgcgaggccctggcaatagaagtcgatttttcccttccggccagtcgggtagtcagaactctcgaacaactgattgaatggaaagggaaaccggcatcgattcgatgtgacaacggaccagaatatgcaggtaacactctgatagtatgggctgaacgacaaaatatcatcctcaattttattcagccggggaagccacaacagaatgcgtatattgagcgttataaccggacagtgcgttatgactggctggggcactatctgttttattcgctgagtgagttacaggaatacgccacacaatggcaatggttctataatcacgaacgaccgaatatggcactgaatggcttcacaccaatgcagcatattcagcgcttatctgattctacttatctgcccggttaa

SEQ ID NO: 121409 - DNA, 426 bp, Enterobacter cloacae
atgaatataaaatacattccaataagttgtggaaaaaatgaaccgttaacatttaatgaaagtggttttcttgaggtggatgaacttgataacattgaagttcaaaaaaattcttttagtgatattgaaaaacttataacgttaatagaagtaaaggcattaatgttaagtattgtttatcaggatataaacgctcaagatctggatataacattatcaacagaaagaggctatgtatgtgctgagttttgcggtggtgtctatgagattagcataagaacagacataggagcaggacgctacgaagcttctgtaggtaatgagctggttatgtttaacagattggatgatgcggttgaaagcttctttgactgtatagaagaagctgtaaaagaggtaataagaagagaggggggagataactaa

SEQ ID NO: 121410 - DNA, 609 bp, Enterobacter cloacae
atgagcaaactaatagaaacaacaacagcacaaaagattttcaaatccatgattgatttaaatcttgataaagatgaagtcatttactttgaagagttcataaacttgctatatgaggcggggttattaaaccccgattttcaggagcatcaggaattcatagaaaacaacagaaactattttattgagttaaagaggattagaacagagggaaataagacttttgtaataagaaactatctaaatgatatgttcgcagagctaagaaggttaaacaaggatttaggctatacctataaagagaaggtagaagagcttatcaaggagtttgaaagcttctcagagacagcaaagtctcttggtgatggtaaaagtcttgtttatcttgtaatgcttggaactcagtcaaaaggaaaatcacacaaaaagattgtgtgtgtgtttataagagatgatgaaaacaaagaaatgttcaatcaatcaatgaactctaaaatcattctcgctgaaaaagttatcttctttgaagaagtaaatacatttagaagaccaaaatactatttaagtgttcttgataaagcattcaatatattcaatgaaaccatgtaa

SEQ ID NO: 121411 - DNA, 582 bp, Enterobacter cloacae
atgggattatcaaagtcagttagtgatttattaaggcaaaagcagagtttagataatgagcctgatgaagttcaggaagaagttgaaatatcaggagaggaaaaaactttatcattagaaagtgatttggttctcttgggtattgtctggaacgctattagacctcatgaaacttttgaaaagttaaaaactcgctatcatattaatgaaaacttggttgtagaaaaaggcaataacagcttttggatttacggcaaagaagatttaatatcagaaagcattgtttcttttgttgattattttgctaaagatattagagattttaaatttgtcaggccagaatcaccctatgacagttttatttattactttttcaaagaagctattatgtgtagactaaatgttttagtttcaaactctttccatgaaagagatttacaacaagtaataatcaaggatgttattagagaacttaaagacgacgcaagaaagatggataacataaataaaaaatatcatcttcaaatgatcgacaactggataagtcaaatactcgttaaaaacacacacttatctatgtga

SEQ ID NO: 121412 - DNA, 597 bp, Enterobacter cloacae
atgagtaagaacaaaaaaaacattaaaaacaaaggcattaagaaagatttaaacattaacgttcaacaaaaaatggagtcagaggctggggaagaaacagaagtaggacgtaaaacagttatagcttttcttctgttcttacttatttttttaatacctctttttacggaaactttatcagagagaaaatatgacaatcaaataacttatgatgttgttaatgaaaataactatgaaattatattaaataataatagatacttccttgatttagattttgatgatgaacaatatgcttcagccataaaaaattccaatattgattttattagtctttctttagaaagcaaaagaatacaactgaatgatgaagaatgtttatatacagatgaattatgtaaaaacaaaatcaaatctgataagttaggtttaattacgaaaatacagaaatggtctgacgatagagttaatcttggtgttatttggttgagtaaaaacaaagcaaaagaagaagaattacaaaggaatacacctaccattataagaatactaacatttccaacttctaaatataacctgtctcttatacacatctga

SEQ ID NO: 121413 - DNA, 498 bp, Enterobacter cloacae
atgcttgatttagatattaaaagagagttgctgtttgctgaaacagccgaagaagtagatatattggtaaaggccggagctgatgtaaacggtcttatgggtagtgtttttcctttagctttagctgaaaacttagaagtagcaaaggcattagttgctaatggtgctgatgttaactttaccaataagaaaggtgaaacagctatcttctataacaaaaacatcgctgttatcaaatttttgatttcacaaggcgcaaatattaaccatttaaacaacgatggtgaaacagcattgtttaaaacatccgacattgaaatgattaaagcacttatcaagttaggttgtagtccattcctcaaaaacaagaatggagatcgccacgacactaaaatcaagcctgcggataaagaagaataccaaagctttatgaataagcttaaagaaatgatcaggaacgcacttgaacaaaaaaagcagatgctacaagtagcgtaa

SEQ ID NO: 121414 - DNA, 210 bp, Enterobacter cloacae
atggtgataggggttatgacctgtgcgcaagcctactccttcaacgtgacggcgaaaatgggaacgttcccgaaatcgggcgaagatcacaataatccgctgtgtgagggcacactggattgcatttcactcgcagtttttatgaatttcttctcaagagtgtttaaaaaatatcaggtcaatatcttaaaaatacagggaagatcttaa

SEQ ID NO: 121415 - DNA, 693 bp, Enterobacter cloacae
atgtacgggaacaacgagatcgtcagttatttacaggccaataaaatacttgcgcttaaactcgaccatgctgttactgcggtcggccagaacgtcaaaacacaggtgaatatgatagggaaaggcgccactcggctgttgtattacgcctcatgtttcactgatgaatacaatgatgtttgcctgagacagaagagcgaagacctacgcttcagagatgccgtttataaattagtaagcggtgtggatgtagtctatgaaatgcttagactgtattttgaggaagttttcaaatacaaaaatcctaaacagttagagtatattaaacagcggctaatggctgtaaatgtccacatcgctgcggttagccttaccggtgccgggtttacattagccgttgccgcctgcgttcgccttggattaaatatcagcctcgaattaagcgccattaccggaagatgggcttcccgaggtattgcttttattgggctgtatggggtagtacagcaagccgccgatagcgcgcatcgtctgtacgttgaatttcccgcctggtactcggcactttatgctcaagggcttgaaatgctttattttctcattgagcctgtgtttcgcaggacggacgcgacacgtgcgcaatgggcatctgatgacgacattgcggatatcatcaccaggttgatcagataa

SEQ ID NO: 121416 - DNA, 189 bp, Enterobacter cloacae
atgatgaattacatcaaacgttttttacgttggcaggggcgaattatattttcggtctacggcccggccgcgttaacaatcctgtttgccctgatacaggcccatttcttccccggcagtcctgtctggccaattgggcttttcttcattgtggtcatgattgtttttggctgctatgtgaaatggtaa

SEQ ID NO: 121417 - DNA, 237 bp, Enterobacter cloacae
atgaagaaggcgacaattaaaatgtaccgtattcttgagtctgggattgaggctgagtatttcaatattattctggaaaacgtcaagttcacaacggtagcgccgtatctctcccccggcagtatgaccagtacccacctggaaacgctggagctgcgctatgaggcaattacctggaagtataccgaaggcaatatcctgtaccgtgattcatggaacgatcgctgttgcgcatga

SEQ ID NO: 121418 - DNA, 2709 bp, Enterobacter cloacae
atgttgaaaaatatcacccggcagctgcaagcgctgctgagccgtcacctgccacatcgcctgattgcgcgcgatccgctgccaaatgccaacaccatggcgggagcggcgattcccacctccctgaccgagcgctgcctgaacgtggcggcgatggatgaaaacgaagtctggcgcgcctttggcggccacccggaagggctgaacgcgcaagaagtgtcaaaaatccgcgcggaacatggcgataaccagatcccggcgcagaaaccctctccctggtgggtccacctgtggctctgctaccgcaatccgttcaacctgctgctgacggtgctcgggattatctcttacgccactgaagatctgtttgccgcaggcgtgattgccctgatggtagggatctccacgctgctgaactttattcaggaagcgcgctccaccaaagcggcggatgcgctgaaagcgatggtcagcaacaccgccaccgtgtcgcgcgtgattaacgacctcggcgaaaacgcctggattgagcttcccattgaccagctggtgccgggcgatctggtgaagctggcggcgggggacatgatcccggcggatttacgtatcatccaggcgcgggatctgtttgtcgcgcaggcgtcactcaccggtgaatccctgcccgtagagaaggtggcgcggacccgcgatccgcagcagatgaacccgctggagtgcgacaccctgtgctttatgggcaccacggtggttagtggcaccgcgcaggcgattgtcaccgccaccggcggcaatacatggtttggacagcttgccggacgcgtcagcgagcaggagagcgagccgaatgcgttccagaaaggcattggccgcgtcagcatgctgctgatccgctttatgatggtcatgacgccgattgtcctgctgatcaacggctacaccaaaggcgactggtgggaagcggcgctgttcgcgctctccgtggctgtgggcttaacgccggaaatgctgccgatgattgtcacctccacgctggcgcgcggggcggtcaaactctctcaacaaaaggtgattgttaaacacctcgacgccatccagaactttggcgcgatggacattctttgcaccgataaaaccggcgccctcacccaggacaaaatcgtgctggagaaccacaccgatatcgccggaaagaccagcgaacgggtgctgtacagcgcgtggctgaacagccactaccagaccgggctgaaaaacctgctcgacgtggcggtgctggaaggtgtggatgaagagtctgcccgcatgctctccgggcgctggcagaaggtggacgaaattccgttcgacttcgagcgccgccgcatgtcggtggtggtcagcgagcagccggacgtgcatcagctgatctgcaaaggggcattgcaggagatcctgaatgtttccacgcaggtgcgccataacggcgagatcgtgccgctggatgagaccatgctgcgccgcatcaaacgcgtcaccgataacctgaaccgccaggggctgcgcgtggtggcggtagccagcaagttcctgcccgcgcgggaaggggactaccagcgtatcgatgaatctgatttgatcctcgaggggtacatcgcattcctcgatccgccgaaagagaccaccgcacctgcgctgaaagcgctgaaagcgagcggtatcaccgtcaaaattctcaccggcgacagcgagctggtggcggcaaaagtgtgcgccgaagtggggctggacgcaggcgacgtggtggtggggagcgacatcgaaacgctttctgacgacgaactggcgcagcttgcccagcgcaccacgctgtttgcccgcctgacgccgatgcacaaagaacgcatcgtaacgctgctgcgtcgtgaagggcacgtggtgggctttatgggcgacggcatcaacgatgcgccggccctgcgtgcggcggatatcggtatctccgtagacggcgcggtggatattgcccgcgaagcggcggatatcattctgctggaaaagagcctgatggtgctggaggagggcgtcatcgaagggcgtcgcaccttcgccaatatgctcaaatacatcaaaatgaccgccagctcgaacttcggcaacgtcttcagcgtgctggtggcgagcgcgtttctgccgtttctgccgatgctgccgctgcatctgctgatccagaacctgatgtacgatgtctctcaggtcgccatcccgtttgataacgtcgacgacgagcagatccagaagccgcagcgctggaaccccgccgatctggggcgctttatgctgttctttgggccgatcagctccatcttcgacattctgaccttctgcctgatgtggtttgtgttccacgccaacaccccggaacaccagacgctgttccagtccggctggttcgtggtggggctgctgtctcagacgctgattgtgcacatgatccgcacccgccgcattccgttcattcagagccgtgccgcgtggccgctgattgtgatgacgggcattgtgatggcgctcgggatcgcgctgccgttctcgccgctggcaagctacctgcaacttcaggcgctaccgctgagctacttcccatggctggtggcgatcctcgcgggttacatggtgctgacgcagatggtgaaggggttttatagccgtcggtatgggtggcagtaa

SEQ ID NO: 121419 - DNA, 1248 bp, Enterobacter cloacae
atggctctgagtgatgtgaaggttcgttcggctaagcctgaagcaaaagcctataagctgaccgacggtgaaggcatggttttgctggttcacccgaatggctcaaaatactggcggcttcgttatcgctttggcggcaaagagaagatgctggcgtttggtaaataccccgaagtgtcattggcggatgcccgggcacgccgggatgaggcccgtaagctattagctaacggcgtcgaccctagtgagaataagaaagctgttaaggtagaacaagagcaggaagcgataacgtttgaagtggttgcccgagaatggcatgccagcaatcagaagtggtccgcatcgcatagtgctcgtgtattgaaaagtcttgaggataatctctttgctgctatcggcaaacgcaatattgctgacctgaagacacgagatctgcttgtgcccattaaggctgtggaatcatccggacgactcgaagtcgccgcccgtttacagcagcgtactaccgcgattatgcgctttgctgtgcagagtggcttaatcgattataacccggcgcaagaaattgccggtgcggttgctacggcgaaaagaaagcaccgtgctgctctggaacttaaccgcattcctgaattgcttcaccgcatcgatcactattccggaagaccattaacccgactggctgtcgaacttaccttgttagtctttatccgctcaagcgaactgcgttttgcccgctggtcagaagtggattttgatactgccatgtggacaattccaggtgagcgtgaaccgctggaaggtgttaaacattctcagcgtggttcaaagatgcggactccccatcttgttcctttgtcgcggcaggctctggctatttttgaaaagatcaaaagcatgaatgggaatcgagagctgatctttgtgggcgatcacgatccgcgtaagccgatgagtgagaatacggttaacaaggctctgcgagtgatgggctatgacacgaaaacggaggtctgtgggcatggattcaggacgatggcctgtagctcattgattgaatcgggtttgtggtcgagggatgctgtagaaaggcagatgagccatcaggagcgtagctctgttagggctgcctacatccataaagcggaacatctgggggagcgcaggttgatgttgcagtggtgggcggattatctggatgcgaatcgggaaataggggtaagtccgtttgattttggaaagtaa

SEQ ID NO: 121420 - DNA, 189 bp, Enterobacter cloacae
atgaacgagaaaaaatatcaatccctgcgtaaaaagtcaataagtaagggggggaatatggcttgtattgttatgctggtacaggcgctctccttttcctcattgcagatggatttagatgtacgtgttggggatgtgaattggaaacactcgattgtgcttaaaactactggaggaaagggagagtaa

SEQ ID NO: 121421 - DNA, 603 bp, Enterobacter cloacae
atgcataaaattgttacattagagagtgttgctgagatccgcttagggatgccctttaaatcggcgatacaagatgctggtgagcaaggctcctgttatcttatccagacgaaagatattggacttgacggcattttagatctaggtgctttaacctctgttatcccagagggtaatcctgagaagcattatcttttccctaatgatattttattacgtctgcgggggcctgtgttttctgctgggattatcgaaggaaatttaggcaaaccaatcattacgtccaatcagttagcagtaattagatgtaatgataatctaatactgccacattatttacattggtatataaactctacttctggaagtaaacatattcgcagtttgagtgaaggtactagtattagtaaaattaattcaaaaacagtttctaaaatgactgttaaacttccaaatttgggggttcaagaaaagattggttctattaatagaaactggaataaacaaaaaacagtttataattcactaatacaaaatggtgatatgctctttgatggtatatgtgaaagtatcattaatagcgaggagttagaaaatgagtga

SEQ ID NO: 121422 - DNA, 1482 bp, Enterobacter cloacae
atgagtgagatgaaggcgcttcatgaatcacttttacttgcttgtgatttgtttagagggaaagttgactcatcttcttataaagattatatattttcaatgttattgctgaaatatatttctgatgttaaggctgattatgaatatgatttaattaatgaagaatattctgggttgttagagattgtttctcgagtaccagaggttgcgagtttttataaaatatatcatgaggctaagaatcatggtgattatattggcgagaggattgacgactcgctgaagttaattgatcaggctattgattctgtctgtcaaagtagaggtggttatttattcgagtctatacaatttgcgacggttaattttggtgcaagatcagcgagagatcgaatgcttgttgatttactcgctatttttgcacgtcctgaaatgaattttggttatattcaaggtggtaatgaaaagataaaagtagcatgtagatatctttttgaaaagattgcatctgactcggcgatgaggggtggagatttttatactccagaaggtatttcgttactatttgcagagttattgcagcctaaggatggagatagtatttgtgatcctacttgtggatctggttctcttttaattaccctaggggaaaaaataaaaaaatcctttaaaagcaataactataccttgtttggtcaagaggctaatagatccagttgggccttggctaaaatgaatatgattatccataacgaaattaatagtcggatagaatggggggatgtaatatctaaccctcagcttctggatacagataatagattgatacagtttgatgtagttgcttctaaccctccattcaatattatcggttggaatcatgatgatttaatacataatgattatggtcgttttaatttaggttttccacctcagtctaagggtgattatgcctttattttgcacatgatttcaacacttaaaagtgcaactggtagaatggccatactggtatctcacggggtattgttccgtggaggtcaagaggagagtataaggaaaaatttagttagtgaagggttgttagatgcggtaataggtctaccagataggttgcttcttgggacagggatatcatgcgccattttgatcttcaggagagataaaaaacattctaatgttgtgttcatcgacgcatctgatttggctaaacccgtaaaggggcgcaatttaataacaaatgaaatcattgagaaggtatcagaatgctactttgaaagaagtagtatcagtaatttttcacatgttgcttcttttgatgaaatacaagaaaatgattttaatttaaatatatctcggtatgttaagaagcatgaggagcaggcttttgttgatcttgagagcttacgtcaacagcgtgaggaactactatcaacattgcatgaattagaaagagaaatgaaagattttattgataattga

SEQ ID NO: 121423 - DNA, 714 bp, Enterobacter cloacae
atgccattggttacctttggtgagctcactctcgatttgcagcgtaagccaatcaaaaacctgcatatcagcgtactgcctccggatggccgagtgagagtatcggcccccgtctcactgtcagacacagctatcaggatggctgttgtcagaaggctggtatggatccgacagcagcaagcacaatttcaggctcagccgcgccagagtgaacgagaaatgtgtagtggcgaaacacactacctttggggaagaggatatcggctggatgtagttttagtagataagcccgctgaagtgaaacttcagggtcgttggatacgcatgaaagtacctccacattatgatacggcccagcgggaagctgttctcaaccagtggtatcgcggtattttaaaacaaagactgcctaagttaatgccaaaatggcagcaggaaattaaagttgaagccagttatgttggcatcaagcgaatgaagactaaatggggtagctgtaacccccaaaccgcacgtatctggatcaatctcgaactggtgaaaaaacctcctgaatgccttgaattcattgtggttcacgagctagttcatctacacgaacgcaagcacaatgagcgttttatcggcctgatgaacatgtacctcccgaactggcgcgaacacagagctaagttgaataagatgcccttggcttataatcactggggatattga

SEQ ID NO: 121424 - DNA, 3096 bp, Enterobacter cloacae
atgaacagtgttggtcaacgtgaacgcataacacaaaaacgtgttatccagttattcaccgatcatctcggttatcactatcttggtaactggcacaaaagagaagacaaccgcaacatcgagcctagcttagtttcagcctggctatcaaaacgcggtgtttcagaaatcctaatcgcccgagcattacggcagctggatcgagccgcaagcctcggtgaaggtcgtatcctctatgatgcaaacaaagaggtgtatcgtctgctacgctacggcgtaaaggataaagaaggtgctggtgagcagaatcaaaccgtgtggttggtagattggaaaaatccagaagccaatgattttgctatagctgaagaagtgacctacaacggtgaaaataaaaagcgcccggatttggtgctgtatgttaacggtattgcgcttggtgtcattgaactaaaacgttctacagtgtcagtctcagagggcatccgccaaaaccttgataatcagcaaaaagccttcatccgcaacttcttcactaccatccaactggtgatggccggtaatgatttagaagggcttcgctatggtgtaattgaaacgccggagaaatattaccttcaatggaaagaagccgctgaatccccccacgccaacatgcttgatcgtcacctggctcagatatgtaataaacagcgcctgctggaattgatccacgactttatcgttttcgatgctggagtgaaaaaaacctgccgtcataaccaatattttggtgtcactgcaacgaaaccgtttattcaacgcaatgaaggcgggattatctggcatacccagggcagtggtaaaagtctgactatggtttggctagcaaaatggatcagagaaaatattaccgacagccgagttttgatcattaccgaccgtacagaacttgatgaacagatcgagaaagtgtttaacggtgtggaagaagagatccttcgcaccagaagcggcgcagatctggtgactcgcctgaatcaaaccaagccctggcttatatgctcgttagtgcataagtttggtcgtaaggaggaggaagacagagatgctgacacggacgattttatcgaacaaatgaaacgaaatatccctgccgattttagcccgaagggaaaattattcgtgtttgtggatgagtgccaccgaacccaatccggcaaattgcatgcggcaatgacaagcattttgccagatgcacaatttatcggtttcaccggtaccccgctgatgaagaaagataagaagaagtcagtggaggtcttcgggccttatatccacacttataaatttgatgaagcagtcaatgatggggttgtactggacctgcgctacgaagctcgtgacattgatcagcgggtcaaatctcagaaaaaagtcgaccagtggtttgatgctaagacatctaaactttctcgccttggccaacagcaactcaagcagaaatgggcttcgatgcagaagctgttgtcgagccgctcgcggctggaacagattgtggctgacatccttctcgattttgaacaaaaaccacggctcgccgacggccgaggtaacgccatgctggtctgttccagcgtctatcaggcctgcaaatgctatgagatgtttagtgacgcaggttttgccggtaaatgtgcgattgtgacgagctaccagccaaatgccagtgagattaaaggcgaagagagcggtgaaggactgactgagaaactagccaagtacaacatctaccgcaaaatgcttgcggaatattttgaacaacctgaggctgaagcagccaaacgtgtgagtgatttcgaaaaagaggtcaaacaacgcttcatcaaagaaccaggccagatgtgccttctaatagtcgttgataagttattgactggctttgatgccccatcagccacttacctctatatcgacaagaaaatggccgatcacaaccttttccaggcgatatgtcgcgttaaccggttggatggtgaagataaagaatacggctatattgtcgactataaagaccttttccgctcattggaaaaaacagttcaggactacaccgcagaagcctttgacggctacgacaaagaagatgtagccgggttactgaaagatcgtttgcaacaagccaaaatcgatcttgatggtgctctggatgccgttcgcaccctttgcgaaccagtaaaaatgccacgcaatcaacttgattatcagcattatttctgtggggaatcaggggcgtcgatagagcagttatctgagaaagaagctttacgtctaacattgtatcaatccgtggcgaagcttatccgtgcttttaccaatctggcaggtgagctaacagatgctggttatagcgagcagcaggcaaatcaaatccgcattgatgttgagttttatacaaaagtccgcgatgaaatcaaaatagccagtggcgatttcgtggacatgaagcaattcgagccagggatgcggcagatgctggatctttgggtggatgccgatcctagtgaaacccttatggactttgaggaactagggctgcttgagttgattattgaacgcggagaagaagcactggatggacttccagccgacatgcgtggcaaccaggaggccatggctgaagcgattgaaaataacgttcgcagaactattgttgatgaaaaccccgtcaacccgaaatactacgaaaaaatgtcggtgttgcttgatgaactgatcgcacttcgtcgtcaacaggcgatttcctatcaggagtatctggagcacgtacgtgaactggcgaagcaggttaaacatccgcagtcaggtagtaaaagtacttatccagcaagtattgataccctcgccaagaaagcgttgtttgacaacctcgggcaggatgaagtcttggtgacaaagatagatgctgcagtccgtcacaccaaaaaggccgactggtacggggatcgttttaaagaacgcgagattagtttcgctatcgcggaagagattaaaggttattcagtgacggtcgcagatgtaatggccctggtgaaggcacagaaggagtatcgctga

SEQ ID NO: 121425 - DNA, 2031 bp, Enterobacter cloacae
atgagtgatgcacaggtaacttcctttacggtcagatcattgctgggtgatgcatctcgttatcttatccccatgtaccagcgtaactatgcctggggagagggtgagatcactcaacttgtgcaggacatactcgactaccagcaaaaaagccttcatagcccactccctcaaacttactacatcggtacgttggtcgtgttcactcgccctgatgggcagttagagatcatcgacggacaacagcgtttcactaccctatcccttcttgctaactggttaaaaaaacatgcgggatcctcgctggatatgagctggtaccagggcattaatctggggttcgagagtagaccaaaatccagtgagacctttgcacgcctctggcaaggcgtcgaaccacataaacttcgaagcaaggaatttaacgaagggttgattaatggctatgagctgattggcaaagtgctgcgcgacttgaagctagttggagagccattaaaccatttttgtacctatctattcgactatgtacaaattgcccgaatagaagtgcctgccgataccgacctcaaccatttttttgaggtgatgaataaccgtggcgagcaacttgaaaagcatgaagtggtgaaagcgcgactcatggctgcgctcaacaagataacggacaagcaagatcgacagagcagcttgagcaccctctcacgagtttgggatgcctgctccaacatggaacgttatgtccagtacggttttacacctaccgaacgtcatcagttatttgggcaggaaaattgggggaaatttgtgcctgctgattttaattcgctggctggcatgcttatctcatcggcttcggagcatggtacaagaaagaaccaaacaagccgcacactggctgacattatcaagtcatcttcaaccataagtggtgatataggtgaagaagatgaaggtagctcagagcgttttaatagtattatcaacttctccaacttcctgcttcatgtgctacgtgtctgtagcaacacaggtaagaacagagtagatgttcctcttgacgacaaacaattaattgaacagttcgaacttcggctgttaaagcagaatgacccagttaaagcagtacaagatttcgtatttgcacttctcaaatgcaaatacctttttgatcaatacttgataaaacgagagttcgccaagggtagtgatgggtggagcctcaaacgtctgcgttggaattcaagcacaagtaccagctatacaaacacatttcagaaagaaaatggagattatgctggagccaaccggcagattttgatgctgctatccgctttccacgtttcaacccctactctggtttataaacactggttgaatggagctttgtactatctatttaatgcccattcagctaaaaaacagatagatgcaaggaagtaccttgggtatctggagcatctcgcctccacgtttgtctttcaaaacttcctggcagaacaagaaccaaaatcatattttgaaattatctacggcaaagaggtacatatccaaccagcgatactttccgacaagattcagaagaagatgcgctttggtatgatagcgaacaacctggtatttaattacctggactacttactctggtgtcgtgacagaaaaaaatcagaggcagtcaaacgttttgaattcaccttccgaagttcggtagagcatttctaccctcaacatcccatggatagctacaggatattaccagatacatcgctgcactccttcggcaacctctgtctgattagccacagcaagaattcgcgactgagtaatttccagccaaaacaaaagcaagagcacttcgaagcgagtcttgaacggaatgaaatagatagcctgaaactgctcgccatgatcgagctgatgaagaagaacaatcagtggggggaagaagaaatcgccactcacgaagcggaaatgctggcagtgttaaccggtgcaggtggtagtgatagcgtatttagggaggtgttatga

SEQ ID NO: 121426 - DNA, 1434 bp, Enterobacter cloacae
atgaaacatacccttgataagacagttctgtccatcaagggtcttttgagcctgactgacgtaaccattccggcctatcagcgtccttataaatggacggcaaaaaatataagcgaactgtttgcggatattgatagccatcttgataaatcggcttaccggttgggctcagtggtgtttcatcagactgagaacaatgaagaaaaccgactggatatcgtcgatggccagcaacgtactttgacattaatgctggccgtatgggccattatcgaaacccgacttgctggattggaacgccaggatttgcgggaaacgcttgcccagctaagacccatcgttgaaggttttatgggcaggcagcactttgccagtcaggtgtctgaaaacaatctgtaccagaattatcaggagctaaaacgtcgggttagccatcgacaattcagcgagcaccatattgattttctcctcaaccgctgccaggtggtggtctttgtgctggctgacttgtctgaagcctttcagttcttcgactcacaaaatgcccgagggcgggatctggatccacacgatctgcttaaggccttccatctacgtgaattcgccagccatgaggtagaactgaaagctgcttccgttgcccattgggaaggattacccagcgatgacctggctaatcttttcgcatcctatctctacagggtacgtcaatggtcgcagggaaattcagctcgtttctttggtaaggatgaagtcggcctattcaaagggatcaaccttgatcagattggtcagttcccttatgtggaatctatgcgcatagctcaccattttgtagatgactataacaatcagtatcagcgcaagattgatggccagaaaatgcgtttccctttccatctcgatcaaatgattatcaatggaagacgctttttcgaaatggcggaacactaccagcaacaggtatcggcaattatcgccagtgagcacgccagcactcgcactcaaaagccgttaatgattcagggcgtagtccttggtgaaatggcaacccagatactaagaacgttaaatagctatagaaatcgctatcgaacaggggatcaatatatacgcacaatgtttgattgtgctctgatcttttatatcgacaaatttggtgggcagtcgttatctgcagcggttgaaaaaagctttatctgggcctacagatgccgaattcggcagcaggtggtacagctagcgactatggataagtacgtgctggaaaataatctgttccgggtgatcaaagaagcgagagtacctggtgatgtactatctatgcagctactcacagttcgggcttcagaaaattacaataaccgccgtaaaggtaactatgaacaagatgaactggtgaggctgttcaaggagatgaactactatgagtga

SEQ ID NO: 121427 - DNA, 1206 bp, Enterobacter cloacae
atgccgcaagtgtcatttccggagggttgggagttaaggttacttggagaacttgccactatcttttctgggggaactcctaaccgaaaaaacccagaatactgggatggcgatattccatggattactacaactctaattgatggtagtgagatatttgaagctaatgaattcatcacacaaaatggattaaaaggatcgtctgctaagtggtgtaaagctggcaccattttaatggctatgtatggtcaaggaaaaactcgcggtaaggttgcacttctagggattgatgcaacgataaaccaagcctgtgccgctatcgaattaagcgaattgtgctcaaaagaatacgttttacatttgttgatctcaaaatatgaacaaatcagagagttaagcaactctgggggacaagaaaatctaagcagcggaattataaaacgtttagaggttcttatccctcctaaaaaagaacaaataatcatcgctaaagtactatccgatacaaatgcgctaattactgagtttggagagctgatcgccaaaaaacaggccatcaaaaccgcaactatgcaacaactgttgactggccgcactcgcctgccacaattttccaagcattcagatgggacactcaaaggccatagatccagcgaattgggagctattcctgaggactggcaagtagttccttttaaaaatgtgctcacgataaagcatggtaaaaatcaaaaagaagtcgaatcaccaagtggacaatatcctatttacgcgactggtgggcagattggaaatgcaacatcttttttatttgataaaccatcagtattaattgggcggaaaggtacaatagacaaacccagatatgctgagacgcctttctggacagtggacacactattttactctgaaataaaaaaggatttttgtgtaaaatttatttattacaagttctgtatgattgactggatgcagtataacgaagcatccggtgttcctagtttaaatgctcacaccattgaaaatgtgttggtcacattacccaatttagaggaacaaaccgctattgcaagtatcctctcagacatggacgatgaactcaaagcattggaacaaaaactcgctaagacccgagatttaaaacaaggaatgatgcagcaactgctgaccggccgtatccgtttaccgttggaacagcagtcatga

SEQ ID NO: 121428 - DNA, 2463 bp, Enterobacter cloacae
atggctatcaagaagaacgaactttactcctccctttgggcgagctgcgacgagttgcgtggcggaatggacgcttcacagtacaaagactatgtgttgaccctactgtttatgaagtacgtctctgacaaagctaagggcaacccttacgcgatgattgaagtgccggaaggtgcaagtttcgacgatatggttgctctcaagggcaacaaagaaattggcgaaaaaattaacaaaaccatcagattactggctgaagctaatgacctgaaaggtgttattgacatcgccgacttcaatgatgaggacaagctgggtaaaggcaaggagatgatcgaccgcctttccaagctggtggcaatcttcgaagggttggatctctcagccaaccgcgttgatggagacgatctgctgggtgatgcctacgaatatttaatgcgtcactttgctacagagtcaggtaaatccaaggggcagttttataccccggcagaggtgtcacgcattctggcgaaagtaattggcatcagtaaacagacaccacaggatgctaccgtttatgaccctacctgtggttcaggctcactgttgttgaaagccagtgacgaagccggtccgaaaggactgaccatttatggtcaagagatggattatgcgaccagcgcacttgcacgcatgaacatgatcctgcatgacaacgctaccgctaaaatctggaaaggtaacaccctggccgatccacactggaaagatggcaacgataatctgaaaaccttcgactttgctgtagctaacccccctttctccaacaaaaactggaccagcgggctggatgctgcgaacgatacttttgaccgttttgtctggggtacaccaccagaaaagaatggtgattatgctttcctgttgcacataatcaagagcctgaaaagtaccggcaaaggtgctgtgatcttacctcacggcgttctgttccgtggcaatgccgaagcgcgtattcgtgaaaatctgctcaaacagggttatatcaaaggcatcattggcctgcccgctaacttgttctacggcacgggtatcccggcatgcattattgtcatcgataaagaagatgcccagctccgagcgttcaacgctaatggcgagagtcagcaaggcatctttatgatcgatgccagtaagggctttattaaagacggcaataaaaatcgcctgcgcgcccaggacattcataaaattgtcgatgcgtttaatcgcgagcaggaaatcccccgcttcagtcgcatggtcccgctgtcagaaattgcggccaacgacttcaacctcaatatccctcgctatatcgacagcagcgatccggaagatctacacgacctttctggccatttggctggtggcattcctaatcgcgatattgatgcccttagcgcttactggaaaattttcccgactttacgtcaggaactgttcgaacctgcccgacctggttacagcaatgcacgagtcgaagcaaatgaagtaaagaccactatccttgcgcacccggaatttgccgctttcagagctggagcattgatcccctttgaaaagtggtttgcagactgtcagcttgaagaaattgctcgtggggactcacccaaacagctgattgaagaaattggcgagcggctcctcgctgcctatgcttctgaaactaaagctgacatcccgctacttgagaactacgccatctatcagttactgatggactactggatggatgtgatgcaagacgatgtttatgtcctgagtcaggatggctggcaggcgggcaaagtgcttcgtgaacttattgtagaaaaaggggaaaaactcaaagaaacaccggatttggtaataggcaagaaaaagtataaggctgaacttttgccgcctgcactgttagtaactcgctattttgctacagagaagctggaactggatcaacttcaggtcgcttatgatgaagctgcgcaagcacttgaaagtttccttgaagaaaacagcggtgaagatggactacttgccgatgcgatgaacgacaaagagaaagtgacagctaccagtgttaaagctcgacttaaagtcacaacagataaagaagaaaaggctggactgaggattgctcaggtattgttcgatgcagaaaccaaagccaaaaaagcgcataaagaagcacaggaacgactggatcttgcggtatttgctcattatccaaagctcgatgataatgacattaaaattttgctggtacatgataaatggaaggccagtttggctggtgccctagaaagggagattgagcttgtcacgcagcgattggcaaatcgagtgaaagaactggaaggacgttatagtgcgacgctgcccgatcttataaaaaatgtggataagctagaaaccaaagttgcagctcaccttaaggcaatggggctagaatgggcatga

SEQ ID NO: 121429 - DNA, 612 bp, Enterobacter cloacae
atgattgatgatatccgtctcgataggcggcacgcaccattcaacaccacttacctacagcgtattctacgcgttataaataacgcgactgtagagcacgcacgtacaatggcggtacgggtagacctgcgtcttcctgacaatatgctcattaaccgacagggcctgatatctcgcttcattgaatccctcgatgcgaagattgcagcacgctacagaagtaagttgaagcagggtacacgaacgtatccatgccaccttcgctatgcctgggttcgggaggtgggtgagattaatcagaaatcgcattaccacatggtgttgttcgtgaataacgatacgttcaatggactagggagttacaaagaagacgggacgggcctggcgtctctgatacgggaagcctggctaagtgctttacagcttagtcaccgcctagagcactggacactagcccgctttcccgataatccactttattacttggatattaactcacctggttacagtgaggtttatgatcaactgacgtttcggttaagttattttgcgaaagagcgcactaaagattacagcagggaggaacgatcttttggatgcagtcaaagctaa

SEQ ID NO: 121430 - DNA, 534 bp, Enterobacter cloacae
atgaacaattcacctttgctcaaccattatcagacctggcttgatgattttactcgtattaatgtgttccacggcttataccatcagcaaataacgcagtggcaccgactgactataacgtcctgcctgataccggaaggtcattcagttgaagtagtgctcccccagcgcctgttgccgttaacccgcaccgggcttgttgagtcgtgtactaccattccccgtctgaccaagaacatcgattattcccttctgcccggagtactgctcagcgaatgttaccgactgggaaaaagtcgactggcggaccagttgcagatgttgttccgtttgcatgtacagccaggcttacgccagacgctgacattgctgtgctggtgtgaactggtaacgggcaaggatatgaaggaatggtatgaactgcacctgtcgcttcctgaccccctgaagcaatggctggcaataaaacagcgtacgtaccggggcctcaaggctctcgctgatgattacatcctagccacccgaccagtgtga

SEQ ID NO: 121431 - DNA, 207 bp, Enterobacter cloacae
atgaccagtaaaccttccctgcttgaagatcagtttgtcgatatggcttttatcacccggctcaccgggctaactgataagtggttttacaagctcatcaaagatggagtatttccaaaacccatcaaactggggcgcagttcccgctggctacagagtgaagtcgaagcctggcttcaggcccgtattgaagaatcccgcacttag

SEQ ID NO: 121432 - DNA, 435 bp, Enterobacter cloacae
atgcaaatgcctcctctctgcggttgcttctgggtgttggaatggacaaaaacaaatgctatccatgctcatgccattttttatcttaaggggcaaaagcaccagaagtcatttccgtttattcaacagataggtgacttgtggctgaagataactaacgacgaaaggaaatacgaacgttgtaaaccgaaggactgctaccaggacaacatcaataacgtcgttgactattacaacgacgaagacgttaaaagtttgaggcgtattgccagctatctaacgaaagaatcccagaagaatggttatctgatttgggatgtaatgtggttcctgaacctgcaagatagggccgccccagaaaaacagaataagctaacgacacttttttacagcaccaccggtacctatgccggagtgggcagcagtaattcataa

SEQ ID NO: 121433 - DNA, 741 bp, Enterobacter cloacae
atgagaataacatttaactcagatagtgagttgacaattaatacaattgatagatatgcgaaaagctatggagtctcaagatcgaaagtaatttctgatttgcttgattcaatagcacccgctcttgattatctggtttttcaaaacagcttaaaaagagaaatggagactaaattattaaatttatttgcatatgagcttaaagaagtagaagctaaagtatctaaggatgaggttttttttaggtatttttatcaaagtataaaaaagatttcctacgtatttgtaagtgaaggtacaattcgattttcactgcccgatagagaattgtggtttgaccttagagaaaaattcaaattaaaagtaagtgagttagtcgaaatatataggccttttgataatggccactatatttgtgttttttatcctgaccctcttgaagagggaatgtacacatcagttataattaacttcatgtcgttaattgtcgataactactgtttcgatattaattctttgtgttttgtaagagaggaagatttcttttattgcggcattaatgattacatgaaaagaaatcttaaaaacaaaaatcggttgcatctctcatgggctccgctaacaaaaattgctgacgggtatctatttatggctgcaatgcgcaaagaaaactcaaactattcagccagccaagaaggagattttacagtgaacttcccttacgatatatggaagcaataa

SEQ ID NO: 121434 - DNA, 864 bp, Enterobacter cloacae
atgaataaaaatgaaggacaactattcctgcagaactcgcttgatagcttgccccaatgggtatctgaacgcattctgcagcagataaatcagttaacccactacgagcctgtaataggcattatggggaaaaccggcgcgggcaagagcagcttgtgcaatgcactgtttgccggggaggtgtcgccggtcagtgatattacagcctgcacacgcgaacccttacgctttcacctgcaggtgggaaaacgctacatgacactagtggatttacccggtgtgggggaaagcaatgcgcgtgatgcggaatatgccacgctgtaccgtaagcaacttccccggctcgacctggtactgtggcttattaaggccgatgaccgggctcttgcggtggatgaacatttttaccgtcaggtgatcggtgagtcttaccggcataaagtgctgtttgttatctgccagtcggataaggtcgaacccaccagcagtggcaataaactatccacggagcagaagcaaaatatcagccgcaaaatctgcctcctgcatgaattgttccagccggtaaacccagtctgtgcggtgtcagttcgtctgcaatggggactgcgggtgatggctgagcggatgattcgttgtctgccgcgtgaggctagcagtccggtggctgtacagctttgtgctccacttcgtaccgatgccgttaataaaaaagcccgtgacgattttggtgaaacggtcggctcggtgctggacacagtaagttccatgcccctgataccggacccggttcggacagtcatccagtctgtacgcgacatcgtggtatcagtcgctcgtgcagtctggagtttcttcttctga

SEQ ID NO: 121435 - DNA, 438 bp, Enterobacter cloacae
atgacccgtctggcttcgcgctttggcgcagcaaaccttatccgtcgtgaccgtccattaacccgtgaagagctgtttcgcgtggtgcccagcgtgttcagcgaggacaaacacgaatcccgcagtgaacgatacacatatatacccaccatctctctgctggacagtctgcagcaggagggctttcagccgttctttgcctgtcagacccgcgtgcgtgatcctggtcgtcgtgaacatacgaagcacatgatgcgcctgcgtcgggaagggcagattaccggcaaacaggttccggaaattattctgctcaactccctgatggctccagttcgtatcagatgctaccgggattattccgtgcggtatgccagaacggcctcgtctgcggtgagtcgtttggcgaggtgcgggtgccacacaaaggggatgtggtga

SEQ ID NO: 121436 - DNA, 234 bp, Enterobacter cloacae
gtgccacacaaaggggatgtggtgagtcaggtgattgaaggggcttatgaagtactggggatttttgaccgtgtggaagagaagcgggatgccatgcagtcgcttatgctgccgccacctgcacaacaggctctggcacaggctgcactgacgtaccgtttcggtgaggaccaccagccggtgacagcacctcaggtgctttcccccccggcgctggcaggatgcgagcaatga

SEQ ID NO: 121437 - DNA, 684 bp, Enterobacter cloacae
atgacacaggcagagcgccgtcacgaccggctggctgtcaggctgtcactgataatcagccgcctggttgccggtgaaacgctgaacatggcgcggcttgctgcagagtttggtgtgtcagtccgtaccctgcgacgagattttcgcgaacggctgatgtacctcgacctggagtatcgacgggggcagtgtcgcctgcgcagcaccggtgggggcgtacagggcgagctggatgcgctgacctttgcacacagggctggtctgggcgatatctttcctgggctggaccggcgtctggcgggcatgctgctcactgcaggagggatgccctgtctggtatggcaaccgccacagtctgtgtcaccggccatcgcactggtgttctaccgtctcgtcagtgccattaccgcatgtaagcgcatactgctgttggctgagggagagcgctgtgacggcctggctccgtaccgcctgatattactcgacggttgctggtacctcacaggtgaactgaacgggcatatcaccgtgcactctctcgcagccattcatgcggtcacagtcctgaacaccacgtttaccccgagaaaacgtctcagccagttaaccacacaggctggctttatccgggctcttccgcacttcagttgtatccgcgaagtcctgtctcctgagcccttttag

SEQ ID NO: 121438 - DNA, 123 bp, Enterobacter cloacae
atgatctggcataacgagcaaaatgatgtacgtcacgacaatatgcccgatgacgatatcaccgacgctcatgctgacaggactgatgcggataacactgcctcatctaaccaccttatttaa

SEQ ID NO: 121439 - DNA, 867 bp, Enterobacter cloacae
gtgaaaatactactaattaccttaacattatttttgagctttaacgtcaatgccactccgatggaggtggcaaccacatgtaccgataattgtccttatcctagcgaactgtataaatcagacaaagcatttgcagaagcccttgccgggaacttgcgtactatcgggattaaaaatgccttcaccagcactggcgcactcaatggaaccgaatccccgataagatcatataaatataacggcgataccgtggtgacgggaactatttgtgccagcgactgttttacccactttaatttcatatacgacgtagtcaccaaaactgccgcatcagcttacatagaaggtaataaagccaccttaatgggtaacccgccgaaggacattaccaatttcctgctgaaagatgaaaatgttgctaccacaaccatcgctcccttagcgcccaaggaaaaatctgtacaaaaagatgattcagccaaaacgatttgggacttgaaagacaacagcggaaggttactggggaacgtttgtaatggaaaaccaggtacgtgtgtcattgtgatgaatactacaaatctggtggcagtgattaatcataaatcgctcaacgggtgtgccatgggggatttctacgttgtcagcagaccagagcagttttggagccagtatgatacgggaacatgtagcaaagacgccatatttgctgaaggaacaatgaacaatggtcaatatcgaaccattgatgttcgtcttcatggtgaactggttaaacagtttccaattgaatactggtcattggtcaaatccttttcgggcaaaaatcgcccttcgtgggataaagcgaagcaaaaccgtcagcagtag

SEQ ID NO: 121440 - DNA, 459 bp, Enterobacter cloacae
atgacgacacaaactcaatacgagttggtccccacgaaagaaccgcaactcaaccttaccgccacgtcagttcctgacgaacagcgtatccatttctggcctcaacgctttggctccatcccgcagtggataacgctggaaccacgcattttcgcctggatggaccgcttctgtgatgaatacagcggtggtatctggtccttttacacactcagtaatggcggagcgtttattgcccctgatgctgacagtgacgataaatggcctctgttcaacagtatgaacggcaatagtgcggaaatgagcgtggaagccgcaggcatcgctgtctgcctgattgaatacagccatcacgcctgtcgcaccgaatgcgatgccatgactgagcactattaccgcctgcgggattatgccctgcagcaccctgaatccaacgcaattattcgcattactgactga

SEQ ID NO: 121441 - DNA, 219 bp, Enterobacter cloacae
atgaacagtgaagaactgtcccggtctgatgccctgtgggagttgctaaaacacgctccggtaacagaggaggatgacgaagtggttataagcgagcctttcttacattttccggcgggaacaggcatcacgactgtctgggcatggttcgaagccatcgacccaacctttagtgtggccctgaaactgtatggtaagagagcgggccttttgaagtaa

SEQ ID NO: 121442 - DNA, 480 bp, Enterobacter cloacae
atgggtacatcttttcatccgcagtatggctcgctgtccctgaacacgctgaggacagtaaaacgagctcttaacctgcttgaccgacatctgcacgaaacaggcgtggcatttacctctacccaagcagctcgtgactggctgaaactgaaaatggcggggctggagcgtgaagagtttatggtgatgtatctgaatcaacagaatcagttgattgcccatgaaactctatttgccggttccatcagcagcaccgaggtacatccccgtgaggtggtcaaacgcgccctgtatttcaatgcagccgcagtgatactggcgcataaccatccctccggcgacaccacgcccagccaggcagataagaccatcacgcagcgtctggtgcaggcgcttcagctcgttgatatccgtgtgcctgaccatctcatcgtcggtggcacgcagatattgtcgttcgctgaacacggtctgctttga

SEQ ID NO: 121443 - DNA, 222 bp, Enterobacter cloacae
atgagaattgtcagtaaacgccgggcgatggcgatttaccgtcagcatccggcctcctgcatttttcgatactgcaccagcagataccagtggcacggcagtgtctgtcattacaccggtaaggtagttcctgacattcccggcgtgctggcggtatacgccgaacgccgccaggaccgcaacggaccgtatgcctgtctgatgagtatcatcctgaactga

SEQ ID NO: 121444 - DNA, 318 bp, Enterobacter cloacae
atgagcaacaccacatggggactgcagcgggatatcacgccgcgcctgggagcacgtctggttcaggagggcaactggctgcactatttggctgaccgagccagtattaccggtaaattcagcgaagcagaatgtcttaagctggatgtggtatttccgaattttatcagccagttggagtcaatgcttaccactggtgaaatgaaccctagccatgcctattgtgtcaccctgtaccacaatggtttcacctgcgaagccgatacccttggcagttacggctacgtatacatcgccgtttaccccactcaacgttaa

SEQ ID NO: 121445 - DNA, 342 bp, Enterobacter cloacae
atgaaaactctacctgcaacaactccgcaggcggtgacgctatgtctgtcgcccgtggcagtgtggcaaatgctgcttgcacgcctgctggaacaacattatggcctgacactcaacgacacaccattcagtgatgaaacggtaattcaggaacatatcgatgccggtatatctttggccgatgccgttaattttctggtggaaaagtacgggctggttcgtattgatcgcaggggattcaactggcaagaacagtccccatatctgcgggcggtcgatattctgcgggcgcgacaggcaactggtttattgaaaagaaatcgtattagcgcggcacggtga

SEQ ID NO: 121446 - DNA, 1008 bp, Enterobacter cloacae
atggacaacagaatgtggatgatccgcggcgatggtggcaagctctatgacgattttcgcgataagcaaattgtaggcatcggttggtctcagctggctccattagtcaaacccggcctgtcccgagctcagctacttgccttataccaggaagcagaccctttaacgaagctgggaacagcccgttctggtgcatcgcaggtctggcgttttgttaatgagatccaaaagggtgattgggttattacctattcgccagccaaccgtacttatctgctaggtaaggttacatctgatttccagtaccaccctgaatgggtagaagaggggatgggaatcgctcgacaggttaaatggaatactcaagaaattgaccgcgatcgactatccgttgctacgaaaaacacattgggttctacgctgacggttttccagcttccggaatatgctctagaagagcttttgcaggataagaaacctacggtagatgtgattactcagaatccaattgcgatggatgaagatgaggtcgtttctgatccgctccgcgatatggaaatgctcgcgtttgaaggtatcaaagatcgcatcaactctcttgactgggacgagatgcaaaatctggttgccggagttttacgcagtatgggctataaaacgcaggtctcacctgcgggagccgatcggggtaaagatatcattgcttcacctgatggattcggttttgaaaatccacgtattatcgttgaggtaaaacatcgcagggagcaaatgggaagccaacagatccgcagctttatcggcggtcgccataaagacgatcgcgggctttatgtcagtacagggggttttacgaaagatgctcgatatgaagccgaccgttcgacgataccactaacgctctggacgcttgatgatctcgtccgtgcgcttattgagaactatgagcaagtggatattgagaccaaacttttggtacctctgaagaaaactttcctgcctgcctga

SEQ ID NO: 121447 - DNA, 372 bp, Enterobacter cloacae
atggaacctactctcgcacaagttattgaggtcgtacgtgagtcatctgggatacatcgtaaacctattgatagcaacacctggattgaggccgatttgcatatttgcggtatggatggcgaagacctactggaagactgcgaagaagcttttggcgttcagcttgccacggaagaagatggctatatgaaaacgttctctcttgctgagaacgagtatctgtttacgggtgagggtatagatttttttggcatctgtaggtttatgcgctgggtgcgtggcatacccgaacctgtgatacgcgatttaaccgttggcgaacttcacgctgtgctggttaaggctctgaaagagcaggtaaagcacgagtga

SEQ ID NO: 121448 - DNA, 252 bp, Enterobacter cloacae
atgatcatttacacaattgatgcatacagcaaaacagatgaagatttgcttttcgaaatcgaaatacctcatcaaaacctcaatgatctatgtatgattatggagatgaatgctgaagatagaagcgatttttcgcatggtattggcgtctataatatcaatgagcatcaggcacatcttttagaaatccttcttggaagaacattttattctgatgatttaacctttcagctttctggaggggaaatttaa

SEQ ID NO: 121449 - DNA, 594 bp, Enterobacter cloacae
atgctcgagaccggcgtgccggtgggattaggcaccgatgccacccgcgtggcgagttacaatccgtggaccgcgctctactggctggtctccggccgcaccgtcggcgggatgcagatgtacgaccacagcgcccgcctggatcgcgataccgccctgatgctctggacccagggcagcgcgtggttctccagcgagcagaatcagaaggggcagatcaaggtcggccagctcgcggatctggcggtgctcagcaaagattacttccgcgtgccggaggaggagatcaagggcatcgagtccgtcctcaccgtggtgaacggcgatatcgtctacgccgctggcagctttggcccgctcgcgccgccggccatcccggttctgcccgagtggtccccggtggtgaaggtgccgggccactaccgcagcgcgccgccgcaggccgcacgcgtgggtatgagtgtggttcaccactgtagcggcccgtgcggggttcacagccaccagcatgactttgcccgcacgtcagcgatgccggtatccgacgataacgctttctggggggcgctgggttgcagctgctttgcattctaa

SEQ ID NO: 121450 - DNA, 960 bp, Enterobacter cloacae
atgaatttactgtatcgttttataaatggaataaaaaataaatccttggatttatatttgttccttttctttgcaggttgttttgttttgttgaaaataaaagatccagttcgggtttatttgtcatatgcattatttattggccttttagtcatgctgtatttaaaaaggcagcgtgcccgggaaattattattcattttattcggttcgaaagtggcgatgttgtaaataagttggctggatgggcgtcgctccttgcctggggtgcgtttcttctttttccttttgcaataaatatacagtttggttttcttgcaaaagtactattggtgatgttctccatttttattgttattagcagcgttttaacaatttttgttctcgagaaagatggccatgagaaagtaaaaaatatacgggttatgttattttcatttatatcaatctgttatgttttatctagtgcgttctcggcaagtttatttcttcagttgagtaatatggatttatcatccagtccatggctggagtttacatggaagctcagttcattttttgtattgatattttttatattgcagttgactacttacgtaatattcatcgtgactgctgatcatgcaaaaggatatagactttttactatttttggtgctttgattctaacgagtttaatcgtattatttgtctcaagcaggccggatgtagtagcatattatgttttaaaatattctactggcagtgaatggcggagtgattttacatgtgagaatgaaaaaatatcacgccctaacgagagatatttcggttataataccgataagtacacagcttactttttcaatcgtaacggaaagtgggggttcgatgagataacttgtgttaaaaactcgcaagaggggaaaggatatactgtaaaaaatgtatcgacagaaaatatccctcattgggtgaaataa

SEQ ID NO: 121451 - DNA, 1053 bp, Enterobacter cloacae
gtggggcaacgaattcccgttacgctcggcaatattgcgccgctgacgttaaaaccgtttcatgcaggccagcttgcgctggtctgtgaagggggagggcagcgcggtatttttaccgccggcgtgctcgacgaatttatgcgcgcgcaattcaacccgttcgatctctatttcggtacctctgccggggcgcagaacctctccgcctatgtctgcaaccagcccggctatgcgcgcaaagtgattatgcgctataccacctcgaaagaattcttcaatccggtacgcttcgtgcgcggcgggaacctgatcgatctcgactggttactggatgccacctccagccagatgccgctggccatggataccgcgtcacgactgttcgataccggcaaagagttctggatgtgcgccagccgtggcgatgactattcgccgggttacttttcgccgcagaaagagaactggctggatatcatccgcgcatccagcgcgatcccgggattctaccgcaccggcgcgttgctggaggggataagctatcttgacggtggtatcagcgacgcggtgccggtacaggaggcggcgcggcgcggggcaaaaaccattgtggtgatccgcacggtgccttcgcagatgtattacaccccacagtggtttaagcggatggaacgctggctgggcgacagcagcctgcaaccgctggtgaatattgcgaagcagcatgaaaccacctacggcgcgatgcagcgttttattgaaaaaccaccgggcaagctgcgcatctttgaaatttatccgccgaagccgctgttgagcatggcgctgggcagtcggttgcctgcgttgcgtatggattacaaaacggggcggctgtgcgggcgttacttcctggcgaccgtcgggaaaatgctggccgagcaaccgcctcttcatcggcataaaagcatcattttgccgcctgccgttgtggccaatgacgcggtggcgatgccgctggtggacgcgccgcaggccaacgatggcttactcgataacgaggatctggcgtga

SEQ ID NO: 121452 - DNA, 306 bp, Enterobacter cloacae
ttgaccgggcgcgaaaacacgctgatcaagcagagcatccgctggctggccgatcgtcatcgcctgacggagctgcgcctgctggtgatccccgatcggtgtgattatctgcaacatctgccatcgctgaccgcttttatccacacgttggggaacgttccggtgcggatcaacgcgtttcatgcccatggggtttacggggaggcggcgcgatggcggagcgccacgccggaggacatcgagccgctggcgcaggccctggaacggcagcagatcacggtgatccgcccggccctttatctatag

SEQ ID NO: 121453 - DNA, 945 bp, Enterobacter cloacae
atgccagaaaataatattaaccaaccacagacttatgatggggttaagcctcagttgcgcacagtggatctcaatctgttaactgtatttgatgcagttatgcaggagcagaatattacgcgagcagcgcaatctctgggaatatctcaacctgccgtgagtaatgccgtagccagacttaaggtgatgtttaacgacgagttattcgtccgctatggaagaggtatccagcccacggcgcgtgcattccagctattcggttcgattcgtcaggcgctacagctggtacaaaatgagcttcccggctcgggttttgaacccttaagcagtgaacgggttttccatctctgtgtttgcagtccgttagacaattatttgacgtctgttatatataataaagttgaacacattgctcctaatattcatctcgtttttaaatcatcattaaatcaaaatactgagcaccagcttcgttatcaggaaacggagttcgttctgggctatgaagagtttcgccgtccagagtttgcctgtgttccattgtttaaagatgaaatggtgttagtcgccagcaaaaaacatccccgtatgaattctccgctgcgtgaaagcgatgtttacagcgagcagcatgccgtggttgctctggacagatatgcctcatttagtctgccgtggtatgacactgccgataaacaagccagcgtggcctatcagggaatggcgatggtcagcgtattgaatgtcgtttctcagacgcagctagtcgctattgcaccgcgctggcttgctgaagagttctccgattcgctgagcctgcaaattttacctctgccgctcaagctgaatagccgtacctgttatctttcctggcatgaagcggcggggcgggataaagggcatcaatggatggaagagctgctgatcaatatttgtcgtcgataa

SEQ ID NO: 121454 - DNA, 900 bp, Enterobacter cloacae
atgactcaatttagcgctttcaactatacacacaatagagataaagccatcgctaacttaatcaacctaattgaagggatgacctgtgacgggaaactaagtgaaaaagaaatgattttccttgatacgtggctgatggaatcagacgttctttcccaaaattatttcgtaaactgcatcagaaataaaataagtgaaatcctttcggatggtgtagttgaaaaagctgaattagacgaattgaaagacctgctccatgaaatgcaacgcggattgatggatactcctaacatagacctttactcagctgactctgacaagcatttgctagagggtctatgtaaggggcttgcttccgactatcatttgagcgatgaagaaatcagctatttaaactggttcttatctacaaatgcagctttaaaaagcaactatcccggcaaacatctttacgaactggttcaatcaatcctgagtgatggggtgatcacagacgaagaacgcaccaaattattacaagaaattactgctttcactggctcaaatatttctgagggtattgtggatggatattccacaacatcacctgttgacctaattgatgagtttaaccctacagatagtaaagtctgtctcactggtaagtttctatgtggctcccgtagacaatgtgaaagtgaccttttaaagcttggctgccaaattgttgatcgtgttactcaagatttggactatctaattattggtgccctcagctctaaggattggaaatttcaaagcttcggaagaaagatagaacaggctattgattatcgtgacaataaaggagttccgctcaaaatcctcagtgaagaacactggcaaaccttaatgcgtgataataattctatatctcaatag

SEQ ID NO: 121455 - DNA, 615 bp, Enterobacter cloacae
atgtcaaacacaaaagagaccctttccgcgatctcaaaatacaactttccatctcaaagtggtggaaaggaagcgataacacgtatcctccaggcctatggattcagtaccagacaggctttgtgcgatcaccttggggtatcccagagcactatggcaaaccgttggatgcgcgatacttttccacatgattggctcattgcctgccatcttgatacaggtgcatctatgctttggttaactacaggacaaggcttgcccacaacaaaagcagatagcgacagtggattgcctttgcaattaaaagaaatctcaaacgggattttttcatcctctgaccaagttcgctacgactctcgccttttacctcaagacacaactgccccattcattgtgaagtttgaaaattcgttctatctagtggacgagttcaggggagagatcaacgatggaatctggttgattgaaatagatggctttatgagtatcagacaggtttaccgtcttccaggcggacgtttacgcgtagaaaatggccccgcatcctttgagtgcacaccatcggatattgaagccaatggcagagtgatcagcaaaataacgtttactgaataa

SEQ ID NO: 121456 - DNA, 852 bp, Enterobacter cloacae
atgagcactatcctgaaatgggcgggaaataaaaccgccatcatgccggaactgattaagcaccttcctgctggcccgcgactggttgaacctttcgcgggttcatgcgctgtaatgatggcgacagactatcctcattatcttgtcgcggatattaaccctgatttaataaatctatatcgggagatagcaacaaacgcatcagattttattgagcgtgccaaacatctgtttaaaatattcaatagtgaagatggttattatgatagccgggattcattcaatcatgataaagaccctgaatggcgcgcgccgctgtttttattcttaaatcgccactgttaccgtggtctttgccgttataacaaaaagggtgagtttaacgtcccttacggtaattataaaaaaccgtattttcctgaaaatgaaatacgcgcttttgctgaaaaagctacccgcgccacgttcatttgcgccagctatgacgaaactttggcattattagtgcctggggatgttatttattgcgatccgccttatgacggtactttcagtggctatcacactgccggttttactgaggacgatcagtatcatctggcctctattcttgagcgccgtgcatcagaaggccatccggtcatcgtttcgaacagcgacactttcctgactcgttccctgtatcgcaatttcactcataaccgtattaacgtaaaacgcagcattggtattgctgcaggcgaagggaaaaccgcagacgaactgattgctgtactcaaaccgaaagtatgggctggctttgatccagctggcggccctgattactcggtcgtgcatgaggtgcgcgcgtga

SEQ ID NO: 121457 - DNA, 2394 bp, Enterobacter cloacae
gtgagtcatcacgaagttgaaaagcacggcggtgcagaagattctgccgctgcttttgcctggaatgtacctaaaaaggcgattaacccctacatggacccggcggaagaagcgccggtttctgcgctttcaaacctgattactctctatgttgcggataacgagcaggagcagctgcgccgcgaggccctgagtaatgaggtctgggaacgctatttctacaatgaatcccgtgatcctgttcagcgagaaatggagcaggatcagctgataagccgcgccaaaatggcccgcgagcagcagaaattcaaccccgatctggtcatcgttgctgacgtgagcgcccaaccggcgcatatcagtaagccgctgcttgaacggattaaatatttcgagggcctgggcaagccgaaggcatattcccgctatctgcgtgaaactatcagggcgtgccttgaacgcctggagcgcgtgcgtaccagccaggtttctgcctcgttccgttttatggcaagccacgacgggctggagggcctgctggtcctgccggaaatgttccaggagcaggtcaagcggttatctaccctggtggcggcacacatgagcatgtgtctggatgctgcctgcggtgagctgtttacggatgaaaacgttacgccggaagagatccgccggtcatgggaaagggtggccgctgaggccatgcgccttgatattatcccgcctgctttcgagcagctgcgccgtaaaaagcaccgccgtaagccggtcccatacgagcttattccgggctcgcttgcccgtatgctttgcgcggactggtggtatcgcaagctgtggcggatgcggtgtgaatggcgggaagaacagctgcgcgctgtctgcctggtcaacaaaaaagcgtccccgtatgtcagctatgaagccgtgatccacaaacgcgagcagcgccgcaaatcgctggagttcttccgctcgcatgagctgatcaatgaagacggcgatacgctggacatggaagacgtggtgaacgccagcaacagcaacccggcacaccgccgtaatgaaatgatggcctgtgttaaggggctggagctgatcgcggaaatgcgcggagactgtgcggtgttttataccatcacctgcccgtcacgcttccacgcaacccttaacaacggcagacctaatccgaagtggaccagtgccactgtcaggcagagcagtgactatctggttgatacattcgccgctttccgcaaggccatgcacaaggccgggctgcgctggtatggcgtccgcgtggcagagccgcaccatgacggcaccgtgcactggcatcttctgtgcttcatgcgcaaaaaagaccgccgttccatcactgcgatgctgcgcaagtttgccatccgtgaagaccgcgaggagctgggcaccaatacggggccgcgcttcaagtccgagctaatcaacccgcgcaagggcacgccgaccagctacattgccaaatacatcagcaagaacattgacgggcgggggctggctaaagaaatcagcaaagaaaccggcagatcactgcgtgacagcgccgagcatgtcagcgcctgggcgtcactgcatcgtgtccagcagttccgtttctttggtattccggggcgtcaggcataccgagagctgcgcttgctggctggtcaggcggcgagagtgcagggtgaacgcaaagcgggcgcaccagtactggataacccgcgtctggatgcggtgctggcggcagctgatgcgggctgctttgccacctacatcatgaagcagggcggtgtgctggttccccgcaaacatcaccttgtccgcacagcttatgagcttaacgacgaaccgagcgcctacggcgatcacggtatccgtatctatggtatctggtccccgattgcagagggcaagatttgcacgcacgcggtgaagtggaaaaaggttcgcaaggccgttgacgttcaggaggcggaagccgaccagggcgcttgcgccccttggactcgtggcaataactgtccccctgttgaaaatctgaacaaatcaggggggggtttacccgagattaaaaccatgaatgagaaggagctgcaggaatatctccacaacatgggccagaaggaacggcgggagctgacagccaggctaaggctggtaaaaccgaagcggaaaaaagcatataaacagactatttcggatcagcagcgcctgcagcttgaggcagaactgagttccagagggttcggtggtagcgagtcagagattgacctgcttctgcgcggcggcagtattccgtcaggtgccgggctgcgtattttttaccgcaaccaccgtctgcaggaagatgacaaatggcgtcagtggtactga

SEQ ID NO: 121458 - DNA, 1050 bp, Enterobacter cloacae
atggctaaccgcaaaaaccgcagcaaggcaccgcgcggccagaccgccaccgatacggccaacatggtcagtaatgcacatgcggaggcgtttacatttggcgatccgatccccgtgatggaccgccgggagttatttgattacctggagtgcgtgcaggtagaccgctggtacgaaccaccgatcagcatggatggcctggcgcgaacttaccgcgccgccgtgcatcactccagcgctattcaggtaaaacgcaatattcttaccagtaccttcatccctcaccgctggctgtctaagcaagccttttcccggttcgcccaggactttctggtattcggtaatgcctaccttgaaaaacgcatgaacaggttagggcagatcatggagctgcgcgcctcgcttgccaaatatacccgtcgtggcattgaccaggacacctactggtttgcacagtatggctacaactcgcagccctatcagttcgatgagggaagcgtgtttcatctgatggaacccgacgttaaccaggagctttacgggatgccggaatacctctccgccattccctccgccctgctgaatgaatcggccacgctctttcgccgtaaatattaccttaacggtagccatgctggtttcatcatgtacatgagcgaccccgccgccgatcagaaagacgtggacaacatacgcgaagcacttaaaaaatcgaaagggccaggcaacttccgcaacctgtttatgtacagcccgaacggcaagaaagacggcattcagatcatcccgctgtcagaagtcgcagcgaaagatgagtttcttaacatcaagaatgtgagccgtgatgacatgctggcagctcaccgcgtgccgccgcagctgatggggattattccaacgaataccggcgggtttggcgatgtggaaaaagcggcgcgcgttttcgttcgcaacgaacttacccccctgcagggccgcatcaaagaagttaacgagtggctgggtgatgaggtgatacgctttgacccctacctgaccgatgaagactga

SEQ ID NO: 121459 - DNA, 1713 bp, Enterobacter cloacae
atgtactttcagggataccgcgtagcccgcattgctgaaatgctgggcgagaaagttgcaaccgttcacagctggaaaaaacgcgataagtggggcgaatatggcccactggatcagatgcagctcaccaccgccgcacgttactgccagctcgtcatgaaggagcagaaggaaggaaaggattttaaagaaattgacctgctggcgcgtcagtccgaacgacaggccagaatcggcaaatttaacaatggcgggaatgaagcagacctgaatccgaacgtggcgaaccgcaataaaggtccgcgcaagccgccggaaaaaaacctgtttaccgacgaacagatcgaaaagctggaagagattttccgcgccggtatgttcgagtaccagcgccactggtgggacgctggcatcaagcaccgtatccgcaacctcttaaagtcacgccagatcggtgcaacctactatttcgcccgtgaagcgttgatagacgccctgaccacgggccgaaatcaaatctttctgtcagcgagtaaagctcaggcacacgtttttaaacagtacatcatcgacttcgcaaaagaggtggatgttgagctgaaaggcgatccgatggtgctgcctaacggcgcctgtctttacttcctcggtacaaatgcccgtaccgcgcagagctatcacggcaatctgtatcttgatgagtatttctggataccgaaattccaggagctgcgcaaggtggcctccggtatggcgctgcacaaaaaatggcgtcagacctatttctcaacaccttccagcctgacgcacagcgcctacccgttctggtctggtgtcctgttcaataaagggcgcccgaaagccgacagggtagaatttgacctttctcacagtagcctggcgcacggcgttttatgccctgatggccagtaccgccagatagtcaccattgaagatgccgtaaacggcgggtgtaaccttttcgacctggaccagctgcgcctggagtacagcccggacgaatacaacaacctgctgatgtgtcagtttgttgacgacctggcgtccgtgttcccgctggccttgctgcagtcctgcatggttgacagctgggatgtctgggacgatttcgaaccgcttttactgcgtccgtttgcataccaccctgtctggatcggctatgacccggcaaaaggaactcagaacggtgacagcgccggttgcgtggtcatcgcgcctcccgtcgtccccggcggtaaattccgtatccttgagcgtcaccagtggcgcgggatggactttcgcgcccaggcctcagcgattgaggaaatcaccagacgctacaacgtgacctatatcggcattgactcgaccggcgttggcgatggcgtttacaaaacggttaagcagtttttccctgccgcgcgtgagtttgtctacaacccaaccgtaaaaaatgcactggtgcttaaagcctacgacatcatcagcgggcgccgtctggagtttgacgcggggatgctggatatcgcgcagtcctttatgtccattcgccgttcaaccaccgccagcggcaaccggccaacctacgaagcagcccgcacagaggaagccagccacgcggatttagcctgggcaaccatgcacgcactttataacgaaccactggcaggagcttccgccagtaccagcaacatcgtggagattttttaa

SEQ ID NO: 121460 - DNA, 828 bp, Enterobacter cloacae
atggcaaaaaaatctaagcgttttcgtattggggtcgaaggggccactactgacgggcgcgttattgagcgtgaatggctcacccagatggcggcgagctataacccgcaggtatacaccgcgctgatcaatatggaacacatcaagggcttcacccctgatgggcctttccgtcgttttggcatggtggaaaagctggaagcggaagaaatcaccgaaggggcattatccgggaaaatggcgctgtatggctggattgccccgactgacgatctggtcacgatgactagcaactggcagaagcttttcacctcaatggaagttaacaccagctttgccgataccggctccgcttatctggttggcctggcgattactgacgatccggcaagcctcggtactgaaatgctgcagttcagtgccagcgcagaacataacccactggcgcgccgcaagctggacaaagacaacctgtttaccgctgctgttgaaacgctgatcgagtttgtggacgtgccggaaaaaaccagcctgtttacccgcgttaaagagctgctgtcccgcaaaggcgccgatgataacgcccgctttgctgatgtgaatcaggctgttgaaactatcgcgcgtgagcatcagacgctggcggagcaggtcagcacccatcagaccgatttcagtaacaagctgagcgatatgcaaaaggttgttgatgagacaaccagcgcactctccaccctgcgtgagcagctttccactcaggacagccgcagcgaacgccgccctaatgcgaccggtaataacggcgcagaacaaaccaccgattgctga

SEQ ID NO: 121461 - DNA, 1149 bp, Enterobacter cloacae
atgaaaaaagagacacgttttaaattcaacggctatctgacgcagctcgccaaactcaacggcgtatctgtgagcgatatcgcctcgaaatatacggctgagccgtcagtggcgcagacgctggaaacgaaaatccaggagtcttcctcgttcctgcagaaaatcaacattatcccggttgatgagcagtccggcgagcgtctggggctgggtattggttccagtattgccggaaatactgataccacccagaaagaccgtgaacccgttgatccgacttacatcgacggtgaagggtacaagtgtacccagaccaactctgatacggcgctgccctatgcgaagctggatttatgggccaaattccaggacttccagacgcgcatccgtgacgccatcattacccgccaggcgcttgaccgcatcatgatcggcttcaacggcgtgaagcgtgaaaaaacgtctgaccgcgcgacctatccactgctgcaggatgtgaatatcggctggctggaaaaaatccgccaggagaaacccgttcaggtgatggataagatcgtgtccgaaggcgaagttatttctcagactatccgtgtcggtaaaggcggtgatttcctgaatctggacgcgctggttatgggcgccgttaatgagaaaatcgcgccgtggtatcaggaagatacggagcttgtggttatcgtcgggcgccagttgctggcggataaatatttcccgatcgtcaaccgtgaccagccaaacagcgaagcgctggcggcagatcttatagtcagccagaagcgtatcggcaacctcccggccgttcgtgcgccgttcttcccggcgaatgccatgctgatcacccgcctggataacctgtctatttactggcaatcaggctcccgccgccgttcggtcatcgacaatccgaagcgtgaccgcgtggagaacttcgagtccgttaacgaggcgtatgttgtcgaagattacgacggcgtttgcctggttgagaacatcgaactgttgcccgtgcaggcaggtggcaatgccagcccagcgctgacaactgaaaccatccaggaaatcgtcacggcagcggtgaaaggcgcgcttgatgcgcaggcagctggcggtgctggcgccggagcgtga

SEQ ID NO: 121462 - DNA, 654 bp, Enterobacter cloacae
atgaatccgttccgtgctcacactcagtatgtacaggcacaggatgccgcccggcagggcggcagtaatgccagcctgacgggctacaaccagatgctgttacagctgacagaacaccgcaggcgccttaaaaccgtccagtcaaatgagcgcaaggctcagctcaaacgtgagtttcttcccgcttatgcctcatggattgccggtttactggatgctgacgcgtcaggccaggacgacgtggcgatgtacgtcatgatctggcgcattgatgccggagactataccggcgcgctggacattgcccgccatgccattaaacacggctgggtcctgccgcagcgattcaaccggacctgcgggaccgctgttgcggaagagtttgccgacgcggcaatgcgcgctttttctgccggtgaatcattcagtgccgccattcttacccaggtgctcgatatcgttgaaggtcaggatatgccggatcagtcccgcgcccgacttcataaggcgatgggctacgcgctgcgggataacgatcaggcagtggcggcacttaaccatctgaagcgtgccctgcagctggataacagttctggcgtcaaaaccgaaatcaacaagcttgaaagccgattgcgacaggcaatgtcggcttaa

SEQ ID NO: 121463 - DNA, 468 bp, Enterobacter cloacae
atgcaattcgtttcgccggaacaggccggggaaagtacccaggacgttattaaaaacaccagtttctggcctgatgtcagggtttcagagttccgccgtgatatgcgcatggatgggagtgtcaccgatccgcgcctgcgtctggcgttactgacagcgattgctgaagttaacgccgatctttatgagttccgcgagaaacaacgggcgcaggggtatgcgagcctggccgacgtccctgcagatgtgatcgacggcgaaagccagcggctcatgctgtatcgccgtgcggtgttttgctgggcaaaagcaaacctggttgagcgctatcgcgattttgacgcaaccggcgacggaagcaagaaagctgaagatatcgaaacaaccttaggcgagctgtggcgcgatgtgcgctgggcggagtcccgcctgcgcgatatgccgcatatgacggtggagctgatttga

SEQ ID NO: 121464 - DNA, 216 bp, Enterobacter cloacae
atgacgcttgaacgaatcagcgcctttatcacttactgcgttgccctgcttctggcatggctcggcgatttgtctcttaaagatgtgtcgaccatcaccggtcttgcgctggggattattactgcagcggtgacctgttatttacgctggaaagcctaccagctgctgcgggacggcagaatatccaggggggaatatgagtccttcaatcgttaa

SEQ ID NO: 121465 - DNA, 516 bp, Enterobacter cloacae
atgagtccttcaatcgttaagcgttgcctggtcggcgcggtgctggcgattgccgccacgctgccgggttttcagtcgcttcatacctccgtcgaggggctgaaactgattgctgatttcgaagggtgtcgcctccagccataccagtgcagcgccggggtatggactgacgggatcggcaatacgtccggggtagtaccgggcaaaaccataacggagcgacaggccgcgcaggggctgattaataacgtgttgctgacggaaaaaaggattgaagcctgcctgcaggttaagccacctcagcatgtttacgatgccctgatgagtatcggtttcaatgtcggaacgggggcaatctgccggtcaacaatggtttcttacatcaatcgccagcaatggtggcaggcgtgcaaccagctcccccgctgggtttatgtaaatggtcaacggaataaagggctggaaaaccggcgcgcccgtgagcttgcctggtgtcttaaaggggcaggggcatga

SEQ ID NO: 121466 - DNA, 429 bp, Enterobacter cloacae
atgacgcgcgcgctggcggtgatcctggctctggtgctggcattgctgggctggcagtcatggcggcttaacaatgccggtcacaccatcgggacgcaggctgcggcgcttaaaaagaacaagcaggagctggcgaagaaaaacagccagctcatcagcctgtccattcttactgaaaccaacagccgggcgcagatgcaactttatgctgcagcggaggagacttccgcgctgttgcggagccgccagcgccggatcgaggagctaaaacgtgaaaacgaggatttacgccgctgggctgacactcctttgcctgctgacattatccggctgcgggaccgcccggccctcgccggaggtgcagcttaccgtgagtggttgtccaaaagtgacgcagtgccgcctggacaggtcagcgccgcgcagtaa

SEQ ID NO: 121467 - DNA, 447 bp, Enterobacter cloacae
gtggatgacctgcagagggtggatgactggctggcggccctgctggcgaatctggaaccggcagcccgcaaccgtatgatgcgacaactggcgcaggagctgcgccggtcgcaacagcaaaatatcaggctgcagcgtaatccagacggcaccacctttgagccgcgccgggtgacggccagaagtaaaaaggggcgcatcaagcgccagatgttcgccaaattgcgcaccactaaatacctgaaaaccgcagccactgcggactctgccagcgtgcagtttgatgggaaagtccagcgcatcgcccgtgttcaccattatggtctgcgtgatcgagtcagacgcaacggcccggaggcccggtacccggcacgccgtcttttgggcgtgaatgatgaggtggaaaccatcacccgtgacacgctgttgcgctggctgtcggagtga

SEQ ID NO: 121468 - DNA, 909 bp, Enterobacter cloacae
atggcagtcattgacctttcccagctgcccgccccgcagatagtggatgtgccggattttgaaacgctgctaaacgaacggaaagccgcgtttgtagccctttatccggcagacgagcaggacgcggtaaggcgcacgcttgagctggagtctgaacccgtgaccaagctcctgcaggaaaatgcgtatcgtgaaatcctcctgcgtcagcgcattaacgaggcggcgcaggcggtcatggtggcttattccatggggagtgatctcgatcagctggccggtaactgcaacgtaaaacgtctgacggttattcctgcagataacgacgcggtaccgccggttgctgccgtgatggaaagtgatgaggctctgcgtcagcgtgttcctgcagcttttgaagggctgtcagttgcaggcccaacgggagcttacgagtttcacgctaaaagcgctgacgggcgagtggctgacgccagcgcaaccagcccggccccggctgaggtggtgcttaccgtgctgagccgtgagggcgacggaacggctgcggcggatctgctggctgtggttgaacaggcgcttaacagtgagaacgtgcggccggttgctgaccgtctgacggtgcgcagcgctgaaatcattccgtacagcgtggatgcgacgatctttctttacccggggccagaagctgagccggtgatggaggcggcaaaagccagcctgcagaaatatatcgccagccagacgaggctggggcgtgatattcgccgcagtgctatttatgccgcgctgcatgttgaaggtgtgcagcgtgttgagctggcctcgccgctcgctgatgtggtgctggataagacacaagccgcttcatgtacagaatggagcgtaaccaacgggggaacggatgaatag

SEQ ID NO: 121469 - DNA, 399 bp, Enterobacter cloacae
atgcaaaattatgcgttaatcaaaaatggtgttgttgaaaacgttgttatctgggatgaaaatggaaatatttttgacgattacactgtggttaatttagaaggactaacagcgggtattggctggacttatgacggagagaagtttagcgcgccaccagagcctgaacctactcacgatgagcttgtacagaaagctgaaatcctgaagcaggcattaatcagcgatgccaataattatattgatagcaaccagtggccttcgaaactggcactaggacgcctgtcggatgcagataagcagtcatttaatgaatggcttgattaccttgatgcgctgggagcggtagatatatctgctgcacctgatgtgaactggcccagcagccctgaaaaatga

SEQ ID NO: 121470 - DNA, 3444 bp, Enterobacter cloacae
atgagtgacactaacctgcgtttgcaggtaattttaaatgcggttgataaactcacccgcccattccgatcagcgcaggccagttctaaagagctggctaccgccattcagcaaagccgcgcaagattaaaagaactggacgcccaggcgggccgtattgacggtttccgcaaggcaagcgcgcagctggccgtcaccggcaacagtcttaaagccgcacgcgaagaagcggcgaagcttgccacgcagttctcggccactaaccggccgacggcggcgcaggcgcgtctgctggagcaggcaaaaaaccgcgttaacgagctgcagagcaaatacaacggcttgcgtcagtcggtgcagcgtcagcgtcttgcgctcaatgaggccgggctggacaccaaaaagctgagcagtgcgcagcgggagctgcggcagaatgccgacgaaacccggcaggcgctggaccgacagcagaaatcccttaaacgcctgggcgagcagcaggcccgtatgaacgccgtccgcgatcagtattcgcggcgccttgaggtgcgggatcgtattgcgggcgccggagcaacgactactgccgccgggctggcgatgggcgcgccggtgatggctgccgttaaaagctatgccagcatggaagatgcgatgaaaggcgtggcaaagcaggttaacgggctgcgggacgacaacggcaaccgcacaaaacagttttatgacatgcaggatgccatcaaggccgccagtgaacagctgccgatggagaatggcgccatcgactatgccgcgctggttgaaggtggcgcccgcatgggtgtgacaaaccagaacgattcttacgaagaccagaagcgtgacctgctggcctttgcatccactgctgcaaaggccgcaacggcattcgagctgcccgctgatgagctggcggaggggctggggaaaatcgcgcagctctataaagtgccgacccgcaatattgaacagcttggcgatgccctgaactacctggacgataacgccatgtctaagggcggcgatatcatcaatgtgctgcagcgcatgggcggcgtggctgaccggcttgatttccgcaaggcggccgcgctgggttccaccttcctgtctctgggcgccgcgcctgaaattgccgccagcgcatcaaatgcgatggtgcgcgaactgtcgattgcaaccatgcagagcaagcggttcatggaaggtatggatctgctgaaactcaatccagaagagattgaaaagcagatgacaaaggacgcaatggggaccattcagcgcgtgctggagaaggtcaacaaactgccgcaggacaagcgcctgtccgccatgacgatgatatttggcaaggagtttggcgatgatgcggcgaagcttgcaaacaacctgccggagctgcagcgacagctgaaactcacatcaggcaatgaggctaacggctccatgcagaaagaatccgatatcaataaggattcactttccgcgcagtggttgcttgtgaaaactggcgcgcagaacgctttcagtagcctgggtgaaaccctgcgccagccgctgatggatatcatggggtacgtcaaaaacgttaccggggcactgcgtcgatgggttgaggctaacccgcagctggcgggcacgctgatgaaagtggctgcagccacagctgcgatcaccgttgtgctcggcacgctgacggtggccgtggctgccgtgctggggccgctggcggtgatccgttttggcctgtccgtgctgggtgtaaaaacactcccctccgttatgtctgcagtgacccgcaccggcggcgcgctgtcctggctggcaaatgcgccgctttccctgttgcgccgtggcctggctgcatccggcagcagcgccggattgctggcgtctccccttaactccctgcgccgttctgccgggctggctggcaatgcgctgaaagcgctggccggtgcgccgcttgctgtccttcgcggcggaatgtctggtattcgcaacattatcgccatggtaatgaatccgctggccgcgttgcgcgggggattatccgcagccggtggcgtgctgcgttttctggcgtccggcccgctggccctccttcgcgttgcgctgaacgggatttctggattgctgggcgccctgcttagtccgatagggctcgttgtggcggcgctggctggcgtggcgctggttgtctggaaatactggcagccgataagcgcatttttaggcggagtggttgaaggattcaaagctgcagctgcgcctatcagtgcggcttttgagccactgcagcctgttttccagtggataggtgacaaggtccaggcattgtggggctggtttactgatctgctgacgccggttaaatccacctctgcagaactgcaaagcgcggcgtcgatgggacggcagtttggggaagcgctggcggcagggctgaacatggtcatgcacccgctggattcgcttaaatcgggcgtgtcctggctgcttgaaaaactcggcatcgtcagcaaggaggcggccaaagcgaagcttcctgagcaggtcacgcggcagcagccagccacggtaaacacagacggtaaagtggtgctgccgcctggcggattcccgccgatgggttttgctggcatgtacgacagcggcggtaccattccgcgcggccagttcggcatcgtgggtgagaatggccctgagattgttaacgggcccgccaatgtcaccggcaggaaacggactgctgatctggcgaggatggcggcaacgctcaatccttcccggccggaaccggccagcgctaaacaatatcctgaacgcgcgatagttctgccgcctgatagtgtgaacggtccggcaaatcttccggtaatcaatcgtactgctgagctggtgaaactggcggcaacggtaagcccggttcgtgatgtaacagccagcccggagcaacggcctgaaagcaggttaatactgccgcctgatattgttatcgccccggtaaatcgtcctggtcgggatcgtgctgcggagctggctgatatcgctgcggctgtcatgccagcaccggcagttacggaaatcacggataacagggctgacccgatggctatgcgccagaaggtgttcgcttccgtggtcgctggcgtaatgggcctggcggctgccccggcagaagccgcgccaattcatccgtacagtgtacctgtcaggacgcaaccggcgccgtcggcgaaggcagaaagacagccgcaggtaattaagtacgagataagcgcgccaattcatattgtcgcccagccaggacaaagcgcgcaggatatcgcccgcgaggtggcccggcagcttgatgagcgtgagcgcagggccagggcaaaaacacgcagtaatttcagtgatcgaggggggtacgaataa

SEQ ID NO: 121471 - DNA, 486 bp, Enterobacter cloacae
atgatgatggtgctggggttatacgtattcatgctgcgcaccgtgccctatcaggagctgcagtatcagcgcagctggcggcacgctgccaacagccgggttaaccggcgcccgacaacgcagtttcttgggccggataacgattcgcttacgctgtccggcgtcctgctgccggagattaccggcggcaggctgtctttgctggcgctggagcaaatggcggagctggggaaagcctggcctttgattgaggggagcgggacgatttacggcatgtttgtgatcgagagtctgagccagacaaaaacagaattttttgagagcggtatgccccggcgcatcgaattttcgctgagcctgaaacgggtagatgaatcgctgtctgatatgtttggcagcctcagcgatcagctcagtaatttgcaggactccgccacctctgcgataggcaatatgaaaaatacggttggggggttactgcagtga

SEQ ID NO: 121472 - DNA, 555 bp, Enterobacter cloacae
atgataagaatcaggctcgtcactctcacttctctggtagttgcattcgcactgacaggctgcaatgagtcagacatcgacaaaataacgttaattgggaaagacaaaagtgcccttgagagccagtaccacgcactctttgagaaacgaactccaaacatcgaagcattcgcgctgtttgaaaaaataacacctgaaagtaaagaaccgcataccaccggtggtttaattgatggaaaagtagagtcgagcatgacgacaaaggttggcaaatacaccttcatgcaactcgatgaaatgctgtcgaaggagtacggtaagccagtagcaaccaaagatcaggtgttggatgtgacagcgttagatggtctagattgtgctaaaaccatgtcatgcgcagcaggtaagtattatgaaatcttccgtggtaaggaacggctgatcatgatgattaacggcaccggattcatgaataatgaagagggtgtgacgttactgaccttcaccgacaaacatttaaaaatggcacgtctggaagaggacaatagaaaataa

SEQ ID NO: 121473 - DNA, 186 bp, Enterobacter cloacae
atgagcatcgggttatcaatctccagattttcccgaaagatgccggagcccctggagaggggccggaaattattcgtcagcatgctgacaaacttaagtcgggacttgagcacttctgtgggacggctggacccgcttttctccgtagtctgctttctcagactgatgaagaggggcttcccgtga

SEQ ID NO: 121474 - DNA, 597 bp, Enterobacter cloacae
gtgagttatcaatggttacatgaatccgttaaagctaaggtatcagaatgtgaaggcctgcttctggctgagctgattgatgaagggtatctcctgacggatgttcaactccgtgcgcttcgacgcttttctttcgtaatggctgtaggtctgctggcgcaggaactgggtatcttgccttactctccggaacgaattgcgaccgccgtctgggaaatagttgttcgttggctgagtgatacctctgtgcaatataacccggtccagcaagcattgattgatattcagcgtgatcttgtaaaaagggaaggggcacatttcatcggcctgaaagatcgtgagagccgtaaacccggaaaccactgggggtatatccaccatactaatgaggattttttaatcttcgcacctgtatttgaagagtggtgccagaaacattcattaagcgctcgagaagtcgctaaggagctggcatgccgaaaacttcttcgggtagaaagtaaagggcattacaaaaagcgtcctcttactggtatggataagtgttactaccatattaagcgggagtttatcagtgttgatttgaatttttcttaa

SEQ ID NO: 121475 - DNA, 183 bp, Enterobacter cloacae
atgatgtttgccgggtggcagctacgccttacccggcctacaaaagccgttcctgtaggcccggtaagcgaagcgccaccgggctttttttaccgcttcgcggttaactccgctatccgcacaatcacctgcaccgctttctccatcccttccagcgtcacgaactcatgcttgccgtggtag

SEQ ID NO: 121476 - DNA, 4434 bp, Enterobacter cloacae
atgagcgataacaacgcggcccgtaagggcgacgagattattcactccagcatttttgctgatattaccagcattgtggcggaaggcgctgcctatgcggtgattggcgcggcggtgggcgcggcagcgaccgtcgcgaccccactgctgggagccggggccgcagcggcaggcgtggcggcaattggatccagctgtctgttgagcggcattattggtggggttctggcgaacgtcgcggggatcaccgacgatatcagcaatgctgctgaagggctgggcaacgcgctttttccgccgtcgcctgcgggtaagatcaccaccggttcgagcaatgttctgacaaataaacttcccgctgcacgcgccgccgggacgttaacgcctgccgataccccgtctcctgagccgcagtcgccgggcagctttgccgactacgcgggtatgctgctctccgctgccggacagtttggcagcgaaatgtggcagccgagcgttgcctcagccgccgcagggacctcgccgctggaagaagacaaggtggcgtgtgataaacactccgggccacagtatctggcggaaggctccaaaagcgtcttcatcaacggacagcctgcggtgcgcgcaaaagatcgcaccacctgcgaaggcaccgtttccgacgacgtctccccgaacgtgatcatcggcggcgacaccctcacggtccgcgatatcaaaagcggtaaaacgccgggtctggcgttggggatgattgcgctctccctgctgcgcgggcgtccgggcaagatcctgaaaaacatgccctgcgcgctggctgctgccggtggcgggatgctggctgatatggccgtcaacgccgtgttcggctcctcgcacccggttcacgccgctaccggcgtgaaggtgctgaacgacgacgatgaactcgatttctcgctgccggggcgctttccgctgcgctggcagcgcagctacaacagcctgaccatccgcgaagggctgtttggtctgggctgggctaccacctttgacagctatctgacgctggaagaaaacaatgccacctggttcgatgaaaccgggcgcgagctgagctttgaactgccgccggtcgaccgcgcgttttacagcatcagcgaaggcattatcatccgccgcaatgagagcggcgacgtggcgattgccgacgatgacggcgcggtgtggcgtctgtataaaccgacccgcgctaacccctccatcctgcgcctggcctccctcagcgacgagtacggcaatgcgctgctgacggcgtgggacgagcacggcaggctggttggtatccatgatgagtcgcgggcgatcgacgtcaccctgcgctatgacgatgaacgtttcccgcagcgtgttaccgcagccagccatctcgacggcaacaaaacctggccgctgatgcagtgggggtacgatgcgcgcggccagctggcgagcgcgacggatgcctccggcgtggtgacgcgtgaataccgttacaacgaccacggcctgatggcctggcaccgcttgccgggggggctggagagcgaataccgctggcaaaaattcgaccactggcgcgtggtggaaaaccgcaccagcaccggcgacggctgtcgctttacctatgatctagccgccgggctgacgaccgtcgaacactacgacggtcagacgcgaaagcattactggaacgcgcaaaacctcattgttcgctacgttgacgagagcggtgagaactggcgctacgagtgggatgacaacgaactcctaacgcgtcgcatcgatccgctgggtaatgccgttaccttcgtctatgacgacatgggcaaccgggtgcaggagatcgacgccgacggcaacacccgcaccaccacctggctggagcaccgcgcgcttcccgcggccattatcgaagctgacggcagcgccacccggttctggtacgacgaacatcacgggctgaagcgcgtggtggacccgatggggcagaccacgctgctgcgtcgggacgagtttggtcaggttgtggaagaagtcgatgccgccgggaacagccgctaccaggagtacaacgaggccgggcagatggtgcgtgcgacggactgttcgggccgtgtgacacaataccgttatcatccgctgggctggctggtggctgagacagccgccgacggtgaagagactcgctaccgctacgacgccgcagggcgtccggtgcagctcgatcgcccggaaggctggacggaatcgctcaaatggaacgaacgtggcctgccggtgaagcatgcgggcgccgacgggaaagagagcgagttcagatacgacgaagcggggcgcttaaccgccacccgaaatacgcagggtgaagaggtgcgccgccgctgggacagccgcgggcgtctgattgccctggaaaacgagaacggcgaagcgtatcagttccgctgggggccagactcgctgctgctggaagaggtggggcttgatggcgtggcctcgcagtatcgctatgacgcctgcgggcgcacgattgcgcgcacctttgccgccggacatccggaggccattacccattccttcgcctggagcgcgagcggccagctggtcgcccgcaccacgccggaggggcagacgcgctaccactacacgccgtccgggctgttaagccggattggactgcatcccgcgctttcagccgatgcctggagtgccgaggccgagcaggagcttgtgtttgagtatgacgcgctcgggcgcgtcacgcgcgaagctggcgagcacggtgagctggcgtgggagtatgacgcgctgggcaaccgcacctccgtcacgctgcccgatggccgcgagctgaagcagttctactacggcagcgggcatctgctcagcattgcgctcgataagctgtcggtctccgactttacccgcgacgaactccaccgggagaccagccgcacccaggggctgctgaccacccgcagcgaatacgatcgtcttggccgactgcatcgccgggacgtctttaccggcaatgcgcagcgcccgtcgccgcgccgctggtcccgccgctgggattacgactatcgcaataacctggtccgcgaagagcgggacgataatccgttcagctggtaccgctggcagtacgacagcgcaggccggctgatggttcaggacggcacgctgcccggtcaggagcagtggcgctgggatgcagccggtaacccgctcgaaggatctgttgagaaggtcacgcacaaccggctgacgcagctgaacggcattcgctggcgctatgacgtccacggccgcaccgtggagaaagataacggacagacccgctggcactaccgctacgacggcgagcaccgcctgacggaggtcatcagccagccgcgggaccgcaacaggccgcagacgcaggtcagcttccgctacgatccgctcgggcgacgcatcagcaaaacgcgccgccagatgctgggcggacagccagccggcaagccggtcaccacgcggtttgtctgggaagggttccggctgttgcaggaagtgcacggggaagtgccgctgacctacgtctacagcgatcaggacagctacgatccgctggcgcgtatcgacggcgttgatgccccggaaatcttctggttccactgtcagccgaacggcacgccggaacggatgacggatagcgaaggacaggtgcgctgggaaggggtaaacagcgcctggggcaagctgctgcgggaaagcgagacgcaggtatcaggatattctcagaacctgcgcatgcaggggcaatacctggatcgtgagacagggctgcactacaatctgttccggtattatgacccggactgcggacgatttacgcagcaggacccgatagggctggcgggagggattaacctttaccagtatgcgccgaatgcgctggggtgggtggatccgtgggggttgagccgcgagtgtagcggtaaaacaaaacctgatttctatgttggtccaaatggccctagttcgactatgccttctacagcatatcgttatatggatagcaaatatgctccacagacaatagaaaataaatcagccccgttaagttattttgggtatacgaaatataaatctgcacatgaagccagggacgcctatcaaattttttatgagaaaggtaatcctgattcatggagtgatgcacgtttattaggtgagtttgatacattacaactgtataaaaatggagtgcctcaggtgcaagtacctcttgccaatggtggtcgagggcctggatatgagcttctcaccagtgcatatcctgagtatggtaaaggtggggcattacagttgctaccaatcgaacgtaattaccctgttatttttgaacgtgttactataattccggagtaa

SEQ ID NO: 121477 - DNA, 708 bp, Enterobacter cloacae
atgaaaggattatgtaccgttctcgcagccacgtctgttgtgctggtgaccggatgcctggcgaaagaaccgccgacgcaggtagtttatcgattcgatgatcaccgttatctcgaactgaaagggtgggattgtgaaggcgaactctggtacacggatactaagcgaggcattcacaccgaacccgtaagtcagttttatcgactctttacccgtaaatttattcatccatcagagcgatatattgcactgacgggatggggagtgagtggattcatagtatctaaggactatgggaaaacgtggcgctctgtagcgttttcaccaaatcataatgaacccaatggtgatgactacgcgccgtatgaggatattatttctttcaccgtcgtcaacgatcagggctttttactaaccaaacaccagctgtatatgtcgtcaaaaccatttgaagacccgcgcattctgcccggcgggccggggattgcctataccgtggatgacggaatgggaaataaagtaagcgatacgctggacccccgtttccctggctgggcctggggaatggtctatatgactaagcaggggcttaagcacagcacgcagcaatttaaagctaactggcaagatttacccgacagcgtacccgaagtgaaggggtacaccggctgggatcatatgcgctgtgatatggatgcggggcgataa

SEQ ID NO: 121478 - DNA, 300 bp, Enterobacter cloacae
atgctgaccaaacaccggctgtatatgtcgtcaaaaccgtttgaagacccgcgcattctgcccggcgggccggggattgcctataccgtggatgacggaatgggaaataaagtcagcgggaagctggacccccgttcccctggctgggcgtggggaatggtctacatgactaagcagggactcgagggcagcacgcagcaacttaaggctaactggcaagatttacccgacagcgtacccgaggtgaagggctataccggctgggatcatatgcgctgtgatatggatgcggggcgataa

SEQ ID NO: 121479 - DNA, 360 bp, Enterobacter cloacae
gtgaccattaaagcaaagctgttagcgctgggcgttctgctggcgcttttcgctgttaccttttacgcgggttatctgaaaggctggtatgcgcacagcgacaaggtaaacagcgagcatgcagcgaaaaacaaaaaagcggagaaagccgtcgccactagtgagcagaaagcggcagcggccagcgcagaaggaaaagtgatttaccggaccatttaccgagacgtggtgaaatatgttaacgacccgaatcatactaagtgcgattttgacgatcacgctgtgcagctgcggcagcgagcaatcgacgcggccaacaatatcccaggatttgatgagcccgccgtgcaaggcaagtga

SEQ ID NO: 121480 - DNA, 411 bp, Enterobacter cloacae
atggcggtgcaatttgattgctttctgaatgtagctaaagactctcttgataagagtggtgaaacctggactcgcaacgcaatcagtagagcctattattacatgttccatgcagtccgtgatgtaattaataagccaattccaaagaatgataaaagtggaaatccctttccctttggtgagcataaaaggctttcagaatacctgtgcaatggtgatgcagcgacagactataattttgacgcggctcaacttgagaaaattggtttaaagcttagagctgcgcatcacaagcgatgtgatgcagactatgagctgcatttgaaaatgaataggttagaggcaataaagctattagcggtcgcagaaaatattaagcaagaagtcgataagctcaaacagccagaatag

SEQ ID NO: 121481 - DNA, 759 bp, Enterobacter cloacae
atgcctcttgcgctgccgaaaaccaatgaacttgttggaaaaatcaaaccgtctttagtctctggagaactcttgttgagtccttttgagcttagactgttggcgcgtgaagccgataaaatcgatgttccacatcatcggtggtgcattcaggggttgttggctttcctcaatgaaaatgatgaggagggcattgcactttgtgaacaggctgtcgcttatgacccaaacgtttcacagtcatggtgtaactatgcctcggctttgaggtaccgacatctgctcagtaaagagtgggaagttgtcaaccgtagtgtagagtataaggggttattgaccttatcatatgcacatactcttgcttcttattgggtagatattgaactgttgaatcatacgacagaaattattgaatccatggaaatgcctaaaagattcaataaagtccagttagatctatttggaagcggtatggtaacgagacaattgttgcgtgatgcaggtcctgccgttgcatctgatttgcgcgccttaggcgcagttgttcgtcagatagctgaggaagaaagattaccacgccttaaacgacgtatctcttgtcatgagggtgagtatgcatgtgtttatgcaattgacactgatgatgtagattatttgattcgattggatgatttattatttgatcgaattgtttctgctgggattaagtccaaaaattgtatcgctttttttgaacctaaattaggggatgataattaa

SEQ ID NO: 121482 - DNA, 195 bp, Enterobacter cloacae
atgaaaactgaaactgttatcagctttttcggcaccaaaactgcggttgcgcgtgctttaggtatctctcaagttgccgtaactcgctgggggcctgtagtacctacggcatgcctgacgatccctcatcatttttcgtacgcgccggtgcatttctgcgcagcgctaacttcgtcaccaaactgggtggtatga

SEQ ID NO: 121483 - DNA, 324 bp, Enterobacter cloacae
atggaagcgctacccctacaggtaacactgtacatccacgtatctgccaatccccacttccctgcactctatctggttcatacctgtgacatgtcacagaactatccagatctttacgtgctgctggaaacgcgcactgtttgccttgagataaaccagccagaaccgatagatatcatcggtaaacaagtcgaacgccttcagaaagaaaaggcgtcgattgtcgatcgggctcaccagcgtgtcgccttcattgaagacaagatccagcagctgctgtgcatcgaccattcaacaatccaggaaagtgatatcccgttctga

SEQ ID NO: 121484 - DNA, 2199 bp, Enterobacter cloacae
gtgacaatctcaatttacaactgcctgtttaagccgaaaaaatcggccatcaaagatggtgccgttgcgttggcgatcagcgtggaagcacccaacaaaaaaatcgcagaaagcatcgtgacgggtaagctctgggagcactatccggcgaacggcgataacttctttaaacctgaaatatgggaaaacacagctgatcagcctcaccctgagatcggcaagtttgacgagcactttgctaaatcccatacgttcgatggcgaaaaatggatggtaaacgtcgaaacaactggcgggatgagccaccttcctgacaatgatgaaaaattagactttatgactatttcaccgcgcgaacgcttcgcaacggtggtgttatttggccttgcccagctggatggggaaatttattctcaggtttgtgactatcttgataatctcgaaaacaccagccagtacggtgacgaggaggatgatcgcttaaatcgttacatcattaatgcgatggaagcgcacccgcctgttcactacatgcaccaggaggggcttaataatctcctgcaggcaatttatgtgaagtttgagaaccagttacccggcggcgccgcgctttactcatttattaaaaaatggactgacaacccgggcaaacgtgaagaaatgctgcctcagaacagcaccagcaccagcacggaagataatacccacgctcaggttgcaccacagcgcggttacaaacacacatatgccactctggatcaggagatcgctctcgcactgttgccaatagagcctgcgaccactgtatctgtcagcgctctgcgtcaggcggaacgtatcattgaagaagaccgggaagactttaagcgctggtctatggcgctgcgcactactgagcagatcctcaaatattcccgcgacactatttttggcgttatccagaatgtgccagcgaaagatacgcatcacttccccgattcattacgccgctttatcgacagttggcttgccgaaaatggtgtgttcgaacagagccctaatgtttcggaagcaaccagtaaatctctggcagccgggcgtggcgagtatgttgacggtatcagtgaccctaccgatcccaaatgggtaaaaacagaaacgcagaccacagtgcagaacgcctcaaatgaggcggaaaaagtggaagcggttactgattcgcaggcagaagccgcgcgtgaaacgctcaataaaatgggctacagcgtttacgccagtgaatcagagcaggagcagagcaacagcgagcaagttaatagtgcagagcaatcagcagagtcgttggtgcaagaagaacctcgccctaacgttaatgacgttgaaaaaagtatcaccgaacgcaccggtaccgagatggaaaatctcgacctgtggaagcgcgttttcaaaactgatgaacgtttcacaaaacagtttactcagaacggtggtggcacatcgatcaacggcacctacatgacgatgctggccactcgtgaatttggccctaaaggtattggctggggcgttgatattctcgaagaacgttttgacaatggcgcgccgataacccgtacagtcaaaggccaggacgggaacaatacgtgggagcttattccagacggcattggcggctacctcacagagaaacatcacgtgattaagatccgtctctggtatgtgcgtggcggcgtgcgcggtgaagagatttcattcggctgcaccccgtatctctacgggagtaaatacggcccactctgcgacggtgaagcgacaaagaaatcacttaccgatgcgacgaaaaaggcactctcttctctcggtttcagcgctgatatcttcatgggtctctatgataaccctgaatatcgacagaaaaacaaagaagaattcgcccttaaaatcgccagcgataatgcagaagatgctgcgcgcttgcgccaggagctggacgacaaacttacgcgagttgcaaacaccttggcaaccggtgtctctgccaacgaagtgaccaaagtattcgcatctatcgcccgcgaagtggaggtgcaccgtaaagatgctgaggccaaaggcgacagccagcatgccaattatctgagtaaacgtctgcgtcgcctgaccaccatcaaagatgaacgtctgaaagaactgaacaaagcccaggagaaaacagcatga

SEQ ID NO: 121485 - DNA, 561 bp, Enterobacter cloacae
atgagcaaggtaaccgcaatcgcattagcaaatgattactccagcctgttaaacctgctggaaacctctgacgagttgacgccggaaatgatcgccgacaccctggaagggattgaaggtgagctggccgatcgcctggatgcagttatggtggtggcgcgcaataacctgggcaacgcgaaaacctgtgacgaagagatgaagcgtctggctgagcgcaaaaagtctttcgaaaataaagacaagcacctccgcaagtacattctgtcatgcctgttaggcgctggcctggataagctgaaaacccccagaaacacctttactgctcgtcagggtactgtaagcgtggtggtcgacaatgttgatgcgttacctgacgaagtggtcacagttcagacagtaatcgcccctgacaagaaggccatcaaagaaaggatagaggcagccgaagccgcagcggaacaaatcaaagccgatggtggtgaggtacctgaagagttacttaatccggtaccgggtgcgcatctggaagtcggcgaacgttcattacaggtgcgctaa

SEQ ID NO: 121486 - DNA, 183 bp, Enterobacter cloacae
atgctaaaactgactctcaaaagaggtgatgcggtacacgtggtgtttcctgatggaacaaacgggatcatcgaagcacgtagccgcagcgagttggggttacatcttccggagaacgtcaaggttaaacgtgagaaaggtgcgtttctggaaggaaacctgattaagcgtaatcagaattaa

SEQ ID NO: 121487 - DNA, 249 bp, Enterobacter cloacae
atgagacacgatcacgacattatcaccagagaagagatgatagaactgacggggactccgcttaaatcaaaacagtgcgatgctctgcgtcgggccgggatattctttatggaaagagcggacggccacccaaaaacaacatgggggcatttcatgaaccccattaaataccgcaaccaggaaatcactccggtgcgcgaggatgaagaaccagacttcggagccgtatttgatggccggaaagcgtaa

SEQ ID NO: 121488 - DNA, 1017 bp, Enterobacter cloacae
atggccggaaagcgtaaaaaccccgctgacagctggatgccaccgcgtgtatatcgcggtaaagcagcttatgaatttcggactaaagataataaagccgttcgcctgtgcgctcttaacgaaacgcaggcatcggtatggctcgcgtatgaaaaagccgtgggcgaagaagtcaggaaaaatacattccaaaccctcgcagatatgtttatggcctcccccgactttatggatttgtcaccagaaaccagaaaggattacacgaaatattcgggcaaggtattacctgttttcggcaaaactgaccccaacaaaataaaacctgaacacatccgacgctacatggatcagcgtggtgtatcaagccgaacgcaggcaaacagggaaaagagtttcctttcgcgggtattccgttggggctacgaacgtggatatgtcgaaagaaacccatgtcaaggggttaagcaattcaaggaggtttcgcgcgaacgctacgtgacggatgaagaatataatgcagtgtatgaggttggggctaatgtggtccgtgctgcaatggagatcgcttatttatgcgttgccaggcagagcgatgtcctgtctttaagtgaagagcagatcagcgacatggggatatttatccgccaaggtaaaactggcgtgaagcagatcaaggcatggacacctcgtttacatgcagcggtttcgctggctcgcgcgctgccgctaaaaccaggcatagggagcctgtttcttatccaccaacccagtggaagcaaatacacacgtgatggctttaactcgcgctggcgcgaggcaaaactcgcagcccaggctaagtaccctcacctgtcgattgattttactttccacgatcttaaagcaaaagggatctctgatctcgagggtagccttgaagagaaacaggcaatttccggccataaaaattcgagacaaacagcaatttatgacagaaaggtaaaagtggtgccagtagttggagggcaaaaaaactga

SEQ ID NO: 121489 - DNA, 564 bp, Enterobacter cloacae
gtggagctgaatgtatctccacaggcgaaacgcaaatgggacggcgtaccgccagtactgacggcgaggctggtcagtaaagaggtaaacgggaagatggtgcgtatcctgacgtcaatgaatgacccgctgagataccctaaagcagacattaccgagctgtacgggcatcgttgggaaatagagcacgggttcagggagatgaagcaacatcttctgaataatgaacaggtgctaagaagccggaaaccggaactggtggagcaggaactgtggggcgtggtgctggcctataacctgctgcgatttatgatggcgcaaatgatgtataatctgaaagggatagagccatatcagatagattttaagcaggcgagtctgtatctgtcggcccagctaagtctgttaccagcggtctcaccgggtaaaatcccgaagataataaatgagatactggccatggcggaaagttttgtgctaccgggacgcaggaagaggcattacccacgagcagtaaaaaagaagccgcaacgctacgcgttacggcaatcttcaaaagcttaa

SEQ ID NO: 121490 - DNA, 723 bp, Enterobacter cloacae
atgcttctaagtcaggctctcaacaccgttcataattttacgccggtggcgttttctgcgctttctgaactactctcacctgaacttattgatgaatgtctcactgataccggtatcgtcactatccgcaaacgtcggcttccgctggagatgatggtctgggctgtaaccgggatggcattgtttcgttccctgtccatgaaccagatagtctcacgcctcgatattcttcttcccggtaaacgtccctttgtggtgcccagcgccgttgttcaggctcgtcagtggctgggggctgatgttattcgccgggtctttgaaaaaacgcgccagctctggtttgaaaaaacacccttgtcacacttgaatggactcacgctgctggcagtggatggaacgttatggcgaaccccagatacaccagaaaatgatgccgccttcggacgcacggcgaatgccagttcccgctctgagtggccccaggttcgcatggtctgccagatggaagtcaccagccaccttctgacgggaacggctttcggcagcgtatcggcgaccagcgtaattgaccttgcggcacggctcgcggagcgaacgccggaacatacgctgacgctcatggacaaaggcttttacgctctgggactgatgcaccactggcagtcattgggtgtggagaaacactggttaatcccgctcaaaaaagacggcagtatcaggtaa

SEQ ID NO: 121491 - DNA, 1023 bp, Enterobacter cloacae
atgatcaccattcgtgacgtcgcccgccaggcgggtgtttctgttgctactgtctcccgtgtgctgaacaacagtgcgctggtcagccctgaaacgcgtgaaaccgtgatgaaagccgtgacccagctggggtaccggccaaacgccaatgcccaggcgctggcgacgcaggtcagcgataccattggcgtagtggtgatggacgtgtcggacgctttcttcggcgcgctggtcaaagcggtggatgtggttgcccagcagcaccagaaatacgtgctgattggcaacagctatcacgaggctgaaaaagagcgttatgccattgaggtactgatccgccagcgctgtaacgccctgattgtgcactcaaaagccctgagcgatgaagagctggccgggtttatggagcagatccccggcatggtgctgatcaaccgtatcgtccccggctacgcgcatcgctgcgtcggtctggataacatcagcggcgcgatgatggcgacgcggatgctcatcagcaacggccatcagcgcataggttatctggcttccagccacggtattgaagacgacatgatgcgccgcgagggctggcaaaacgccctgaaagagcagggcattgcgccgctggagagctgggtaggtaccggttcgccggacatgcagggcggtgaagcggcaatggttgaactgctggggcgtaatcttcagctgacggccgtgtttgcctataacgacagcatggcggcaggtgcgcttaccgcgctgaaagataatggcattgcggtgccgcagcatttatcgctgatcggttttgatgatatcccgattgcccgttacaccgatccgcagctgacaacggtacgttatcccattgcgtcgatggcgaaactggcgacagagctggcgttacagggggcggctgggctgttagatccggacgcaacgcattgttttatgccgactttagtacgccgccattcggtcgctatccggcaaactgtggctccgatcactaactga

SEQ ID NO: 121492 - DNA, 438 bp, Enterobacter cloacae
atgaaaacacctaatgaagctgaatcagagcttttacagacattagctcaagtacgcagcgtaaataaaaagcgacatcatgacgaggcggaagagccggataagccatcggtagtgaagaggcaacgcgttacacaaggcttaacgcggattagtactctcgatcgccaggctgtactgcatgcagccatacgggacattttgctggggaaaatcacacagggagaggcgctgaaaaggctcagggtcgaggtgttagggctgaagcaggatgaatatgcaaagctggtcagcgtatcccggaaaacattgtcggatgtagaaaataacagaggcaattattccgctgacgtcataaataaaatctttaaaccctttgggcttcaaaccggactagtgcccgtttcaaaatcgcttatcgcttcacttttctcataa

SEQ ID NO: 121493 - DNA, 1350 bp, Enterobacter cloacae
atggagacgttaaccgtacaggcatatctgaacgaaacatggacggatatcgctctcatcaaatatcctggaagtgaaaaaaatgactggaatatcacgcagttagactatcttactgagtatgcgattaattttctcgactatgatgattttcacgcagtctcagtcaatcaccctgtatcactcttttttgatgaccatggccaaccgggctggctgcgatttatcgacgatatcattcccgccggagcaagccgccgttactggattaatgcgctcgacatcagtgagttacccgttggccagcaaaatttcttattgctgaaatttggcacaatgtcccctgtggggaatttgcgcataaaggaatccgtcccagaatggaataaattcgccagcactaaaacgtttacggttgcggacgtcatcgatcgtgcggccgattttctggattatgcccaggaaagaggcgcggcggcgggtggtgcaaccggtgctggcggtgaagcgcctaaacttttgctgcgctgtagtgaaactgatgccatctggatcgatacctggcaaaacgagccggataaccgggaccgctattatttggttaaatatccacgcggtaacaggacagaagtggattgtaatattctgcgagctgaattccattattatcatgagattaacgcgatgggtttttccacgatcccagtggaaacaatgcgccttgaagaaggtagccattacccgtctctgtggttaccgcgtttcgacatagtgagaaatgagcaggaccaactggtcaggctgggtatggaatcggtgtattcgctattacaaaaggcacccggcaccctccttgatcatgagacaacgttgcgcgcgttaattaataaaatcacctccagccatatggtccagcagcagggttatcattttgatattccgggatttgtaacagaatgggtgcgtcgcgatctgctaaatattatttttggaaatagtgacaaccatgggcgaaataccgcctttgtgaaggctgaaaatcaaattatgctctcccctgtatatgactttgcgccgatgaaagccgatcctgaagggataccaagaaccctgaagtggtcattatcttgcgaatcagggggggattataatttcaacactatcgcacaaacgctggcggagtggatccctcccgcaacattacttgatgctctgcatgaaacagccgttcagcttattgatctcccggaaaggctggcggcgcgaggcgttcccgaacagataatggaaatgcccgcgatgggttttcgctacatcccggataaactttcccgttggggtttattatga

SEQ ID NO: 121494 - DNA, 729 bp, Enterobacter cloacae
atgaaagcctttgtttttgttaatgataacggcgctgcttttagccgttataaaaaaaatgagatccctgcgcagttcgtgtacggcgtatccaaattagaaaagatgggctttgaggtaatggtcggtcgggggaatttacttaatgatcttatttcattttggaagttcaaaccagatttgttctttatgccttttattaaaagaaaaacgatgcttttttatattctggcacgtatttttttatttaaaacaaagtttgcgggttggatgcatctcgatgttttcgcccctccagtgtctcgattaaagaaagtaatatattcattgcttctgccatttttaaagtgttatgtaagaaaaattgatgcgattttctttctttcggaaaagtcacgcgatgaaatcaaggcctcaaggggacttcattctcatcaatgtcactttatatcatggggaggggatgcaactttctatgcgccttttattaatggattacataacgagaatataatttcgacagggcgtgaaaatagggatctgccgtctgtaatgtcatcggtaaaaaatagcgacgttacaattgatatctataccagcgatttaaatttgcctgatagctatgcaaatgtaaatggcgacattaggataaataaaggtcgctgggcatatacagacttgcttgagaaagtaagtgcggctttgttgaataaatcagatttcgggtaa

SEQ ID NO: 121495 - DNA, 150 bp, Enterobacter cloacae
atgtcaaacccagcttatttgtttttaacagatgaaaatggttctcccatggttggctcttgccttgtgtcagggcgtgaaggtgcaattgaactcaaatcgttcactcataatgtcaacattccagtcgacggaaataccggaaattaa

SEQ ID NO: 121496 - DNA, 945 bp, Enterobacter cloacae
gtgaccatagattcgttttccggcactacgctcagcgcctcacagaataaagctggccagacaattagcaaacaagtagataacggtggtcagtatgaaggggtatgccactgtaatcgcgattataactatgtttactttacagccaaagataaccccgccttgcagaaaagcgtcagccgaaataaagtgcaatactatgtattagatgagtatttagatgttggattgtcgatcatgatcatggggcgcggttatatcaacgttccctttgaggaccggcctaacaaccccagtggttattacaactgcgttaattcccttaatacgaccacctttacaagcggttccgacgcaaccatttatttttatgtcaaagaaccgtttatcggcaccgttactattccgttgacgttactcgcttcgctgtatgctaatacttctagtgtattagccaccgactatggcaataaactggctgatgtttttattcaaggggatattaccgcgccgcaggagtgtgaagttaacggcggtcaaatcattgaagtggattttggtaaaatctctgcgtcttcattttcatctgtagcgggcactggcctttccgataagaaaatacccatcaaggcgtcggtaagatgcactgggatgagctcagggcaagatgttgaagtttcactccatgccacccaggcaggcgcgttttcaaccatgattgagacaacaaaccaggatgtgggtattaaggtctacgacgagtttaatcaagaagtggatgttaacggcggacgcatggaaacggacatgggaacccgttctcgactgggtgtggagacgggtgagtttaatttttctgctgcgccggcgagcgcgacgggagccaggcctgagccaggaacgtttaccgcgactgccaccattacgatggaaattaaaaactga

SEQ ID NO: 121497 - DNA, 978 bp, Enterobacter cloacae
atgaatcagaaagcatggtcttttaaagcaataggtaatgatgatctccggtactttgggaataatggttatcacgatgactcaactagtttttaccaatatgacaactttgtcccaaatcataagcaagtcaaaaaaggtgatattgtcatagtaactgataggaataacgttctgggaatatcagttatagataatttaacatgtacctcgtatctaaaatctcgtaaccgatgcccatatgagaattgcacaccagcaaagttgacccttcgaaaatcaaaaaatccaaagtggcgatgcagcaatgatcatgaatttgagcagcctaaagtagaaaacgtgccggcactcaaatttaaagctgagtataagcaaaactttatacccattacttctatctcactgatggatttaatatctcataccccgcgttacaacgttcaaagttcaattcaagaaattgattttgaatgggcgagtagcctattcaatgtcatcattcagttgaagccttctgaagcagacattgatgatactcccttcgatgtagatgatcagcgtaaggcggttctacggcaaattaagcaaaggcgtggacaaaaaactttccgtgacactttgttaactcaagaggcaaaatgtgcggtgagtggctgtgaaatcgttgatatcctcgaagcggcacatatcactgcatacaaaaacgatacacataatcatgtaagtaatggactattgttgcgttgtgatatgcatactctttacgatctggacctatttgcaatcgaaccggattccttcgtaatttacttcgccccacagatcaaagataaagagtacgtaagatatcatggtaaaaagctacatgtaacctataaaattaaccacggagctcttgtcgaaagatggaaaaggtttactaaaaaatttgatttgaatgaagtgagctcgctaaattttatcatacatagttaa

SEQ ID NO: 121498 - DNA, 867 bp, Enterobacter cloacae
atgcgccatcataatttctcaacatttgttgctagtgagccgggtatcatccctgaagaaatgcactatccacaatacctacgtgtatggtatgccgtgacacaactcggttccgcctctgctgcaaatattgttaagtggatccgtaacagcaacgccactctgaaagaaaccgagattcgcattcaactggatgcattaactgttaatagcaattcacggtatcgataccttggtagccgtaaaagcgctcgtactgaccaaggcaatccatacgacgtgttgtttcgtacaggaaacctacgaaatacacggtatgaactgtatatccaagaactgcacggtatatgggacattggtggtgatgggaaaacgccagttcagattgctgtcccaaggacatatgatcgtttagtacttgaagtgagggacgaattattcacggagtctccggaggatgaaggtgacatccgtttaaaagctctgcgtgaggttattgttcgggaaggacaacccgtatttagacgaaaactcattgaagcttatgatggcagatgtgcggtaacaggttgttctatccaagtgttactagaggctgctcatataacaccttatgctggttcctggcatacccgcgcccagcatggtttattattgaaaacagatattcatactttatttgatcgtggtttgctctggattgatgacgaactaaaaataaggatatcagaacagctaactgggacggaatatgcagagttagatggcagatacttaagattaccaaaagataagaaagactggccgttaatcactcatttgcaaaatcatcggcaatattggagtgataaatataatgagggttga

SEQ ID NO: 121499 - DNA, 753 bp, Enterobacter cloacae
atgaaaccagagagctatggaccttggtttactatcttgagcttcgactcatgcaaaactgaagaggtggataaagcgttagaagaactttatgctctctttgagaatatgcagttagtcgaaaacggtgaaatccagcattccatcaatgtattgtttttattatcagatgctcaacatattgataaaagttttgatgaaatatattcattttttttagactacgttaaaaaattacaatgtaatgataaattcctacctgctgatctcttcacagaatatgatccaattcgtgattcagcttatggatatggattttggataaatgattcttatagaaaatactcagcgaaattgtacaaaatattaatggagcatagacaaatatccttaagaaaaaaatatccaatttttagagctgagctgaaaaaaaatttaaaggaagataccggaaagttttgtgaacaaatttctagaaatggcttcagagagataaatatatatggttatattccgattttagcaagtttcaaacctcatgaatttgttgatctatggcttagtattgatatgtcaaaatggcatagtgttagaacagccctaataaatcgatactctggcggatcattgcatggtgatttagaggacgagggaaaatggctaaagtttgtcaaaatgaatcttagatatcgcgcatctaagggaactggtatcgacaaattgagaatttcaagattgttgatgggactgtaa

SEQ ID NO: 121500 - DNA, 921 bp, Enterobacter cloacae
atgataaaaaatgatgaaccccttaacgaacatttgagaacataccttgagtattatactggtttaacaaatcccaagtatgctgtgctagttgatggtgagtggggggtaggtaaaacccattctatcaataaaattttcaaagaaaaaccaaacatttatgtaagtttatttggattaacaacaatacaagaagtacactcaacagtttttgttaaaatgtatcccaaaagatctcgacttagaaaatttttcaactggtttggaaactccagtatgaaagctaatgacttaacactcgcattagggccattaatcggaaacatagcaaatgctcttataaaagaaaaggttgataactccaagtcaatcatttttgatgatttggaaaggtgtaaaatagatcaagaagatatatttggtgcaataaataaatacatcgaacaccatcaatgcaaagtgattgtaattgcgcatgataaaaaattacaggaaggtttgacagataaaaaagagaaaatcttcgggcaaattctaaaagtctcaccagatattcagggcgcctttaatcaatttatcaaaagaagcaaggcaccgaaagcttttgaaagtgttaaagatattatttataaatcttttattgcttcgcaatgtaaatcattaagagtattagattacgtaattaatgattgtgcaaggttcctaccttgtattcctgaaagtttatataatgataaaagattattgtcagaattatttgttttgtttaccgcaatagatataaactataggctaggtcaactaagagacaaagacattgaatcaagaaactctgtttattattacattaataaggataagaatgcagaagatatatttgatgcaataaaaaagaattataaaaaaacgaagtcctcttaa

SEQ ID NO: 121501 - DNA, 546 bp, Enterobacter cloacae
atgttgaaaaaattagagcgctttggagcgaaaccgacgccattaccattagatgaactgaaaaagagtttaaatacattagaaacatcaatagggccaattcctgaaagttatcgtgcctatttacttcattttggcgtttctgttctttttgaagtaaatgttgttttcaaagcgtcacaaccttctccgtggtctgatgagcaaggaaacgatacgcttgagtctttgtacggccttgcagaatcgggtaaagaatatactgtctttgaaatggctgatacataccggaatgattttcgcgatcaatggttaccgataggagcctcgtctggtgataatcaaatctgtctttgcctcaagggaggtatgacgggagagatctggttttgggatcacgagtctgacccaatattcaatgattcagtagtgacctccgggctgacgaaaatagcaaactccttcgatgagtttgttgatatgcttactgctcaggatgataaaatagatgcatcaggagtagttaaagtcgatcttgatttttaa

SEQ ID NO: 121502 - DNA, 438 bp, Enterobacter cloacae
atgtcagaatcatctccgaagtaccatataaatgaagggcttatcagcctccctgatggatatcatgatcgtaccgtcaacgttttcgctctgcctgccggggatgcgccggcgttcaacatctcccgcgatgccctcaaccccggcgaagcgcttgccgcgtatatcgatcgccagctcgccctgatggcaaaacacatcaagggctggaagcagggcgagcgcagcgccgctacgcttggcgacaatctttccctgggtgaaattgtccatgccagctacctgcgcgacgggaaacgcatctggcagcagcaggccgtatttaatgtcgacagcgataaaattctggtcttcaccatgacctgcacccgcgcgccgggcgatgccgacagcgcgctgtttggcgatcttctcaggagcttccgcttccaccattaa

SEQ ID NO: 121503 - DNA, 3156 bp, Enterobacter cloacae
atgctgacgtttttcatcaaacgcccgcgctttgcgatggtgattgcgctggtcatcaccctgctgggggccatcgcgctgaggattattccggtggagcagtacccgcagatcaccccgccggtcgtgaatgtgtcagcgtcatggccgggcgccagctcggctgacgtggcggaggccatcgccacgccgctggaaacgcagctgaacggcgtggatcacatgctctatatggagtccaccagttcggatgagggctcttacagcctgaacatcacctttgcggcgggcaccgatccggatctcgccgccatcgatgtgcagaaccgcgtggcgcaggccgtggcgcagctgccgaccgaggcgcagcaaaacggcgtgcaggtgcgcaagcgggccaccaacctgatgatgggggtaagcctttactcaccgaacaacacccacacgccgctgttcgtcagcaactacgccagcacccaggtgcgcgaggcgctgtcgcgtctgccgggcgtcgggcaggtacagatgtttggcgcacgggactacagcatgcgcatctggctgaggccggaccgcatgaacgccctgaacgtgaccagcgatgacgtggcgcaggcgctgcgcgagcagaacgtgcagggggcggcgggccaggtcggcacgccgccggtgtttaacggccagcagcagacgctgaccattaacgggctggggcgcttaaaccaggccgacgactttgccaatatcattatccgcgccggggagatggggcagctggtgcgcctgaaggacgtcaccaccatcgagcttggctcgcgcagctacagctctggcgcgcagctgaacgggcatgactccgcctatttgggtatctacccgacgccgtccgccaacgccctgcgcgtggccgatgcggtgcgcgcggagctggaacggttatccacgcgcttcccggacgatctggtctatgaagtcaaattcgacaccacctcgtttgtggccgccaccatcaaagagattggcgtctcgctggcgctgacgatgctggcggtggtggtcgtggtgtccctgttcctgcaaagctggcgcgcgacgctgattgtcgcccttgccattccggtgtcgctggtgggcaccttcgcggtgctctatacgctcggctactccgccaatacgctgagcctgttcgccatcattctggcgctgaccatggtggtggatgacgccatcgtggtggtggagagcgtcgaaaccctgatggcggaagggcagagccgcacggcggcgaccgcgctggcgctgcgccagattgccgggccagtgattgccaccacgctggtgctgctggcggtgtttgtaccggtggcgctcctgccagggatcgtgggcgagctgtaccgccagttcgcggtgacgctctcgaccgccgtcacgctctcaagcctggtggcgctgaccctgacgcccgcgctctgcgcgctgctgctgcgcccgcgaccggcacagcccgccgccgttttccgtgggttcaaccgcgggctggacgccacgcgcacgctttacacccggatcgtgagcgtgttcaacctccgtccgtggctggcgctgctggccaccgcaggcgcggcggcggtggtggtattcagctttatgtcgatgccaaagggcttcctgccccaggaggatcagggctacttctttgccagcgtccaactgccggaggcagcctcgctggagcgcaccgaagcggtgatgaccaccgcgcgcgagctgatcgctaaaaacccggcggtagaagacgtgattcaggtctccgggtttaacatcctcaacggcaccagcgcatcgaacggcgggtttatctccatcatgctcaaagactggagcgagcgtccgccgctggatgaggtgatgggcacccttcagcgacagctgctggccctgccggaagccaccatcatgacctttgcgccgccgacgctgccggggctgggcaacgcctccggcttcgacctgcgcattcaggcgcaggcggggcaaagcccggcggagctggagcgcgtgacgcgtgaggtgctggcgaaagccaaccagcacccgcagctgagccgcgtgttcaccacctggagcagcaacgtgccgcagatgacgctcaccgttgaccgcgagcgcgcggcccgcctcgacgtgccggtgtcacgcatcttcagcagcctgcaaaccgcttttggcggcacgcgcgccggggatttcagcgtcaacaaccgcgtctaccacgtagtgatgcagaacgaaatgcagtggcgcgagcgcgcggagcaaatcagcgagctgttcgtgcgcagcaacagcggcgagcgggtgcgtctgagcaacctcgtcaccatcacgccgaccgtcggcgcgccatttattcagcagtacaaccagttcccgtcggtatcggtgagcggctcggcagcggaaggggtgagcagcagcaccgcaatggcggcgatgggcgagattctggcggaaaacctgccagccgggtacgactacgcctggagcggcatgtcgtatcaggagcagcagaccggcaatcaggcgatatggatcgtgctggcggcggtggtgatggcgtggctgttcctcgtcgcccagtatgagagctggacgctgccggcgagcgtgatgctctcggtgctgttcgccatcggcggggcgctggtctggctgtggctggggggctacgccaacgacgtgtacgtgcagattggtctggtgctactgatagccctcgccgccaagaacgcaattcttatcgtggagtttgcccgcgcccggcgcatggacggaatggcgattgtcgatgccgcacgggagggagcatcgcgccgcttccgcgcggtaatgatgaccgccgtgtcgttcattatcggcgtcctgccgatgatgctggcgaccggggcgggtgcccagagccgccgcatcatcggcactacggtcttcagcggcatgctggtggcgaccgtagtggggatagtgttcatcccggcgctgttcgtgctgttccagcgcctgcgcgagtggggccacggccttacggactcgtcgcccacagctcacagtgcttctgcaccagagaaatcagcgagccgccatcggcgataa

SEQ ID NO: 121504 - DNA, 2145 bp, Enterobacter cloacae
atgtttaaaaataataagataatgcggctctggctactgagtctggcgacgaccagcgtcgcggctcaggcagaaacgaaagaagaaacgattacggtgacgcagggcgtgagtgaagagcccactgcgcccgtaaaaggcattgtggcgacgaaaacgctctccgccaccaagaccagcgcggagatcgtgaagacgccgcagtcggtatcggtgatcacccgcgatcagatgaacatgcaggacgtcacctccgtttcgcaggcgctgcgctactcggcgggcgtgtttaccgagtaccggggctcgtctaaccgtaacgacgaggtgtttgtgcgcggctttagctacgtgccgaaattcctcgacggcttaagctttggcgcaacggcctcatcacagacgggcacagttgacccgtggctgctggagcgcgtggagctggtgcgcggcccggcctcggtcctgtttggacaggtcaatccgggcgggttaatcagcatgaccagcaagcgcccgacggcggaggccattcacaacgtgcagttccgcaccggcaataacgatctcgccgaaggtgcgtttgatttcggcggcaggctgagcgacgacggccgcatgctgtatcgcgtgaacggtatcgcccgtacgcagcataatcaggtggacgattataaagagacgcggatggcgatcgccccggcaatcacctggtacccgaacgatcagacccgctttacgctgctggccagctaccagaaagatccggatgccggataccgcaacttcctgcccgcgtatggcacggtgaaaagtgccgacgggaagtacatcccgcgcgattttaacgtcagcgatccgaattacaatcaatcctggcgcgagcagacgatgattggctacgagctggaacaccagttcgccgacaacctcaccttccgccagaacgcccgttacgccaccatcaagcagaaatatcgttatctggtttacgccaacagcgcggccaacagcacggtgttgacccgtcgcgcccagcgtgaagcgcgcacgaccaacgaatttggccttgataaccagctggaatatcagctggagaccggaagcgtcagccacaccctgctcggcgggtttgattacaagaccagcaaggataaacagctgctggcgcgcgggagcggctcacagtatgaccttgactggacaaacccggtttacggcgtgaacgtggatgaaagtaccttcaaaacggcgtccgacgagcagcaaaatctcgaccagatgggcctgtatcttcaggatcagatgagctggaataactgggagtggctggtttccgggcgctacgactggagcgaagtgcgtaccagcgacttcaccgataacagcgttacgcagcagaacgacagcaaatttacctggcgcactggcctgctgtacgcgtttgattctggcctgtcgccgtacatcagctacagcacctcgtttgaaccgaacctgcaaaccaaccgtgcgccgggcgttgcgcccttcaggcctactaccggggagcagaccgagattggcgtgaaatatcagccggtcgacaccacgctgatgaccctggcgctgtacgatttaactcagaacaacgtcgcgacctataacagcgctgaaggctggttcgaaaatgcgggcaaggtgcgttcgaaaggcgctgaagcggaaatccacgccacgctgatggataacatcaacctgattggctcctacacttacaccgatgcaaaaaccgaaagcaccacggtggcgggaactgaaggcaaaacgcctgcgcgcattccggcacatatggcatcggcgttcgccagctataccgttccgggcggcgcgctgaagagcctgaccgctggcgtggggatgcgctacatcggcaccagctacggcgatgcgaagaataccttcaaggtgccatcggtggatctgtatgacgcgatgctgcgctacgacctgggcgagatgaaccgcagcctgaaaggggcaagcgcgcagttcaacgtcaataacgtggcagacacaaagtatgtggcgtcgtgcgcaagcgatacggcgtgcttctacgggattggccggacggtgacggcgacggtgaattacagctggtaa

SEQ ID NO: 121505 - DNA, 390 bp, Enterobacter cloacae
atgggattcccgagccctgctgctgattacgttgaaagtcgtctgtcacttgatgaagcgcttatccagaaaccagccgctacgtactacatgcgggcgggtgagactatctaccgctgcggtatcatgaaggatgcgctgcttgtgattgattcgtcgcttaagccgtgtgacggctcgctgcttatctgtgactgcaacggtgagtttaaagtaaagagatatcgcacatatccgcagccgcatcttgagaatgtggcgaacgggagaaaggagaggctgcctagtaacgacgagggtatcagcggggcgctaccaatatttggagtcatcacgtacatcatcaacgatgcgcggacaggtgagtttgatgattgcccggtgatgtga

SEQ ID NO: 121506 - DNA, 363 bp, Enterobacter cloacae
atgcttcgcatttttggcaagtatgtttcagttggtgtggtgaatacggcgttgcactggctatgtttcggagggctaatccatttctttggcgctacacagaccgtagcgaacatcatagccttctgtatcgctgtaacattcagttttttcgtaaacgcaaaatggaccttcaaatcccaggctacttctgtgcgttattttgcgttcgtcgccttcatgggctcaatggctggaataactggatatatcgctgacgttaccggtgctccggctattattactctcatcgtcttttccggctttagtcttgtggccggtttcatctattcaaagttcattgtctttagggatgcgaaatga

SEQ ID NO: 121507 - DNA, 924 bp, Enterobacter cloacae
atgaaaatttctctggtcgttccggtgtttaatgaagaggaagcgattccaatcttctataaaactgtgcgggaatttgaagagctaagacagcatgaagtcgagattgtctttattaatgacggcagtaaagatgcaacagaatcaatcataaacgcgcttgctgtggccgatccgcttgtcgttcctctttccttcacccgcaatttcggtaaagagcctgcgctgttcgccggtcttgaccacgctacaggtgaagcagttatcccgattgacgttgatctgcaggacccgattgaagtcattcctcatctcatcgggaaatggcaggccggcgcggatatggttcttgctaagagaacagaccgctctacggatggacgactcaaacgcaagaccgcagagtggttctataagctgcacaacaaaatcagcaatccgcagatcgaggaaaacgttggcgacttccgcctgatgtcccgggatgtggttgaaaacatcaagctaatgccagaacgcaaccttttcatgaaaggcgtcttgagctgggttggtggccgcactgatgttgttgagtatgcccgcgcagagcgtgttgccggggattctaagttcaatggatggaagctgtggaatcttgcattagagggcatcaccagtttctcaacttttccactgcgcatgtggacgtatatcggtttgctcgttgcgggaatggcctttatgtacggcgcttggatgattattgacaccatggcattcgggaacccagttagaggctatccttctatattggtatcaattttattcctcggcggtgtgcaattgatcggtattggagttctcggtgagtacatcggcaggatttatattgaggttaaaaatagacctcgttatattttgaaggaaaaaataaatggttag

SEQ ID NO: 121508 - DNA, 387 bp, Enterobacter cloacae
atgagcatctacgctgtaatcaaagatggcatcgttgttaacactgtggtgtgggatggggtgggcgatctctttgatgcttttaagacaaagaatatagatggcctaaatgcaggtattggctggacatatgacggaaaagagttcgctgcaccagttgagccaccattaccagagccaacctacgatgagctagttaagcaggctgaaatcgaaaagagtggtttgattagccaggcgaacgactacatagatagcaaacagtggccttcaaagttggcgctgggtcgcctgaaagatgacgaaaaagcctcatttaatgagtggcttgattatcttgatgcgctcgaatcggtagacccatcaaaagcaccagaaataatctga

SEQ ID NO: 121509 - DNA, 2217 bp, Enterobacter cloacae
atggctacgcaaccaactcaagatgcagtaccaagtgaatcacctcgcgacttgaaatttaacgcggggaaaattgacgaattcgtcacatcgatggggtggacctatatcgatcgctttggtcagaagcactacaccattgagggcatcaactatctttcccagcaggcaatggccgcctacggttacgtaattcttacagggaaaactttcaccaccggcgcgacaatcaacaacccgaatgaggtgctgctgaacaccgccgacggcgaatattacaaatggactggttcgtttgcttccggcccgaaagttgttccggccaactcaaccccagccagcactggtggtattgcgcctggggcgtggattggggtgggggatgcgtcattgcgggctgcgcttgcatcggtgagtggcgctggtctggtcggggtctcggttggctctgtctatcctgctggtacagtcggttctgccattcaataccgcacccctcagatgtatggtattgaaccaagcaccacaaacatcattggctccggtctggatgctatgtttgccgcgggcggggatattcgtttcgagaagccgggtacatatctaacggatcgtgcatggatattgcgctcaggtactcggctttggattggtcctggggtgaccattcgcgcggccagcacctacaacggcaacctgctccgtaactatgcgtacgagaccgacggtggagccgggaccgccgatgatatcattgaaatatggggtgctggcactctcgactatgacgggcttgagaagccattcagcggacttaacgctatgggggctatcttcaaaaacgtaacgacgcttcgcatcggcggagggctcatgttccgtaactcccgtaaatactgctggctaatttgtaaagttcagaacctgcacgcagatggcctgcgcttcaacacgatctccgatggcattcaccttcagccgccgatagaaaacgcatggattaagaatcttagcggagtaaccggtgatgacttctgcgccctgacagatggtgattacccaaattacgacattgctgaacctggagacttcgccaacatcaatatagagggtatctacgttcgcaacgttaataacgacgaaggcactcgtgcgacatcacttgtggcactcggcaccgctggtatgaacactttccgcagcataagtgtgtctaagctctacggccaatccggcaactgcgtactgtatgctaagggtgatgcacagagccgtgggcgcatgaaaatagaacgcctcgctataagcgatgtgtttgctacgccaggaccgggtgctcaggcaatcgtaatcgacggcctccacgggccgcagccagcgggcgttacttatgccgttgaaattgacaccctgagcattacaaacataatgtctcagtctgccgctaatcagcctcttattatggttaccggtgacactaacgctcagaccatcgtgcactcgatgactatagacggaaccccgagaacggcgtacagcatagttaacctcggggcaaatgcatcgcaggtgacagtgggaaaactgaatatttccaactgcaacactctgtttattaaagaccctaactcggcgatagtaaacacccgtggttacatcggtagcctggttatcagtaacagcaactaccatttcgacgacagcacctacggttacgcatatcggggcgttggggtggatggacgtattgactctatatttatgtctaactgccgtcaggacgatggggtcaacgtagtttcagtacagcgacagacgcaacaggtggccgtgcacattagcaacacagaaatgttcggcgtgcagactggtgttaactttattaacgtatccagtgcgcgactgttcgttgataactgctggtaccgtggcgactccggctacacattcatcgcgtccaacggcagcagcgttatccttcgcggttccgtagaaacggacgggaataacgccgccaccacgtctaacgggggtaccattacactggcgcgtggcatgcaggggatttcatgtgacgtatctaagattacgtctatggatggcgcagggtgccacaacacaaacggcagtttgtcatgcggctcgggccaggttgtggtgcaaactaaagtatggaaaaaccttttctcaagtgcaacttacactagcagtatttga

SEQ ID NO: 121510 - DNA, 471 bp, Enterobacter cloacae
atgccttcatatcgtgaatataatcagaagcgcccgattagcggctgttacaacaccatcacgttctatcacccctcctttggttacgtccgcctcgtcgacaaacagttcttcccgaagacgcttggcggccagacgtacacgcctgcgcggtttgaaatcgaagagagccagcagagcggaactccggtaatcgacgcaacggtgaagcttgggcgactgtcttcagatatcaaaacgctgatgaagaagtggagtggtgtttccaggctgtcgcctatcacggcaactcgtcaggttttcgatagggttgatacctctacgccaatgaagaattggacattatttgtaaaaactgtcgatgttgtttcagataacgcatcagttactttatcaatgacaaacccgctaaataacaacattggccaaccatatgatccagtcgaatacacgggacttcagtacctctga

SEQ ID NO: 121511 - DNA, 690 bp, Enterobacter cloacae
atgactgctttaaccgatattggcgaactgtctatcagcgacagctgcgaaggcgggaaagattacctgttgcgaccttcattcgaggccatgaccaggatcggcactccggaagagattgtgcaggcatacgccaccatccacggcaatgatgtcgctcatctcattgaggtgtgcgctggcacgctggggcgctttcctgaatggatgtctccttctttcagccgcgcagccgagaagctgttatcgacgtgcatgcttgtgctacaggcgtgctgtgaggacgacctgacgccaatgatcggtgaatggaaagggtggcggcattgtgtcgtctaccgcccgggccagatgccgaagaacgacatcatcgtgctggcgcagcacctcatgcagcacggggtcgtcggtaaagccaaagtccgccagttgcagcgccacgaaactggtgaacgaactacagaatttaaggccttcgactacatcagcgctgcacgtagccacttcggcatgaatcgcgccgaagcctctcagttaacaatgaccgaatttcagatgctgctggcggcgaaatacccggaccagaaaggttttacgagagaagagtacgacgccgtagcagatgcttatcttgcccgaagagcaaaaagggcaagacaagaatggcggcatatagatcaaaacttataa

SEQ ID NO: 121512 - DNA, 744 bp, Enterobacter cloacae
atggctaattgcagtaactcaaatgagcggctatttggagctgccgtcgtgctcgaagtggctgatggctgcccggacgtcaaaccactcgaaggtgagtggatggcgctggccgctggtacgtcgaaaggcttcgacttcaaccctaactcagtaacttctgacgcagatgatggggcaggctacgtagagacaatcatcactaacagcgacttcacgatcagcttcgagggggaggttcgtaagaaggataagctcgaccagtatggcattggcaaattcattacctacttcgctacagaattaaaagcgaaacgtcagcctggaatgtgggtaagaatggattacggcccggtagagtttgttggttatatgaatatcagtgcgctcagttcagacggaggcagtaacgacatcgtcacgttctctactgagttcaaagtcggtgacgcaagcaccatcgaagtgaacgaactgactgctgtagcagtgactggcgtaacggtaactccggcaaccagcaccggcacagcaggcggcaccagcaccttcacggtgaacatcgcaccaatcggcgctacaaacaaagatttcactgtagcgactaccgatgcgaccaaagcaacggctaccgcctccggaaacaccgttaccgtgacgcgcgtcgccaccggcagcgcgcagataatcatcaacaccgaagacggcaactttgtggccgtgcatacggttaccgttacctaa

SEQ ID NO: 121513 - DNA, 846 bp, Enterobacter cloacae
atggcaaacgactggcttgagctgcgtcagcatgcagaaacaggtattgagacaattaaggcgcatttcgaaggacatgcctttgatccccactggcatgatagctatctggtcggaataaccctttccggtacgcagcagttccactgtcgccgtgaacgccaccgtagccagccgggcgatgcttttttacttgagcccggggagatccatgacggtgatgcgccggtagagggcggctttacttatctgaccttttatctggatgaacactggctcacccatacgcttcaaggcctgtatgactctactcccgggagttacactctccactttgcccaaacgctgacgcgagagcctcagttggtgcgcgctatcggtgatacatttgcctcgttgcataacgatgagatgaagatcgtccaacagagcacaatggataacctgctctctcagataactacccactgtcactggcgtaagaaactcccgtcgcaattacaaagctccgctgtggcgcatcgtgcccgcgactatctctatgcgcatatcggcgagaacgtggggctatcagaccttgcccgcgagacgggtacggatcgctttaccctcacccgctgttttaaacgcgaatttcacctggcaccgcacgcctggcttatccagctgcgactggcaaaggcccgacagatgctggcgtgtggggaactgcctgttgatgttgcgacggcagtgggttttgccgatcaaagccatcttggtcgctggttccagcgtgcataccgtatttctccggcacactaccgccggttgtgcacaaaccttccagacgtttccagaaaataa

SEQ ID NO: 121514 - DNA, 843 bp, Enterobacter cloacae; identical to SEQ ID NO: 11328

SEQ ID NO: 121515 - DNA, 2124 bp, Enterobacter cloacae
atggatattattaggaattcagtctggctctctcaaggcactgatttgcttgcagagggactttaccgtgttttggattttgacagaaaggtcgatttgttaattttgtttaaaataaaatcagaaagaacgggtaagccaatccctttctcattttcaatgtttaaatattatattgaatcaaatagcataacttgtaaagattatatatatccttcatatatgttagtagatgagaaagaattaacagataaagacagaggaaggcgagatgaaaattacaatatcattaaagatcttgtagatgacagaatgtttctgttcgactatgcattacataaaaagtcgcaccttttaatggattactcaagaaataaaaaaatatcacaatatactatcagaacgcttctggcgttgtattggcgacatgggcaggatatttatgcattgctacccgcattctcgaactgtggcgccgctgggaaaagtagaatcaaacatgaaattaaacttgggaattccaaaaaaaacagagcattacctaatgaacgatcacgtgttttcattcttaatgaaagagatataaataatattagaaaatctctcattacgtatcattataaagttaacggagatacgataaagaaaacattagagagacatattgatttgtattttagggatgaaattaaaacagcaaacctagaaaatagagctccatatgttccttctttaaaacaattttcatactggaataaaaaactcttcactaaagatttctcgataaataagaagaacacgaaaaaagaaatagacctcaaaatgcgggcgcttttaggtagtgtggctaatacaactgttttgccgggtgatgttttcgaaatagactcaactgtcgctgatgtacatcttatttcgagtttaaacagacgaaaagtcattgggcgtcctactatttatacagtggtggatcgtgcaacaagaatgattgttggccttcatgtttctttataccatgcttcatggcgagccgcccgacaagcgttagcaaattgctttatgccaaaaaaagaatattgtagattatttggaatctctattactgatgatgattggccttgttctcacattccattaacattgatgtgtgacaacggggagatgattggtcttaaacctcaggaagagatgacccccctgacaaaacttgagtttgcgccagtcggtagaggcgacagaaaaagcattgttgaacgctgtttcggcattctgaatgatgaggttattcataggcttattggaacaacacgaaggggaaagattgttaaaggagagccaacaccgcaatccagggcttgtttaacgattcaggaggtcacgtctttactgattcgggagatacttgcacataatcagagaacgtatgaggaactggcttatatcaatcccttactgattgaaaatgatctcgtaatatcaccaaaaaatagttggatgataagcttaaagcacgggagattcagcgcaagagccgttggggccgacgaagtgatcgcacgattgttaatccctgtgaacgctaacattaccgccggtgggattcagtacaataatcttttttatgaatgtgatcctgaaattgcatcaggtgtcagagtatttggaagaaccacttgtgaagcaagaatagatgacaattgcgtagattatatatatgtaagatttgacaaaaatagcattttcaaaaaacattacctacttaagaaaagagatgtatttaaagggaaagctcatcttgatacagatgtaatggctgattgggtagatactcaaaaagaaattaatttatttactctggattcgctcagcaatatcaataataaagatgaatttaacaggaaaggtaacgaaagattaaatgaaatatacgaatctcgccgggtacatggtaaagatattaaaaagaacaggaaaaatgaacttgattcattaggacgaactcatgttgctaatggaagatctgaacccctacttccttcatccagtaatgttctgcttttgcctggccgggaggagaaacaaagatggttaaaaggtaagaagaagactgaggacgcagaataa

SEQ ID NO: 121516 - DNA, 1449 bp, Enterobacter cloacae; identical to SEQ ID NO: 11330

SEQ ID NO: 121517 - DNA, 1557 bp, Enterobacter cloacae; identical to SEQ ID NO: 84386

SEQ ID NO: 121518 - DNA, 405 bp, Enterobacter cloacae
atgcgcagtaaagcccgtttagtcatcctgctttctccgcttttcctgaccgggatgcgggatcccttctctgtgccggaagagcgttgcgcagccgggcagctcagccagtggcggtatcaggggatagtcagcggcagcagggatatcggccttatgcaggacgggcagaaacgctggcaccgggtaaaaacgcagatgcggttaccgacaggctggcgggtgagcgcgatagatagacaacaactgaccgttgatgtcggcgatatgtgcgagccgaagcgatggacatggcaacgagaaggaacgaaaaaaagtgaagataaggatagggctgttactggcggtactcagccagcccctgtgggccgcgacgccaaaaccggtcaccctgctggtggatga

SEQ ID NO: 121519 - DNA, 969 bp, Enterobacter cloacae
gtgcatacggcggcctggcaacgggagcaacagacgcgtaaagagcaggagcgggcccagcgtctgctcgacgccccgctgcactctcacagcattccgtttgcttatgcggatgcggccgaattgcaaaaagcggcggaaaagctcttaagcccgaaaggcagtctctccgtcgacaagcgcaccaaccgtttcctggtcagggataaccagacggtggtggatatgctccagcgctgggctgtgcagatggatctgcccgtcgagcaggtggaactggcggcgcagattgtgaccatcagtgaaaaaagcctgcgtgaactgggggtgaaatggaacctcgctgacgcaacggaggccagtaaagtgggtcaggtcacgacgctgggtgcggacctgtcggtggccagtgcgaccacccacgcagggtttaacatcgggcgcatcaacggcaggatgctggatcttgagttgtcggcgcttgagcaaaagcagcaggtggatatcatcgccagcccgcggctgctggcatcgcacatgcagccggccagcatcaagcagggcagcgaaattccgtatcaggtttccagcggcgagagcggggcgacatccgttgaatttaaagaagcggtattaggcatggaggtcacgccggtggttctgccgggtggtcgtgtgcgcctgaaattgcatatcagtgaaaatatgcccggccaggtgctgcaacaggcagacggcgaaacgctggcgatcgataagcaggagatcgaaacgcaggttgaggtaaaaagtggggaaacgctcgcgctgggcgggatcttttcgcaaaagaataaaaccggacgcgacagcgtgcccgtgctgggcaacattccgtggctgggtcagctgttccgccatgacggaaaagataacgaacggcgcgagttagtggtgtttatcacgccacgtctggtcagtattcagtaa

SEQ ID NO: 121520 - DNA, 627 bp, Enterobacter cloacae
atgaaagaactgggactggttagttgtcagcaacccacccaccggtataaacgtggtggccatgaacacattgctatcccaaaccaccttgagcgacagttcgcagtgacagagcctaatcaggtgtggtgcggcgatgtgacgtatatctggacaggcaggcgctgggcttacctcgccattgttctcgatttgttcgccaggaaaccggtaggctgggcaatgtcattctcaccggacagcaagctaaccatcaaagcgctggaaatggcgtgggaaacccgaggtaaaccagcgggagtgatgttccccagtgaccagggtagccactacacaagcaggcagatccggcagttattgtggcgttaccggatcaggcaaagtatgagccgacgcggaaactgctgggataacagcccgatggaacgcttcttcagaagtctgaaaaacgagtgggtgccagtgacatgctatataaactttagcgaagcagctcatgcgatcacagactatatcgtcgggtattacaggtcggtaaggccgcatgactataacggtgggttacccccaaacgaatcggaaaaccgatactggaaaaactctaaagccgtggccagttttggttga

SEQ ID NO: 121521 - DNA, 1164 bp, Enterobacter cloacae
atgtcaatcaccctcagaggcggcgtctggcactgtcatttcgttacgccgtcagggaaaagaattagacgatctcttggtacgggggacaagaaacaagcgcaggagctgcacgacaagctgaaggctgaagcgtggcgggttgataaaattggagagctgccgacgaggacgtttgaggaatgttgcatcaggtggatccgcgagaaggagcataagcggtccctcgatgacgataaaaccaaaatagaatatttcttgcggcatttctccggccgggatatttcaaccatcacggctgatcaggttcatgaggctgtttcgaagatggtcaaccgtaagcatattcaggtctgggagtcgcgcagggacgcggctatacgccgggggaaggaaccgcctccttatgttgagaaaccggtaagccaggccacaaagagccagcacctttcgttcatgcgatctctgttcaaggctgcggctaatgactggggctggattaaaacggccccggttataaaaacgaaaaagccgatcagcaaacgcatccgatggctgaccagggacgaggcagaacggttaattgcctgcatgccggagtcgataaagccggtggtgatatttgcactggcaaccggcctgcgccgctccaacatcattgatctggagtggcagcaggtcgatatgcagagaaaggttgcatgggtaaatccggagaacgcgaaggcgggcaaggctatcggcgtggctctgaatgataccgcatgcagggtgttaagggatcagatcgggaaaagttccaggtgggtattcgttcacacgaagccatcaacgcgcccggataaaaccgtcactccggctgtccgaaaaatgcgagtggatgacaatgtcgcctggcgcattggactggaaagagcgggtatagaggacttccgttttcacgacctccggcatacctgggcgagctggttaattcagtccggcgtgccgttgtccgttctgcaagaaatgggcggctgggagtccatcgaaatggtccgtcgatacgctcacctggcaccgaaccacttaagcgaacacgcacggaaaattgatgccatttttggcaaccatgacacaaatacgacacaaggagaaaatcaggctggcttgaaactggcgtaa

SEQ ID NO: 121522 - DNA, 231 bp, Enterobacter cloacae
atgagcaccattcaggacatccgaaaccagctatcaaccctggtcaccgaggcgcacaaagtggcgtgctccctcgatataggtgacgagcgaaccgaggcatttgagctttacgaagcacttcgtcgacttcagcggcagggcgccgccggagagattctctcagcaactaacccccttctcgcctcgccatattacgacgaggactgggacgaagatgaagacgactga

SEQ ID NO: 121523 - DNA, 240 bp, Enterobacter cloacae
atgttcaggataatacagcctaatacctggtatgccgatccccacggcgcgccctgcaaaatcctccgcactacccacgaagtaatccactacatccgcaacggtcgcacctgcatcgccagcatgggccgctttcagcatgaattcgagccactgaccaaagcacaggccgagcggatcgccgaagaaatcgaaacagcagaacacctgaagaagctgcgcgcccagcgtgcggcgtaa

SEQ ID NO: 121524 - DNA, 315 bp, Enterobacter cloacae
atgatggattacagcaagttgactgacaaagatattaacgtccttgttggtggcgctcagggcttcgcaaacaaaatagctgcccaaaacggcctgagagactactgcaacaacccggcggacgcatggccgattatcaccgcaaataaaatcagcatttacgcaatgagcaaagcggacaaaagaggcggttggggggccgaggcttttcatcccaacgatgcatatagctttaacgataacccacttcgtgccgcaatgattgtcttcctcatgatgcaggagtcagccaatgttcaggataatacagcctaa

SEQ ID NO: 121525 - DNA, 258 bp, Enterobacter cloacae
atgaacaaagcctctccagttgatttgaggaaaagcctcgaaatagccaaccatctggcgcacatcgggattcgcttcgtgccgattccggtggagaccgaggaagaattccagacgctggccgccgagttatcgcgacggcttgagcagaggcggtcgaagccgagaagaatgaaggcggtgctgcatgaaggcactaatcaccaggtcgctaaagcggccttttttattgctggcgttcacattcaaccgtattaa

SEQ ID NO: 121526 - DNA, 201 bp, Enterobacter cloacae
gtgagcaaatatccaagggttggcagcgtgtcagccaaaagcaaaaacacctccgctaaatgcaaatgcggtgcagtggcgaagtataaaacgaccgtggaaatgaatattttccgtggcgatgacgaagttgtttggtcttgtaacgagcacaagaaggattgtgcatttctggtcggtgagcaaggcggtgccgcatga

SEQ ID NO: 121527 - DNA, 219 bp, Enterobacter cloacae
atgacgccagcaaatgaaaacgccatccgcgccgcctgccgccgctgcaccgaggaaatccagctggccatgcgcaagaagccaaagcctaactggaacgaaacggttcctcccatcatcaataagcatcacaagaaaattgaagctctgggagttagcctcttggagttcgtcgtatacacagggcggcttaatcgccgcttcggagtggaatcgtga

SEQ ID NO: 121528 - DNA, 552 bp, Enterobacter cloacae
atgacggatttcaccggcagcaacactccagcggatcagcgcgatctctggcgtactccaccagtcctcttcgcctcccttgatgctgagttctgcttccagctggatgccgccgcggcgcctcataacgcgctgtgccggaagttcatcaccgccgagcagaacacactggagacgccctgggctgattacctgaatgttcccggctacgtctggctgaacccgccatacagcgacatcacaccgttcgttaagaaggccgctaccgaaagcgcaaatcagatcggcacggtcatgctggttccggcagacacatcggttggctggtttaatgaggcgatccagaccgccagcgaggttcgcttcatcaccgctgggcggctggcatttattaacccggtcaccggtaagccggtaagcggcaacaacaaagggtcgatgcttatcatctggcgaccgtacccgcgaacacactgccacttcgcaactgtggatcgggacgagctgatggctttcggggcgaaacttctcgcccgtcgggaggccgcatga

SEQ ID NO: 121529 - DNA, 429 bp, Enterobacter cloacae
atgaaacgcacacccttctaccgcaggcccggacgaaccgggcaattctccggccttcgtgagcgcgttatctggatgattcagacgcgcggccgcccggtcaccggcagcgaaatcgctgagaagtttggcgtaacgctcattgagtttaaccgggtcgccaacggcattacccgcggctccggacagatagcacagatcgttgagtctgaaaaatggctcaacgaggacggcatctgcgaccggacattcgacctggtcacgaagccaaaagtcgtaacaccacagggtaaatcgcggctattcacccggcgcgcaatagagcagtcgcaggaaggtagacggaaggaatgcattgaacgtgcagcccgccgtcgccgcctgattgctcagggcctctacatcgacgaaatggagtcagtgctatga

SEQ ID NO: 121530 - DNA, 681 bp, Enterobacter cloacae
atgacaccagaaattatccttgcccggaccggtattgacgtaaccactatccagcaaggcgacgaggcatggcaccggctgcgactcggcgttatcacagcctccgaggtgcataacgtcatcgccaagccaagatcgggaaagaaatggacagacatgaaaatgtcctacttccacaccctactcgctgaggtatgcaccggcgtcgcaccagaggttaacgcgaaggcgctggcctggggcaagcagtacgaggaagacgcccgcaccctcttcgagttcaccaccgacgtgaaagtcacggagtctccgatcctgttccgtgacgagagcatgcgcaccgcatgctcccctgacggcctgtgcagtaacgggttcggtcttgagcttaaatgcccgttcacctcccgcgacttcatgaaattccgccttggcggtttcgaagccatcaagtctgcgtatatggcccaggtgcagtacagcatgtgggtgaccgggaaagacgcctggttttttgccaactacgacccgcgcatgaaacgcgaaggtattcaccacatcgtcgttgagcgggatccgcaatacatgaccgatttcaatgaaatggtgcctgagttcatcgagaagatggacgaggcgctggcggagatcggtttcacgttcggggaacagtggaaatga

SEQ ID NO: 121531 - DNA, 846 bp, Enterobacter cloacae
atggcaaacgaattaacaatcacagcgacgtcgcttcaggagataggcgtcgacgtctccacctggagcgcgctgaagaacagcatctaccctggcgcgaaagacgaatcggtaatgatggcgcttgattattgtcgcgcccgccaactggacccattgctcaaacctgtccacctcgtcccgatgtacgttaaagactcgaaaacaggtaaaggcgaatggcgtgacgtggtaatgccgggcatcgggctttaccgcattcaggcggaccgatcaggtgattatgccggtgcccgcgaaccagagttcggtccagacacgacgcagacgctttctggtgtcgaggtaaccttccctcagtggtgcaaatacaccgtctacaagcgcatgcctagcggagagatcgtcgagttcagcgccaaagaatactggattgaaaactacgccaccggcggccgcgacaccacggcgccgaacgcgatgtggaaaaagcgcccgtatggacagctggcgaaatgcgcagaagcccaggcgttgcgtaaggcatggcctgagattggacagcagcccaccgccgaagaaatggaaggcaaattactggacgttgatatccgtgacgtcacgccgcgcagcactacagaagcgcttccaccagccgcaagcgaagaaaccatccagtccattaccaatcttttgaaagagcttggtaaggacatggagcaagactttcttcctctttgcagcgacatcttcaagcggcaaatccttgaggcgtcagaactcactgaagaagaggcgcagaaagggtttggcttccttcagaaaagggctaaggcggcagcatga

SEQ ID NO: 121532 - DNA, 285 bp, Enterobacter cloacae
atgaacgcatacctcacttacgaccgcatcgaagatcggcgctgggttgaacagcagctcgacgacgagaaagagaagtggatcggcgaccgtgcacgggaaatcatcgacatgatgccgaaagaaccgtccggcctcttccacttcacggtcccgatcgacaccagcccatacgaaggacttcgcagcgataaagctggcgagacctacaacgatttcatttcggcagttgcttacgcccaggcggaatacgactgggaacaccgtaccggctgcccgttttaa

SEQ ID NO: 121533 - DNA, 210 bp, Enterobacter cloacae
atgatcaatcactacggcaccaccccgctcattcgccagtgcgtcacgcccggcatgatggcattgcatgaaggccgcacctatcgcgtctcagcagtcattcaggagcgcaaatgggtgtacctgcacaccgatgcagaaatcatccgcctcagtgactgcgtgattgacgtccttctggacggtcacggaaaccctatccagcactaa

SEQ ID NO: 121534 - DNA, 159 bp, Enterobacter cloacae
atgacagtcacccacaacggcaagcagtacaccgccaaaaagcttaacgataacgagtggcagctgacgtcggtatcagcaccgcgcgacaagctgacactgaaccgctggcagatgcatatcgctggcctcctggaacaggttgaggtgaaggtatga

SEQ ID NO: 121535 - DNA, 156 bp, Enterobacter cloacae
atgccagaatttgaggttaatcatcagaaaggattttctttgcgtgagttgattgattttcgcgcatggacggatctgcaactttcagagttatggaggctgcagccgggtgacggggtgaatgtccaggggcagttagtaagacgcatcaaatag

SEQ ID NO: 121536 - DNA, 342 bp, Enterobacter cloacae
atggcagataaaaaaacggcgccactactgcttaacgtagacgccagtgaggttctcactcagttcggggagcttttaaagttacttgaacttccagccagttcctttcagggaattcctgagcatgtcatcgatctgttttttgaccgtgtccgtggcctgattgacaacatcgtccttagtgatttcgcgaccacagtcagcacaactgacgccggtgaaatttgtctcaaagtcaaaatcatcgggctggttgaacatctcacttccgcagtcagggcacacggtccgcatggtttgcatgaatatatcctttctactgttggggagattaaagagtaa

SEQ ID NO: 121537 - DNA, 198 bp, Enterobacter cloacae
atggttctggatgaagagcgtataagcatgaaaattcaggcgatggggcgggcggtgatggaattgtcactggctgatttacccatgacccagcaaaacatcatcgacaagctgaagcagtaccggaaggaaacaggaaacgtgacagggaagggagctgacagggatgcggctgagatagtgcggaaagggcaataa

SEQ ID NO: 121538 - DNA, 357 bp, Enterobacter cloacae
atgaaaaaggttttggctctagctcttggggtaatgatgttagctgggtgtagctcacgtgtagctgatctgactgtggctagcactaaaaactacaatcttaactcaaacaatttcgtcaaaggcgctcgcgtaaccgcagaagactctgctccagtcgtgattttccctctgggaatcccgaatgtaaaaacggctatcgaccgtgcaattgagaagaacaaatgctctgttgctctttctgatgtagttgttactcagttcaaccactccttcctgtttggtaaattcggatttgttatcgaaggcactgaagtgatcgaccgcggtcaacctggttgtgagaacgccagctaa

SEQ ID NO: 121539 - DNA, 426 bp, Enterobacter cloacae
ttgattatcaaagacattcattttaatggttttgatatcacatcttctcgttttgttgaacgtgatgaatctgatacagacggtggtagatttaatgttgattataaggggcttaatttttcctcacttcaagaaaatgaagggaatcatgagtttttcctggacaccacggctatattaaaggcttataacggcgaagccacggaagattattcggatgaaaatttagcctttgagtgtgaggtttcgttttcaatgcgatttaaatgcctctccgaaaagggaattgaagaatctgatattgaaaagaacttatggttctttgaaaactacttgtttttgtcaggtaaattagcactagagtcagtgcttcgccatacagtgattgacaccattacctttccttggcatagaaagataaattaa

SEQ ID NO: 121540 - DNA, 459 bp, Enterobacter cloacae
atgagcggcattcttaaatataaagacttttgtggcagcattgatctttcatacgaagataagattctccatggaaaaatagaatgcattaatgatcttgtgacttatgaagctgaaacaatccctgctttagaagtagcttttcgagaggcggttgacgactacattgaaacttgtgaggccataggaaaaataccagagaagcccatgagtggaacgttcaacattaggattggatctgagcttcatcaaaaggcatatcttgcgtctattgagcaaggcataaaacttaatgagttcgtaaagcaggctgtagcggaaaagttgagcacaaaaagagagattcattatcatttagaatcatttgccgctatatcgaaagctcattttactacttcaaacaaaaggcgcacggattacaaatggagcgcgcttggtgaagggaggttagatcattga

SEQ ID NO: 121541 - DNA, 567 bp, Enterobacter cloacae
atgcattcacttgcgtatcaacagagtaccggacttgaacaacgtccgttgatttcgatttatcaaagtgttccgcgtaataaccgtaagctaactcgaatacgggaggcagttaaggcctggcaaaaagctacgccgggccagtctcaggttcacatttctcagctggttgcgaaagagtggctggcgcgcggcgggaaggggttgttactggcaggttctgaacacaacacgaagcagaacttcttccggatgattaacgatccgggcccgaagaacgacaaggggttgatgctactgatccccgtcattatcgacgtgatggcgcgggataacgagaaagtggcgagagagttcggtctggtcgcaaagactgaggccgaactgatagccgaggccatgaaagagtgcactgaagcgcatcaggcgaagttacttggtcagccgatacaacgccttgagaaagaggtgagagaagctgctgaagcactgctgcgcttcctgccaactgaatcaatcgctgcggtggtgacaagtctggccgctatggcgccgggagttatgtga

SEQ ID NO: 121542 - DNA, 315 bp, Enterobacter cloacae
atgagtgctaaatccatggcggggcgtgaagctatcgagtggtatctggaaggttacggttcattcaccgcggaactggtatgcgaagcaaccggagtgtcccgctctcaggtgctggcggcatcgttcaagatgcgacagaacggcgagattgtccttcgcgaacgtaactggcgaaccaatgtgtacgtggccgccgaagacgacgaaggcaagccgatcaacctcgacggcgagaatacgattttccaggaatgccgcaacagcgcggctatgaagcgagtattgatggtttgggggaggttaggggtatga

SEQ ID NO: 121543 - DNA, 435 bp, Enterobacter cloacae
atgaacgtgaaacgttatgagtgggtggcctgtgatgagcatgcgtgccattgcgacgtggtagagagcgccgagggcgatatggtcgattacgaagactacgccgcacttgaagccagatgcgcggcgctggctgcggagaatggggtattactcgcaatcatgaatgagcaggctggaagttttggcgctgctttagctgagggattccatgacgccgttatggagtcagggattgatcagcttattgatatctaccagcgacgtttacagcaagccattcagtgcattccgccaaccacgtctaccgacgctttcctggctgaagtgcgggcgcagggtgtggagatttttgctgacagcctgctgtgtccagaccttgatgacactatccgtgagtttgccgacgagcttcgcaaaggagtgcagtcatga

SEQ ID NO: 121544 - DNA, 186 bp, Enterobacter cloacae
atgaaaaaccgcaaagcaaaaatcatcgttctgcgtgctttgaaaaattgctacccgcgtcagtggctgaacgtaagcaatcgccgcatggttctcttcacgctcggtggtgttagccgtgaagggcatcaattcaaaaagagcgcagcacagaaccgctggaagaatcatgtgaggttccaatga

SEQ ID NO: 121545 - DNA, 861 bp, Enterobacter cloacae
atgagcaacatcgacaaacaggccgtgcaagcagtcgccgatttgaaagctggttacaccctcggtcacgctgacgtggcaatcctgaatgagctggcgcgtatcgcgctggcatcgctcgaagcggggcctgtggcgtgggcgcacagattaatcaacaagcgtaacggagtggttcacccttgggtttacggtagcgcagagacatctccaagcgagggggatatcttcaatattgaggtaatgccgctttacaccgccccgccagcgccggtatctgtgcctgatgcgatggaaatggatgatgactttgacagcgcgtttgaacacggaaaagctgtcggctggaacgcctgccgcgccgccatgcttcagggtgccaatggcaccctcaccaatgagggtaccataacagccacgcagtttaagccggtagcagacctgtacggcttaacctcaccaactggcggtgaaacatcgttcactttcgacgctgttgaagctcgcgattttattgatggcgggtggtcatgtcaggagtatgtggagcttggacgctttcaggaggctgtgagcggcaactctccggtgattccgggttgctcatgcctaacctgccgcccattgacttttagtgatagccgctttgtcgtctgccctgaatgcggcaacaaacgctgcccgcacgccaatgaccaccgtaatgcatgcaccggaagtaatgagccagggcaggaaggtagtgcgtatccagcagcgccgcagcaggaggtagaaagccaaatcaggaagggtaagactgtggccatggaagagtgggaactgggggcgaggttaactaagcatagattcaaaccatag

SEQ ID NO: 121546 - DNA, 456 bp, Enterobacter cloacae
atgagcatccctgagtgcggcattaagcttcacactggcaacttcaacgccatcggaaaattacttcaggaacaactgcagagtggcaagtcgcttcgcctgcaggtgaaggaatggcgcgataaacgaagcctgtcacagaactcactttttcacatgtggatgggtgaaatcagcgaatacctgattaactccgggcgaaccgacgcgacgcctgagtgggttaagcgcaacctcaagaaaacctacctgggctgcgaagaggtgacttacaccgatttcatcaccggtgagaaaaccacgacctgggagccgcgccacacggcaaacctcgacaccggggaaatgcatatcttcctggtaaaggttgaaatgtggtgcgcccagttcggcctggcactgacaatcccgaacggttgcgaataccagcagctgcgcgataaggaggaggcctga

SEQ ID NO: 121547 - DNA, 171 bp, Enterobacter cloacae
atgtctactccactatcacgcgtcatcaccaacgaaatcttccgcgttcctgctcgccgccagcgtaagccagcggttaagccatccgacatcccgaccctgaaagactacaccgcccggctggtggatcagaaatggctgcgtctcgctgcacggaggagccatgcgtaa

SEQ ID NO: 121548 - DNA, 636 bp, Enterobacter cloacae
atgcgtaaaccaacccgtcgcacctgcaaggtctgcagagagaagttcaccgccaccttcgacaacgtctggtggtgctgtcctgaacatggcgccatttacgcactggagctgcgagctaagcagaaaataaaagaggcagccaagcgcatcaaggagcagaaggaggccgaaaaggccgggcgcaagcgccgcaaggaacgactggcagagctgcggcctgccggttactacaaggcacaggctcagcaggctttcaacgcctatatccgggcgcgtgatgccgatttgccatgcatcagttgcggcgagaccaatccacctgatctgcacggcggccaatgggattgcggacacttcaaaacggtaggcgccaaccctgagctgcgctttgaagagcgcaacgcccataagcagtgcaaatcgtgtaatgccggagctgggaaatacaccgccaaagaggcgactgtcgcgcagcaatacgaagctggcctggtcgctcgttacggccaggaatacgtcgactggctcaacggtccccacgaaatgaccaactaccgccgggaagacttcatccggatccgcgatgagtaccgcgcaaagctcaaagcactgaaacatcgggaggcagcatga

SEQ ID NO: 121549 - DNA, 690 bp, Enterobacter cloacae
atgaacagtcagcaactggaatacgtacgtcagcagctcattgtggcgaccgcagatctgagcggggcgacgaaagggcagctggtagctttcgccgagaacgctcaattcaccgcgacggcgcgcagcagggggcggaagaaggtattcgacaaggataaacagcgcatggtcaacccggacggcccaccaatgagcggcagccagtcccgcgccaagggatcgtccatcgcgctggtgggtccggttgagttcgttacggcatcgtggcgccgcgctgtactgtcactgaatgaccatcagaaagcgtggttgctgtggaactacagcgagaatatccgctttgagtaccaggtggccttaacccagtgggcatgggcagagttccgggagcagctcggcgcgaagaaggtggcgggcaagacgatggagcgcctgaagaagcttatctggctggcggcgcaggacgtcaaatcggagttggcgggcaaggacatgtatcagcaccaggacctggcggccctgtgcggcgtaaagcctgataactggtgccataactacgccgattactggcgtgccatgtgcggcatctttaagcggcttgatggtgactctcttcgttgcgctgtgagaacacgatcacaacaaaaggcgactttttcgcagcagggtgttgcaaaagtcaattaa

SEQ ID NO: 121550 - DNA, 402 bp, Enterobacter cloacae
atgtctgagaccttcactatcgtaggcgttggtcttacatcgtcatcagtcggtgtaacctttgccacgctgtttccggaggcgactccagcagtgatgctcggatcactcgccggaacggcgctatacgttctgacctcagatccccatcaactctggaagcaggctatctttgcgctgatatcgtttatcagtggcgtgttcttctccgtgcccatggcgaaaatcatggccggagtcatcaacacgccgttaagcctgatgaagccaccggccagcattgaggtatcgcccgctgtcggtgcaattgtcactgcttccatttccgtggcagtcctgctgcgtattctccgcaaatccaaaagcgggaagatgccggggctgggggaggaagataaatga

SEQ ID NO: 121551 - DNA, 276 bp, Enterobacter cloacae
atgacatggcagcttcttctgatggatgcaaacgccatagtttgcctgttaatcatggtcaggctgatgtttttccggaaggagggaaagcgtcatcgccttagtgtcgcggtgctggcctatctggtcatccttgccgccggattcaatgccttcaacattctgctcggccactacgttcaggttaacctcggcgatctgctgcttaactccgtcatctgcatggcggtgtggctggcgcgcggtaacctggcgaaggtcgttataacggagtag

SEQ ID NO: 121552 - DNA, 441 bp, Enterobacter cloacae
atgcaaaccagcgaaaaggggatagccctgataaagcaattcgaaggctgcaaactcaccgcgtaccaggacagcgtcggcgtatggacgatcggctatggctggactcagcctgtagacggcaaaccaatccgcgccgggatgacgattaagcaggaaacagcagaacgtctgctgaagaccggacttgtcagctacgaaagcgacgtgtcccgcctggttaaagttggtctgactcaggggcaattcgacgccctggtgtcgttcacgtacaacctcggcgccaggtcactgtcgacatcgacccttctgcgaaaactcaacgccggtgattacgctggtgcagccgatgagttcctgcgctggaataaagctggtgggaaggtgctgaatggcctgacacgtcgccgtgaggcagagcgcgctctgttcctgtcgtga

SEQ ID NO: 121553 - DNA, 387 bp, Enterobacter cloacae
gtgactggtgcactggttaagcgttactggctgcaactgattttggtggcggtaatcggcgtgctggcgttcttcgtgaaccgctaccgcgacaacgccatcgcctacaaagaccagcgcgataaagcaacggtcagggcagacaaatcagaggcgatcaccaacaacgtgatcaccacgatgaacatcatccgtgacatctcacaggctacccagaatgcaaagaacgaactggctcaaaagggcgaaacgcgcattgtctacatcaggcaggcacttgaaggcgatccgtgtgctaaccagcttgttccttctgccgctgctgacagcctgcgggaatacgcagacagtttacgttccggccccggtggtgccgataagcgctga

SEQ ID NO: 121554 - DNA, 519 bp, Enterobacter cloacae
atgaataatccgtcagttattccggccttcgacttccgcgaaatggtcacgaccctcgacaacaagataatcaccacatcactcaaggtggcggattactttggcaagcgacacaaagacgttttgcgtgccatacgtaacctgaaatgctccgatgacttcacccagcgcaattttgcgcccattgatttcattgataaaaatggcgatgttcagcctatgtataacatcacccgcgacggatgcatgatgctagtgatgggattcactggcaaaacagctgccgcagtgaaggagtgttacatcaatgccttcaactggatggccgagcagctaaaccggcgcaaggcgatgggtgaagaattgcagcatcgcttcgccattaaagaaacgcgctcaaagctgaaaggcacgatcggaagccggttgatgaacgaacggaagaaggaaaaacgcgtgctgaggctcgaacatgagcacatcatgcaggtaacgcagcctgaattgctgatcggataa

SEQ ID NO: 121555 - DNA, 894 bp, Enterobacter cloacae
atgttccgggatatcgaggaacgatatctcggcatcaagcgcgcgctgaaggctctgtttgaccagcgcctgactgggcgagagcgagaggtaaacagccataactggcgcttcctgtgccacgaccacggcgctgacatgcggctctaccaggtcaacgccggcaagttcatctacgacatgtcagcgcaggaactggcagacctacttgaggcggtgcagggcattctcgacgattacctgctggatggcggagagcaaaatctatgggcgatggattatgtcgtcgcagaagcgcagcgtggcacgctggaggcgttcaataacctctcgcagcagtcacaggtgtacgccagccagactacgctacagcagcttttaagcagccccgcttatctgaaccacattgcggcggccaggctgacaacgttcagtgactggaaggtcatcagcgatacagcccgcggagacctagccaacatcatcaccgatgcagtagcgcgcggggtgaatcctcgcgagacggccagcgtaatcagtaagcgccttgatgtgtcgatgtcgaaagctaagaccatcgctcagactgagcaggtcggcgcgctgcggcaggcgcaatggaacgaaacggactgggcggctgaccggctggggctgaataccggcttgctgtggttgtcagcgctcaaaccaacgacgcgcacctggcacgccagccgccacggccaggtctacaccaccgaagaggtgcgggacttctacgctgagaacggcaaccggtacaactgctattgcagccagataccggtgctgctcaacgacgacggcagtattttcaatgaagggttagaggataaactggcgaaagagcgtaagcagtggcagcataagtaa

SEQ ID NO: 121556 - DNA, 417 bp, Enterobacter cloacae
atgaaatttcaaataacaaagtccgctttcttaatagccgctttaggtgctggttctttttctgcaaacgctaacgagttagatttgctaaacgctaaaaacgatatggcctcagcgataactaagatggggttactgacaaactcttttactgagcaaggaaagcagtcttcttcgttaacgggtatgaaaatagcacaagggtttgctaagaactttgatgattttatcgtgcaaagattacaacaaaatcagtcatgtgctgacattcaaaatgaagcggaaaaaaatatcaacgcagggattaatcaaggtaaggacgcgtcaatgggagctgctgctgaaaaagccagcaaaaatgtggaggccgcaatgaaaaattatatcaaagtacagtgcgctaatttaactgaatga

SEQ ID NO: 121557 - DNA, 435 bp, Enterobacter cloacae
atggctaaagacggaaagcatattatccacgccggcggcgtgttccctaatccgctgcttaaccgcgaaggcggggcggccgcatcgactctgcctggtactgttggcttcttcagtactgctgacaagttcacggcctctgtggtcggggcagaatccgccatcaagtatgtggcaaacaaagactacctgcgctgcctgagtgttgatgacgcaatcccagccaatgaattggttgttggtattcatccgctgcctggcatgttcctaaatgtgcgagcagcagcgggcacttacaccaaaggccagccggttgcagtagccaacggtcagatcactgcggttgtagatgatgccgccgtattcgcttatgtcgaagaagataaagcagtcactgcggtggcgggcgatctgattcgcgttgtgttcaaataa

SEQ ID NO: 121558 - DNA, 351 bp, Enterobacter cloacae
atgtcatcggtagcgaactggagctataccgccacggcaaccatatggcgcaagatggacggcaatgacgaatacggcgatccgctgggctatgcggaacctgagcaaatcctctgtgattacgagggcgggctcagtaagaagttagccaatctgggctccgaaatcgtcgtgaagaacaccgtctggacggagttcgcgctggcggctgcgggtgattacctgctgattggcgtatcgacagaagctgacccggttgtcgccggtgccgacgaggtgcggcaggttatccgttatgccgacacgttcgagcgcctggcggatgattacgccatcctgacgggagtgtag

SEQ ID NO: 121559 - DNA, 384 bp, Enterobacter cloacae
atgacacccatgatgcacgagcgggtgcgcaacatgttcggcgacgccgggctaactaccggtttcacggtgcagcagctgatgtacgacgaccctggagatctgtcgaaggcgatcatggtgttcaggcctaacggcgggtcgaatattcggactgacctcggctctgagtatcacgtcctggtcgacgtcgtaggtgcaaaagataagcgcaaagacgcactcaatgccgtacagcgcatcgtcgattacgtccaggccaaccccatggctgacgagtgtgtcggctacatccagaacatgggcgccatccccgcgccggtgctcacagaagaagggcgaatagtcttccgactccagttcgcctgcacctatggagagtga

SEQ ID NO: 121560 - DNA, 279 bp, Enterobacter cloacae
atgctctttttattaatgattttcaatgtggtaagtagtagtatttatcttaatatcaatgaaaaaatagcaagtgagagcggggaatataataatgaaataaatgagttaaaaatagttcctacattagatagtaatcaagttgtatatgactatcttaataatacaataagtagtcaagtgggcaagtactataaattaagagctgagcatgggggtagtaagatttctataatcataaagtcacctatatctgacaataaaaataatcttgggtaa

SEQ ID NO: 121561 - DNA, 474 bp, Enterobacter cloacae
atggctaatactggaacgaattcaaatataggtaactgggtagcgattgtcagtgtcatcatgacggctgcaacagcaatttactcaacatgggataaaagcagaatggagattagacttgcagaagttaaggcaagttatgagatacaaaaggatgaagcatctagatcttggaatgaaagaaaagaacggtgtaatctaattattgatgctgcccgaaaacttgcccaatctcaggggaaagtctatcgtgaattaaatttagaccatcgagcagatttggaggaaagtttatggggagcagccacgattctttcaactcaaaatcaaaaaatatttctaactgaatatcaaaagggacctgccaaaaatgatgacggcggttatgaatatagagcaaaactgacctcgataactttacaaagtttagccattgatggacaaaaatgctttcaagaattggcatctaagtaa

SEQ ID NO: 121562 - DNA, 846 bp, Enterobacter cloacae
ttgaaaaattggacaccagaacatacgaaggacatcaagtgctggtttaacattgagacttactggggttttgaagagctaaccttgataaggttctatcatgagttgtgggccagaactatctttttcaaatcatatcgcagggattacgaaaaccaagctgcaatggaatatttcgaaaaaattttcagcggcaacccttttttgattgaagaagaaaggctgggatacatgacacagaaggacaatctgtttcaacctccacacttcttgctgactactacagatgaaattgcccgtttgagcattctctccatgaaaaggggaatgttcttttgggatggtgattacggatatgtagtaaataaagagtttgaagaaaagcctatctctgagagtatgcccgatgaattcacacgaaccgtcatgttcgaaattgacctggcaagtggcacagacgaagaaatcgcagagtcgctcaaatctgcacttcctcagtggcgaaaaattaaaggaatagaagaaaacccacttgaatctgttcgttttggttatggcaccatcaaaaagttaatcagttatcggatcatacctatgctggacattctcatatgggcaaaaataaaaaaggttcgtatttcggatgacagactatccaggctgctttacaccgatgaagatgaagagagtgaaatgagattgccacaacaaattaaagatactgacagacctctcgcactcaaagcctctactatggactttattagacagttgcatttttttatgaacaagaataatcatttaaaaaatgtgaaaatatctgatgtgataaagcttgtggactaa

SEQ ID NO: 121563 - DNA, 264 bp, Enterobacter cloacae
atgcaaggaatggctatcaccaaaccgtatcgtcacttaaaagagggttatttcagaaagcgtcatgaagatcgtaaaaccaagatcccaacgcgttacagcgtacacgcagccctgaatctgaaaggggactggctcgaaaaagcaggctttttaacccattcgcaggttcgggtggaggtcgggccgggtaaaataattatcgaactcattaaagagccggatgatggacatcccggccatgtcgttcagcgagagcagtaa

SEQ ID NO: 121564 - DNA, 483 bp, Enterobacter cloacae
atgaccaaaaaggcaaccgttctgttgtttctggtattcttcctcgctggcgcactggccgcatggctataccgtctacaccagcaaaacagtgaaaatacggaggcctgttcagcgtcaatcgtcgtctatcatgaggatattcgcgctaacctgacgatggacttcatgtacacgatgaagaagcagactggcgtcattgcgctaagcggagcctattataaaaatgataaacttgctggcgttatccgcagagatgtctcctatgtatggacagaaaataaagactcattccattttacatcggtaaatatacatgacattaatggtcagcaaaccgcaccaaatgagattatgaatgaaattctccctgacttctttctgtatccgaagaaaaacctgaattattccattacgcagcaggggccccgtgggtttatgttttctgtcggaaaacgccctattttttactgctctcgctga

SEQ ID NO: 121565 - DNA, 825 bp, Enterobacter cloacae
atgttctggataattaacgataaaattaaattttgtccagagaggaatttgctgatttcgttgacccgtcctgacttaaatgtaattctgacaacccctgccagccgttgtctgaaccttcttttagaatcatttccagaagtcgttacgcagaaatacttctttgataaagtctggggcgaggacggcatgctggttccggcaaatacgctttatcagaatatctctataattcgacgcgggctccggaccacaggagagacggacgatacgctggtggcgacggtgccgagaaaaggattccagatagagaaaaatgtcagggtaacccgcgttgacacggactgtgttgatgacggaaaaaaagcgacagcgacgggagtggaaacctctccggttgaaacaaaggataaacctgtcgaaaatattcccgtaatgccgggtgggaggaaaaaacagcgtcaattacgccagtatattttcccgacagctttaatgataatcgcgttttgtgccggtttctttgcgtttcaataccttttacatgataacccggaaaaagattttttcagggattatccaattactcttacacagaacggctgtcatttttcctcgcaaaacgatgatattcgtggcgtcggcaacttcaggcgatttataaaaatcattttagacacggggcttgattgtaaaaaatatccgtgggtctatttttcctcatccagccatgctccggcgctttccgttcttgcttgcagagaaccctttgaaataaaagcaaatgccggatgtatttcgctctattttagaggacatctctga

SEQ ID NO: 121566 - DNA, 1428 bp, Enterobacter cloacae
atggcatttgatgatttgagaagcttcctgcaggcgctcgatgagcaagggcaactgctgaaaattgaggaagaggttaacgccgagccggatctggcggcggccgccaacgcgaccggacgcattggcgatggtgcgcctgcgctgtggttcgataatattcgcggcttcaccgatgcccgtgtggtgatgaacactatcggctcgtggcaaaaccacgctatttcgatggggctgccagcgaataccccggtgaaaaaacagatcgacgagtttattcgtcgctgggacaaattccccgtctcgccagagcgtcgtgcaaatccggcctgggcgcagaacacggtggacggggaagacatcaacctgttcgacattctgccgctgttccgcctgaacgacggtgacggaggcttttatctcgataaagcgtgcgttgtctcccgcgatccgctcgaccccgatcacttcggcaaacagaacgtcgggatctaccgtatggaagtgaagggcaagcgtaagctcggcctgcaaccggtgccgatgcatgatatcgcgctgcatctgcataaggcagaagagcgcggcgaagacctgcctattgccattacgctgggtaacgatccgatcatcaccctgatgggcgccacgccgctgaaatacgatcaatccgagtatgagatggccggtgcgctacgcgaaagcccgtatccgattgcgacggctccactgaccggtttcgatgtgccgtgggggtcggaagtgatcctcgaaggggtgattgaaggccggaaacgtgaaattgaagggccattcggtgagtttaccggacactactccggcggacgcaatatgacggttgtacgcattgataaagtctcttaccgcaccaaacccattttcgaatccctttacctcggcatgccgtggaccgagattgattatctgatggggcccgccacctgcgtaccgctctatcagcagctaaagtcggaattcccggaagtgcaggcggtaaacgccatgtacacccacggtctgctggcgattatctccactaaaaagcgttacggcggttttgcccgtgcggtcggcctccgcgccatgaccacgccacacggtctgggttacgtgaaaatggtgattatggtggatgaagacgtcgatccgtttaacctgccgcaggtgatgtgggcgctgtcatcaaaggtcaatccggcaggcgatctggtgcagctaccgaatatgtctgtgctcgagcttgaccccggctccagcccggcggggatcactgacaagctgatcattgatgccaccaccccggttgccccggacaaccgtggtcactacagccagccggtacaggatctccctgaaaccaaagcctgggccgaaaaactgaccgcgatgctggcggcacgtcaataa

SEQ ID NO: 121567 - DNA, 399 bp, Enterobacter cloacae
gtgccgtttgttaccgcgtatcgccgcaacaccatcgcgctggataccgaaacgctaccggacaacgccgacgtcacccacgcggcgcagatcgtgacgccaacccgcggggccgtggtgcgcgccagctttaacacccgcgtgggtaaccgcgtcctgatgacgcttacgcaaaagggtaaaccgctgcccttcggcgcaacggtcaccaccgaagataaggacagcgaatttattgtcgggaatgacggccagacctacctctctggtctgccgcagcaagggcatctctacgtttcctggggacagggggcgaacgagcactgcgtcgctgactatgcgctaacggatgagaaagagcaaaccagcatcattaacgctgccgcgcagtgtcactga

SEQ ID NO: 121568 - DNA, 675 bp, Enterobacter cloacae
atgcgccacggttatttactgagcactcttttactggtagcagcctcggcacaggcgggggtcgtgattaatggcacccggctggtctatcagggagataaaaaggaatcttctcttggtctttcaaacccggataccacggattatctggtgcagtcctgggtcgattctggcggtaaaaaccaggccaaagccccgttcctgatcaccccgccgctttttcgactggatgcgaaagaggataacgtcctgcgcgtagtccgtacgggaggaaatttaccggaagacagggaatctctgtactggctgaatattaaagcgatcccgtcctcgaagcatgtcgaaggggtaaatacgctgcaaattgccattaatacccgcattaaattgctctatcgcccgtcagccgtaaaaggcagaccagaagatgtggccgataaacttgaatggcatcgcgaagggaatgatttagtggtgaataatcccacacctttctatatgaattttcagaccgtcaccctgaatggtcagaaagtcaaaaaagccacctgggctgtgccgaaaactgaaacgcattttgctttacctggcaacgtcggaggttctaccgtcgcgtattccattattaccgattacggcagcatcagtcagacatggtctaaacccgttcattaa

SEQ ID NO: 121569 - DNA, 1302 bp, Enterobacter cloacae
atgagtcaggacatcaataacaccattgcgacaggcaaaacccgtcgcgtcatcaagaacctgcgctggtacgtgctggtgctgtttttgctgggcgtcaccgttaactacatcacccgaaattccttaggtattctcgctccggagctaaaagagagcctcgggatcaccacagagcagtactcctggatcgttggcgccttccagatcgcctataccattttccagcccctgtgcggctggctgattgacgtcattggcctgaagattggctttatggtctgcgccgggatctgggcgctgatgtgtattttccacgcgggcgccggaagctggctgcacctggccatactgcgcttctttatgggggcttcagaggccgccgccaccccggcgaacgccaaaaccatcggcgaatggttcccgaaatcagagcgtcccgttgctgctggctgggcaggcgtgggcttctccatcggcgcgatgctggctccgcctatcatctactttgctcacgcctcgttcggctggcagggcgcgtttatgtttaccggcgtgctggcgctgctgtgggtgatcctctggtgggcgttctaccacaaccccgagcagcacccgaacctgagcaaggacgagctggcgtttatcaagcaggataacgaaccagcgccggtcaaattgcccttcctgaccgcgctgaaaaccgtttcaaaaaacaaacgtttctacggtatcgccattccggcctttatggcagaacccgcctgggcggtgctgagcttctgggtgccgctgtacctcgccaaagagcacggcatggacctgaagcagattgcgatgtttgcctggctgccgttcctcgccgccgacctcggcagcgtggcgagcggctacctgacgcgtctgtatacccgcctgttcggctgctcccgcgtgaactcggtggtggccagctccgtcacaggcgcgtttctgatgatttcactggcggtcgtcgccgtaacccgcgacccgtatatcaccatcgtgctgatctccatcggcggcttcgggcaccagattatctcctgcatgctgagcgcgctggtggtggagtccttcgataagggccaaatggcgaccgtcaacggcatgcgcggctcggcggcgtggatcgccagcttcctgttctcgctgttaatcggggtgaccgccgacaaaatcggcttcaacccgctctttatcgccatggggttctttgacctgattggcgctttcttcctggtagcatttattgctgaacgtcgcgccaagcgcgcctga

SEQ ID NO: 121570 - DNA, 477 bp, Enterobacter cloacae
atgaccaccctgaatctcaacaccctcagcgagcgcattaaggcgtacaaaacggccctggtgcatatcgtgaagccgccggtctgtaccgagcgcgcccagcattacaccgaaatgtaccagcagcacatggacaagccgatcccggtgcgccgcgccctggcgctggcgcatcacctggccaagcgtaccatctggatcaagcacgacgagctgatcatcgggaaccaggccagcgaagtgcgcgccgcgccgatcttcccggaatataccgtctcctggattgagaaagagattgacgacctggcggaccgtccgggcgcgggctttgcggtgagcgaagagaacaagcgcgtgctgcatgagatctgcccatggtggcgcggccagacggtgcaggacgctgctacggcatgttcaccgacgagcagaaaggcctgctggaaaccggcatcatcaaagccgaaggcaacatga

SEQ ID NO: 121571 - DNA, 723 bp, Enterobacter cloacae
atgacgccaaccattgacctgcttcgttcccaccgttccattcgccatttcaccgatgagccgattacccaggcgcagcgggacgcgatcatcgacagcgcaagaggcacctccagctccagctttttgcagtgcagctccattatccgcatcaccgatccggcgatgcgtgagcagctggtaacgctgacgggcggacaaaagcacgttgcccaggcggctgagttctgggtgttctgcgccgattttaaccgtcacctgcaaatctgtcctgaggccgagctggggctggcggaacagctgctgctgggcgttgtggatacggcactgatggcgcaaaacgcgttcacggcggcggaatcactggggcttggcggcgtctatattggcgggctgcgtaacaacatcgaaagcgtgacggaactgctgaagctgccgaaacacgtgctgccgctgtttggtctgtgcctcggctggccggcggataacccggatctgaagccgcgcattcctgctgcgatgctggtgcatgaaaaccactaccagccggtcgaccaggacgttctgcatcaatacgatgaagagctggcgaactactatctgacgcgcgacagcaacaaccgccgcgacacctggagcgaccatattcgtcgcaccatcatcaaggagaaccgcccgttcattctcgactacctgcacaaacagggctgggcaacgcggtag

SEQ ID NO: 121572 - DNA, 1479 bp, Enterobacter cloacae
gtggacgaactgagtaaatccctgtgtagcagcaactacgcaaaagataacggcgttctgctttacaacaatgacgtctatatccgtgaggacaccccggcgttagcactgctggaggtgcgccgggtgcttggacgcgcgttcgtcccgatcaccctggcgccggaagcgtttgatgagatgctggccaaaatctggcagcagagcagcggcgtgtcgcagcagctggtggacgacatggacgcggatatcgatctgatggcgttaaccgaggagatcccggataacgaagatctgctcgataacgacgaaaactcgccggtgatccgcctgatcaacgccattctcggcgaggcggtgaaggacggcgcgtcggatattcatatcgaaaccttcgagcgcaccctgagcattcgctttcgcgttgacggcgtgctgcgcccggtgctggaaccggcgcgtaagctcgccccgctgctggtatcgcgaatcaaggtcatgtcgaaactcgacatcgccgagaaacgtctcccccaggatggccgtatctccctgcgcatcggtcgcaaggcgatcgacgtgcgtgtgtcgaccattccgtcccagtacggcgagcgcgtggtgatgcgtctgctcgataaaagcaatctcaagcccgacatcaacaagctggggctgattgatgaagaactggagaagctgaaagggctgatcgaacgcccgcacgggatcatcctcgttaccggcccgacgggttccggtaaaagcaccacgctgtacgccattctttcagcgctgaacggccacgaacgcaacattctgaccgtggaagatccgattgagtacgagctggaaggggtggggcagacgcaggttaacccgcgcgtggacatgacctttgcccgcgggctgcgcgccattctgcgtcaggacccggacgtggtaatgatcggggaaattcgtgacggtgagaccgcccagattgcggtgcaggcgtcgctgaccggtcacctggtgatgtcgacgctgcacaccaacagtgccgcaggggcgataacccgtctgcgggatatggggctggagtccttcttaatcggttcatcgttgctcggtgtcattgcccagcgtctggtgcgtcggctgtgtacgcactgccggaccaccagtccgctggacgccaatgaaaaagcgctgttcagctttatggacgcgccgccagaagcgatttaccgcgcggtggggtgcgaacactgccgtcagagcggctatcagggccgcgccggtattcatgaatttctggtggtggacagcgccatgcgccgcgccatccatgaagataaggacgaaatgtccctcgaaacgcagctctttaagcaggcctacagcctgcgtgaaaacgggctgctgaaggtgatcggcggcgtgacgtctctggaagaggtcatgcgcgtcaccgccgagcgtgggggggatgcataa

SEQ ID NO: 121573 - DNA, 609 bp, Enterobacter cloacae
atgaaaattctgcacttgttaaccggacacgtttcttacgagctcctgcaacacggaaaacggattgaggacgctattgcccgccatgacaatgatttattaaaccattccacacccgaactggagcggtatttttcacgcccgcttagtgagctgccacggcaaaatgcttatccggtagcgatattattaccgctatttctggtgatttttgcgtttaatttgctgccatttctccagacaatatccagtatgtcgccaacgctacatacactcagtttttttgtcccatcgctagcgatacttatcttcctgatgctcgcgagtgccttccttgcccggggatacacttcagggctatcagggtttttagcgcttttcatcatcctgctgacattaacggtactgcaatggcttcactatctgaccatttctgatggcagtagctggcagctgatcattgcaacgatcgctttggtaattagccgtatggtgttaaacagtcgaggctttgtgctgttcacgctatattgtcgttcgaagcgtcttgccacgctggctcgcatcatgcgcctaaagagcggcaaggataatgtgaggaacacatga

SEQ ID NO: 121574 - DNA, 756 bp, Enterobacter cloacae
atgagaacttttataatcaatctcaaacactcgctcgaacgtcgtgcaaaaatggaatctcaactattaaagctgaacatagcacacgaatttatcgaagcaattgatggtcggaaaatggctgaagctgaacgcaaaaatgttacgcgcgaggtaaattatgcttttctcccgggtgaagttggttgcgcattaagtcatcaggaaatatataaaaaaataatatatgaaaatatcgacgcagctctcatcctcgaagatgatgttgtaataaataatgatttacgtgaaatactcgacaacgtaacgcttagcgcgactaaacctgagattatacttcttagtcgagttaataaatattacaaaaagcctcttaaaagcataagcggctcatatagcattcataaaactcaacaagccacgactgctcacgcttatattattaatcaaaaagctgccagtaatctccttcaaaacctatatcctgtgtggatggtttctgacaaatggaccttgtttgaagatttatctttagcgaaaattcattcaatcgtgccttttccagtacgtctttccgaagaagcgaacgcctcgactattaatgaatcgaaaggcgatgctgctttagatgccaaaaagaaagaaatctgggagttgctgatgcgggaaagacctttagctgcaaagcttcgccaccgttatcgacgcgcgattacgccactgttcaatacaataattaatcaagggaaagggtaa

SEQ ID NO: 121575 - DNA, 3114 bp, Enterobacter cloacae
atggctaatttctttattcaacggcctgttttcgcctgggtgctcgccatcattctgatgattgcgggcgggctggccattttaaaactgccggtggcgcaatatccgaccattgcgccgccagcggtggcggtgacagcaacctaccctggcgctgatgcccagacggtacaggacaccgtaactcaggttatcgaacagaacatgaacggtatcgataatttgatgtacatgtcgtccaccagtgattccgccggtaacgtcaccattacgctgacgttcgagtcgggtacggatcctgatatcgcgcaggtgcaggttcagaacaaactccagctcgccatgccgctgctgccgcaagaagtgcagcagcaggggattggcgtggagaaatccagcagcagcttcctgctggttgcaggctttgtgtcggacaataaaaatctcacgcaggatgatatctccgactatgtcgcttctaacgtaaaagatgcgatcagccgtacttccggcgtcggtgacgtgcaactgttcggtgcccagtatgcaatgcgcatttggctggacagcaacgcgatgaacaaatatcagctcacgccgctggatatcattaaccagctgaaaacacagaacgaccagattgctgcgggccagttgggaggaacgccgtccgtaccagggcagcaactgaacgcctcaattattgctcaaacacgcttgaaatcgccggaggagtttggtcgtgtgacgctgaaggtgaaccaggacggttcaatggtccacctgaaagatgtggcacgcattgagctgggtggcgaaaactacaacatggtcaccaaaatcaatggccaggcagcaacggggctggggatcaagctggcgactggcgcaaacgcgctggataccgctgccgccatcaagagtaaactggcgcagttgcagcccttcttccctcagggtctgaaagtcgtgtatccgtacgacaccacacctttcgtgaagatctccatccatgaagtggtgaagacgctgtttgaagcgattgttctcgtgttcctggtgatgtacctgttcctgcaaaacctgcgggcaacgcttattcccactatcgccgttcccgtggtgttactgggcacctttgcggtactggctgcgttcgggttctccattaacaccctgacgatgttcgggatggtattggcgataggtcttctcgtcgatgacgccatcgtggtagtcgagaacgtagaacgcgtcatggttgaggacaagctgccgccaaaagaggcgacgcagaagtcaatggagcaaatccagggcgctctggtgggcattgccatggtgctttcggcggtatttattccgatggcattctttggtggttcaaccggggctatctatcgccagttctcgctgaccattgtctccgcgatggccttgtcggtactggtggcgttgatattaacgcctgctctttgtgcaacgctgctcaaaccggtttccagcgaacatcatgaaaagaaaggtggtttcttcggctggtttaacgcgctctttgataagagtgtggagcactacagcaacagcgtgagcggcattttacgtaagaccggccgctatctgctggtttacgtcatcatcgtcggcggcatggcagttctgttcctgcgcctgccttcctccttcctgccggaagaggatcagggtgtgtttatgacgatggttcagttgccggcaggggcgacgcagatgcgtacccagcaggtactcgatcaggttcaggattattacctgacaaaagagaaagcgaacgttgaatcggtctttaccgtaaacgggtttagttttagcggacagggtcagaactccggtatcgctttcgtcagcctgaagccatgggaagagcgtccgggcaaggaaaacggcgttgaggcgattgtcagccgcgcgacgaaagcgttcagccagatcaaagacggccttgtatttccgtttaacctgcctgccattattgaactgggtaccgcaacaggctttgactttgaactgatagaccaggcaaacctggggcatacgcagttaacgcaggcgcgtaaccagctgctgggcatggtgagagaacatcctgacttactggtccgcgtgcgtcctaacggactggaagatacgccacagttcaagctggacgtcgatcaggagaaggcacaggcgctgggtgtgagcgtgtctgacgtcaatcagactatttcaacagccctgggtggcacctatgtgaacgactttatcgatcacggacgggtgaaaaaagtttatgtccaggctgatgctcgcttccgtatgctacccggagacattaacggcctgtatgtgcgtagcgctaacggcgaaatggtgcctttctctgcctttagcagctctcactgggtgtacggttcaccgcgtctggaacgttacaatgggatgccatcaatggagatcctcggtgagtctgcaccaggcaaaagtaccggtgaggcaatggcgctgatggaaaaccttgcgtcaaaactgccgtccggcatcggctatgactggacggggatgtcttatcaggaacgactttccgggaatcaggctccggcgctgtacgccatttcacttattgtggtgttcctgtgtctggcggctctctatgaaagctggtcaattccattctcggtcatgctggttgtgcctctgggggtgatcggtgcgcttctggctgcatcaatgcgagggctgaacaatgacgtttacttccaggttggtctgcttacaacaattggtttatcagccaagaacgccatactgatcgttgagttcgccaaagatcttatggataaagaaggcaaagggattatcgaagccacgcttgaagcctcgcgtatgcgtctgcgtcctatcctgatgacttccctggcattcatccttggtgttatgcctctggtcatcagcagcggtgcaggtagtggtgcacaaaatgcggtcgggacgggcgtgatgggcgggatgctctcagccacactgttggccatattctttgttcctgttttctttgtggttgtccggagacgatttacaaagcacaaggattaa

SEQ ID NO: 121576 - DNA, 639 bp, Enterobacter cloacae
atggctgtcgctgccaacaaacgttcggtaatgacgctgttttctggtcctactgacatttatagccatcaggttcgtatcgtgctggccgagaagggtgtcagttttgagatcgagcatgtggaaaaggataacccgcctcaggatctgatcgatctcaacccgagccaaagcgtaccgacgctggtggatcgcgagctgaccctgtgggaatcccgtatcattatggaatacctggatgagcgtttcccgcatccgccgctgatgcctgtttatcctgttgcgcgtggtgaaagccgcctgtacatgcagcgtatcgagaaagactggtactcgctgatgaacgttattgtcaacggttcctcttctgaagcggatgctgcacgtaaacagctgcgtgaagagctgctggcgattgcgccggtatttggtcaaaagcctttcttcttgagcgacgagttcagcctggtagattgctacctggctccgctgctgtggcgtctgccaaccctgggcgtagagttcagcggtcctggcgcgaaagagctgaaaggctacatgactcgcgtctttgaacgcgactctttcctggcatccttaactgaaccggaacgtgaaatgcgtctcggccgaggctaa

SEQ ID NO: 121577 - DNA, 678 bp, Enterobacter cloacae
atgaaaaaagttcttattgccaccgcactgtctctttgcgtcgcttccgcatttgctgctgataccgcagtattgcaggtaaaaggtaagctgacaaatgctgcctgtactccagaattaagtaaaggtggtgtagtagattacggtactattcaccttggttcattgtctgccagcgcagtaaaccagttaggtcagaataatatcgatctaaccatcacttgttctgctgcgacgaaagtttcgtggactatggttgacgatcgtgcagagacgaatgcgggtttaaccgttaataacgcaatgtttaccggtgcaagcctatccaattctagtcagacctacggtgtaggtaaaacaacgggcggcgtgaacatcggcagctatgcaatgtttgttaaggttgatagcgtaaccgctgacggggcgacagttgatcctatttacactcagaatggtgatacctccaagtggaccacgagcacgaatggttctagtcaggctcaaaacatccgtgagtttactgttgcaaaatctggcgaaaaagttccattggcattcctgagtgcaacattcccgctggtgacatcactggctattcaggatactaccacgctggccattaccgacgataccacacttgatggtcagctgactatcagcctgaaatatttataa

SEQ ID NO: 121578 - DNA, 705 bp, Enterobacter cloacae
atgtcttgtttaaagaaaaccttactgaagtccgttattgctgccgctctgttttcagctcaattctcgacgtatgcagcaggaatggttcctgaaaccagtttactggtaattgatgaggcaacgcacagcggtacgatcaacgtcaaaaatacggacagctttccggctctgctatataccaatgtccttgatttaccggacgatcagggtttaaaactgatttccacccaaccagtggtacgtctggagcctggccagacccagcagcttcgttttattttacaaaataaagaaccgctggaggctgagcactataaacgtgtgacgttcgagggtattccgccgaaaagcgataacaagaacattaagatcggatttaatcttcgtcaggatttgcctgtgcttatccgtccggcgaaactggcggttgttaccgatgcatggaagtacctggaatggaacgcaacgggtacaacgcttacggtgaaaaaccccagcaaatacgttgtgcgtttggcacaaaacgttatgactcagccatctggcaccgcaggcacgctgcctaaaacgtatattttaccaggccaaagtatgaccgcaacgctgaagaaaacggtgagcggcgataataaagtgaaatttttcccggccagtcgctacggtgtggaagtaccgagctttgtttcagaattaaataaataa

SEQ ID NO: 121579 - DNA, 2418 bp, Enterobacter cloacae
atgacggtgtgtaaaaaaagccgccttgcactttgtgtccgcgctattctttgcggcacattacctctggtagtcctcgcgtcaccctctttgtatgcgagggaagtgacgtttgatacgggcattattcagtcacgtggattaagccccgatttaaaccattactttgcacaagcgccacgattcttacccggcacacactctgtacaggttaaagtgaatgggaaagatcgcggtacggccgctgcacgttttaatgaagacggcgagctctgtattgataaagattttctggattttgccgggattatgcctgtcccgctcaaggctggcgaagcgtgccatgatatccgcagcgattatgcgcaggcggttgtcaacgcattaccaaaccaggacgcggtagagctttatttaccccaggaggcaattaacagtttaacctccaatattaaacactttcagcaaggtggcacggcggggttactgaactactcattattcagtacccgtaacgaatatggcgacagcgataacagccgctattcgcaggctagcctggaggctggctttaatacgatggactggtctgtgcgcagccgttatatcctgacggatgatgatggcgataaaaatgcggaaagcatttacacctacgcggagcatgtatttgttccccagcgcctgaccatgcaggtgggtgaaattaacgccatgtccggtgtattaagcggcgtgccgattacgggggtgcagctcatgcccaccaacggcctggaaagggacgggactggcgtaagcgtatcgggtatcgcccgttcctcgcaggcgcgcgttgaggtgcgccagagtggtcgtctcgtctacagtacgttagtgccggcgggtccgtttaccctggacgatgtgccagttgtcagaaataacgtcgatctcgacgtgactgtcgtggaatcagatggctcttcaagccacttcattgtgcctgcttccgcagtcagaacccgcaagctggggcgtccgcagggattgaccatgtctgtgggccaggtacggagtatggacagcgattatagcgatccgctggtcgcgaacgtctctgacggctggcgtatcacaccatggatgaacgcactggcatccggcgcagtggcagaaaagtatcaggctgcgggcggcagcgcggagtttatgctctctgatatatggggcatcacgactaccgctgcggcaagtaaagagcagtttggcgacagtaatagcgggctcaaaaccgagctgcaaagcgatttaacgctgggtgaacacgtgagcctttccgccagcgcaacgcattttagcagcggttaccgcgagcttgccgatgcgctggatgatgaatttcagcctaatgataatacttacagcggcaacgtaagttttgcgacagggattgcgggtacgtttagcgcagggtttaactacaaccagagcgcaaactacgaggacagccgctacctgctgctgtcgtggggtaaaacctttaaatatgccagcatcaccgtgaactggcagagcgccgtcggaaatactgatgacgagcaggatgacgatatgctctacgtcaacctgagcattccactcggcggctcgcaaagcctgagcagctatatgcgcaagcagggtgacagaaccacctatggtgtcgcgaacagcggcgccattggcgataacaccaattattatatctctgcggatcgtgataacgatgacaatgagaatagctttaacggcaatatcaacactaacctgcactatacccagttgagcgttggtgggggcagcagcggtagtaaccagcgcaactatagcgcaacgctgacgggcggtattgcaatgcataaagatggtgtgaccttctcgccgtacgctattaaagatacgttcgccatcgctaagctgaacgagccgaagagtggtgtagagatttcaacgccgcagggcaccatctggaccgaccattggggacaggctgtggtaccggggctgaatgagtggcgtaactcccgtattgaaattgatgccaataagcttccgccaagcatgacgctggcgaacggcattaaatacgttgcggcagggcatgcttccgtcagtgaagtcagctttaaaattctgaatagccgtcgcgtgatgctgcgggtgaagagagcggatggtacaccactggcgaaggggttatccattgttgatgagaagggcaattatatcgtcaccagcgtggatgacggccatgtgtttatcaatgatgccgatcagctgaaagggctgtatgccatggatgacaataacaatcggctttgtcagattcactataccttaagtgataaaaaagatgacgaagcgttctatgaggaagtaaacggagtatgccaatga

SEQ ID NO: 121580 - DNA, 567 bp, Enterobacter cloacae
atgaagactcagcgcgtaatcaaagtagcgacgtttctggcgttttgtttacccggtttgacgcttgccgaagattgtcagatcacgctttctcagcccatagtagattataaacagctcaagcgtgacgatattgttacgtctcagcaaagctggcataaattgccggaacgggaagttaccgtgaatgtgttttgtccagacaaacagaagctggcagtgcttttacagggtaatgctggagagaaaggtcgcttccgttttggtcagaatggcggtgtcgcagttaaaattgatgatatgaatgttgatggcaaaagctataccgtgggtaaaacggttgatcagcttaactttacgccggaaagcgggtcgccttcgccattctatttaagaaataatgaagccgtcgtcgcggttgaaaataaccaggccgttacgggccagcagatgacatttacagctacgatattccctgtgcttaatgaaagtgcattcagtaataatgccgatcaaacaacgctggaaagcgatttaagctggaaaatattgcaaaataatccatag

SEQ ID NO: 121581 - DNA, 666 bp, Enterobacter cloacae
atgaaaaaagttcttctcgctaccgcgttgtctctatgtgtcgcttccgcatttgctgctgataccgcagtattgcaggtaaaaggtaagctgacaaatgccgcttgtactcctcagttaagtaacggcggtgtcgtagattatggcactatccatttgggtgagctctctgcaacagctgttaaccagttaggtgacaaagatattaacctgacgattacatgcggtgcgcctactcaggttggttgggttgtgaatgacgatcgcgagtcaagtaaggctggtattaatgtcgatttcaacggcacaatgcaaaacatttcttactatcagtatggcgtaggtaaaaccacaggtggtgtgaatattggtaactatatgcttttcatcaaaaataagaaagtcaccattgatgggcaagagggcgacgaaattttttcaaacgtcgactggaatggctctaaatgggaatcaggcggtgcggttcgcagcgacggtatctccattatcagtgccgcaaccacaggcacaacgacccctgttgcatttaccactgcggttttcccactggttacctctctggctattcaggggaccgatacgctggcgattactgacgatacatctttagatggtcaggcaacaattaccctgaaatacctttaa

SEQ ID NO: 121582 - DNA, 648 bp, Enterobacter cloacae
atgcttgtcatgtttgtatcttctgcctttgccgcagacaccgccgtactgaaagtcacaggcgttctgacaaatagcagttgcacccctgaaatcagcggcggtggcgtggtagattacggtacgatccacctgtcagccctgaacaccactgctattaaccagctgggccagaaagatttctctctttctattacctgccctgcgctgaccaaagcgggctttagcgtttctgacgaccgtactggtactgcgccaaacattatggttaaagatggtgcgggtaacggtaacgatattattcagccgctcaatatgtttggtctgaataagaccgcaggaaacgttaacatcggtaactacaccattttcgtgaaaaacgacacaattactgctgatggtgccactgttggggcgatctacagcgcagacaacggcaccagctggtctgataacggcacactgatggttaatgacggtagccagattgtatccgttgctacagttggcagcaccgctccagttgcgtttaaaaacctggtcattccgatggcggtttctgctgcgattcaggataccaatacgctggctattactgatgataccaacatggatggtcaggcaacgtttaccatcaagtatctgtaa

SEQ ID NO: 121583 - DNA, 906 bp, Enterobacter cloacae
gtggatcagctaatggcaatgcgtgcctttacgcgggtggttgaatccggaagctttacccgagcggcagactccctgaacatgccgatagccacgctgagcaagctggtaaaatcacttgaagcgcacctggaaacacggctgctgcttcgcacgacgcgccgggtggtcacgacggcagaaggcatggaatactacgagaaagcgctacgggtattaattgatatagaggacattgataccgcctttcgcgcatcgtgctgcacgcccaaaggccatttgcgtattgacgtggggggctcaaccgcccgggacgtgctgatccccctgctgccggatttttttcagcgctacccggatctgcgcattaacctgggggtagccgatcgtccggtagatttaatcagcggaaacgtggactgcgtgatccgcggcggcccgctggatgactcttcgcttatcgcgcggcatatcggtgatgccgggatgatcgcctgcgcggcgccgggctatcttaaagctcacggcatccctgcctatccgcaggagctgcgcaacggtcataagctgattagctacctttccccggttaccggacgcgcatttccgttccgcttccttgaccggggtgagcccctggagatcagcgttccgcaccaccttggggtcaatgaaagcaacgcacatctggccgcggcgctggcgggtttagggattattcagacgtttggctatgctgcgagagcgcatctggaaacgggcgcgctggtagagatcctgagcgactggcgtcctaaggcgtatccttttcacgtggtctatccccagagtcggcatttaacgcatcgcctgagagtgtttattgcgtggcttgccgaggttttccctgcggcagtgaaaggttag

SEQ ID NO: 121584 - DNA, 273 bp, Enterobacter cloacae
atgcgtcagctcaccgcaaccggcttctggccactgtaccgctttgacccgcgccgtgccgatgaagggaaattgccgctggcgctggattcgcgtccgccgtcagacgcccttgccgaaaccttacttcaggagcagcgtttccgcaggctgaacgcccagcagcctgaagtagcagagcagctatggaaggatgcggcagcggatcttcagaagcgttatgactttctggcgcaactggcaggaaaagccgaaaaatcgaccagtgaataa

SEQ ID NO: 121585 - DNA, 417 bp, Enterobacter cloacae
atgttcaaacctctttggcagcatggccgggcgatctgttttgctgatggctggttcgaatggaaaaaggaaggagacaagaaacagccctacttcattcaccgcgccgacggccaacccattatcatggcaacgatcggcagcacgcctttcgaacgtggagatgaagcagagggatttctgattgtgacgtctgcagctgataaaggactggtcgacattcacgaccgccgccccttggttctgtctgcagaagcggcacgtgagtggatgcgtcaggacctaggcggtaaagaagctgaagtgatagcagccgacggcgctgtgccagccgacaagtttatctggcacgccgtgacgcgtgccatggggaatgtgaaaaaccagggtccggagctagtcaaggcatcaaaatag

SEQ ID NO: 121586 - DNA, 591 bp, Enterobacter cloacae
atgaataaatttattttctgcgcgattgcagcgcctttgctaagtggctgcgcgatgcaacccgttccttctcagtatagaaatgccacaattacccttattgggcatagtaaggcagaagcaatgactgatttagggataccaacacgtacaatgcccatcaatggcagtcagacgatgtatcagtgggatagtaatcaggggacaacgtctgtcggttcttttagcactgatactaatgctgtgacggtgagtggttccagttatcagggatatggtaacggtttttctgggggggcggttggaacatctgacaccactggaaattatggcagtgctacggcaacccatatttgtgcattgtcattatcaatagataataaaactgataaagtactttcgggcaccttcaatggaactgttgatgaagcttgcatgaatcattttagcaatgttattacattggaccctaacgcggttaatgctaataaagcagcaataatgcataaccagcatgtaaaagaggctaaagcagtggtgggtgtattggctattgttggcgcaggtattgccgcttataatactcgttga

SEQ ID NO: 121587 - DNA, 765 bp, Enterobacter cloacae
atgtattccgatatcacccgaattttgactgacctggtgaaccgaacgttaccgctgggccagattcatttctcagcgctggctgaacagcatccccgaacatctccctgcctcgtcattacccttgctcccccctgtgaggcgatattttcatcctttggacacatcacgcttccaccgcctaacgccctgagcatacatttcggtaagcagcagctgactctcgatttacagcgtgacaacgcgcttttgcagcagctgcaggttccccggcgtggcccgagaacgggtgcttttcttctgcaagcgctcaccgaattacagatgcagccagacgagcaagacacagccatgctggtggtattaagcttgctcagccactgccgggatctgcttgggagtgacatccacaccgctaaccgcagccgggcgctattcgaagccgttcgtagctatatcgaagaaaattacgcctcttcgttaacgcgcgaatccgtggcacaggcgttctacatctcgccgaactatctttcccatctctttcagaagatcggccacgtggggttcaacgagtatctgacacaaacgcggctggaacatgcacgccagttgctgaaaggctacgatctcaaaattaaagatattgccgcacgctgcggatttcctgacagcaactacttttgtcgcctctttcgcaagcacaccgagcgttccccttccgaatatcgtcgccagtatcacagccagcttatcgccaaaaaatag

SEQ ID NO: 121588 - DNA, 1053 bp, Enterobacter cloacae
gtgctgattaccagcgtgcaaaacgctataggtaaagccggtaaacttggcaccctgtcaaaatccctgcaggccatcgccgaccagtgcaagccggtcgttgtggttgtacgcgttgccgaaggtatcgacgacccggatgacccggaagcggcacagaaagaaaccatttccaacatcatcggcacgaccgacgaaaacgggaaatacaccggtcttaaggcgttgctggccgcgcaaaccgtcaccggcgtcaagccgcgcattctcggcgtgccggggctggattctctggaagtggcgaccgcgctcgcggcaacctgtcagagcctgcgcgcgtttggttacattagcgcatggggctgcaagaccatttctgacgccatcaaataccgtgagaatttcagtcagcgcgagctgatggtcattcaccctgattttctcgcatgggacaccacggcgaacgaaaccgacattgcatgggcgaccgcccgcgcgctcggcctgcgcgccaaaatcgaccaggaaaccggctggcacaaaacgctctctaacgtcggcgtgaatggcgtcaccggcgtcagtacctcggtctcatgggatttgcaggagaagggaactgacgcgaacctgctgaatcaggccggggtgacaacgctcatccgtaacgacggctttaaattctggggcaaccgtacctgctcagatgacccgcttttcctgtttgaaaactacacccgcacggcacaggtgctggccgacacgatggctgaggcgcacgcgtgggcgattgataaacccgttaccgcaacgcttatccgcgacattgtcgccggtatcaatgcgaaattccgcgagctgaaaaacaacggctatatcgttgacggtacgtgctggtacgacccggagtcgaacagcgtggaaaccctgaaagccgggaagctgtatatcgattacgactacacccccgtccctccgctggaaaacctgaccctgcgccagcgcatcaccgatacctatctggcagacctgtcagactcggtcaacagctaa

SEQ ID NO: 121589 - DNA, 519 bp, Enterobacter cloacae
atggcgttaccacgcaaactgaaatacctgaacatgtttaacgacggtctcagctatatgggcgtcgttgaatccgtcaccctgccaaagctgacccgtaagcttgagaaataccgcggcggcgggatgccgggctcggtgtcggttgacctcggcctcgacgacgacgcgctgtcgcttgagtggacgctgggcggcctgcccgacgtcgagctgtgggcgcagtacgcgtcaccgggtgccgacagcgtgccgctgcgcttcaccggctcattccagcgcgatgacaccggcgctatttccgctgttgaggtggtcatgcgtggccgtcacaaagagtacgacggcggcgaaaacaagcagggcgaaagcggtacgaccaaaatcgcgaccgagtgctcgtattaccagctcacgattgacggcaaagaggtcatcgagattgacgtcatcaacatggtgatgaaagtcgacggcgtcgaccgtctggcggaacaccgtaaggcgattggcctgtaa

SEQ ID NO: 121590 - DNA, 303 bp, Enterobacter cloacae
atggaaaacatcaacgaaatcaacgaaaccgaaaactcaaacattgtgatcctcgataaccccgtcatgcgcggtgagcagaaaatcgaacaggtgaccgttacaaaacccaacgcgggaaccctgcgcggtgtgagtctggcctcgctggcaaactctgacgttgacgcactgattaaagtgctgccgcgtatgacgtacccggcgctcaccgagcatgaggtcatgcgtctggaagcgtcagacctgattttgttcgccggtaaggtggttggttttttgtcaccatcttcggctcgctga

SEQ ID NO: 121591 - DNA, 2448 bp, Enterobacter cloacae
atgagcaataacgtcaggattgaggtactgctgaacgcagtagaccgggcaagccgaccgctcaaagctatccagaacgccagtaaatcacttgctggcgatatccgcacttctcaaaacagcctgcgcgatctgaatgcgcaggctggccgaattgacggattcaggaaagcgagcgcacagcttgccgtgaccggccagtcgcttaacagggcgaaacaggaagccgccgcgctggccgttcagtttaaaaacacgctgaacccgactaccgcgcaggcgcgcgcgatggaggcggcgaagaaatccgccgctgaactgcagctcaaatacaacagcctcaggcagtcggtgcagcgccagcgcaccgagctcgcgcgggctggtattaatacccgtaccctgtcggcggatgagcgccgcctgaaaaccagcatcagtgagacgaccgcgcagctcaaccggcagcgcggggcactggcgcgggtcagtcaacagcaggcgcgactgagtcgcattaaagagcgttatcaggccggtaaatccattgccggaggcgctgcagcggcaggcgcggcgggcgtcggtaccgccacggcgggaacgatggccggagtaaaattactcacgcccggttatgactttgcacagaaaaactctgagctgcaggccgtgctcgggggcgaaaaacagtcgcccgaaatggaggcgctgcgcaaacaggcgcgccagctcggggacaataccgctgcgtctgcagacgatgcggcgagcgcgcagattatcattgcgaaaagcggcggggatgccgcagcgattcaggcggcgacgccggtcacgctgaatatggcgctgtctaaccgtcgctcgatggaagaaaacgccgcgctgctgacgggtatgaaatccgcgtttcagatgtcaaacgaccagatcgcacacattggcgacgtgctgtcgatgacgatgaacaaaacggccgctgactttgacgggctgagcgacgcgctgacgtatgctgcgccggtggcaaaaaatgccggggtcagtatcgagcagaccgccgcaatggttggcgcgctccatgacgccaaaatcaccggctcgatggcgggaacgggcagccgtgccgtcctgagtcgcctgcaggctccgaccggtaaggcatacgaggccatcaaagagctcggcgttaaaacgtctgacagcaagggcaacacgcgcccgatatttgccattctgaaagaaatgcagcgcagttttgagaaaaacaatctcggaacaagccagcgcggcgaatacatgaaaaccatctttggtgaggaagccagctcggcggcggcggtactgatgaccgctgcctcaagcggtaagctcgatcagctcacggcggcgtttaaagcctcggacggcaaaaccgctgagctggtcaaaatcatgcagaacaacctcggcggcgactttaaagaatttcagtcagcctatgaggccgttggtactgacctgtttgaccagcaggaggggtcactgcgtaagctcacccagactgccacgaaatatgtgttaaagctcgacggctggatcaccaataacaaaacacttgcgtcaacaatcggcatcatagcaggcggcgcactggcaattattggcatcctcggggcaattggtctggtcacctggccggtcattaccggcattaatattttgattgccggtgcatcactgctggggacggttttctctgcggtgggcggtgccatcatgaccgtgctcggggcgcttacctggccgattgtggctgttggcgttgccatcatcgccggtgcgctgctcatccgcaaatactgggaaccaataagcgcatttttctcaggcgtaatggaggggataaagcaggcttttgcccctgtagtggagttattcgaaccgttaaagccggttttcgactggctgggtgaaaaactcaaagcggcgtggcagtggtttaaagacctgatcgcaccggttaaatcgacgcaggagacgctcgacaactgcaaaaatgcgggtgtgatgttcggtaagatgctggccgaagcgctgatgttaccgctcaaaagctttaatacattgggtaccggcgttaactggttactggaaaagctcggggtcatcaaaaaggagtcgggcgagctcgaccagacggccgcaaaagccaacgccgccaccggctcgcaaaaggggtcttatattccggccacctcggcatatggaggatatcaggcctatcagccagtaacggctcctaccggaaagacttacgtcgaccagagcaagccagaatataacatcaacctgaatggtggcattgcgccgggcagcgaccttgaccggcaactccgcgaggctgtcgataaactcgaccgggaaaaccgtgcgcgtcagcgctcaagtatgcgtcatgactga

SEQ ID NO: 121592 - DNA, 465 bp, Enterobacter cloacae
atgttaatggttttaggtttgtttgtgtttgagcgccgcacgctgccctatcagtctatgcagtattcgaaggattaccgctgggcgtcaaacgaccgtatcggaaagccaccggcttaccagtatctcggggaaggggaaaccacgcgcacgctgtcgggtgtcctctatcccgaaattaccggcgggcgtctatcactgaccgccatcgagctgatggccgacgaggggcgcgcgtggccgctgattgacgggacgggcatgatccacggcatgtatgttatcgacaaagtgacgcacacccacactgagctattcagtgacggtgctgccagaaaaatcgagtttagcctgtcccttaaacgggtcgatgaatcgctggcggccatttacggcgaccttaaaacgcaggccgacaatctggtcacgtctgccggtgaatggctgggagggctggcaggatga

SEQ ID NO: 121593 - DNA, 1170 bp, Enterobacter cloacae
atgattacgggaatgaatattcaggccggggcgaagatagccccggcgtttatgctcaagctggataacgaggatatcacgcaggatttcagtgaccgccttatcagcctgaccatgaccgacaatcgcggattcgaggccgaccagctcgatatcgagctcgatgacactgactgccaggtagcaatgccgccgcgcggcgcaacattgacgctgtggttaggctggcaggattccgcgctgataaaaaaagggacgttcacggtcgacgaaatcgagcacaggggcgcgcctgatacgctgaccatccggggacgcagcgccgattttcgcgggtcgctgaactcgcgccgggaacagtcatggcatgacaccacgctcgggcaaattgtcgagacgattgcggcacgcaataagctgacggccagcgtggcagacacgctgaaagccgtcgccgtgcctcacattgaccagtcgcaggaatccgacgcggtatttctgtcccgcctggctgaccggaacggggcggcggtttcggtaaaagcggggaaactgctattcctgaaagccgggggcggtaagacggccagcggaaaacctattccgcagatgacgcttgagcgcggcgacggcgatcgtcatcagtttgccattgctgaccgggaagcctacaccggcgtgacggcaaaatggctgcacaccaaagaccccaagccgcaaaagcaaaaggttaagctcaaaaggaagcccaaagagaagcacctccgcgcgctgcagcatccgaaagcaaccaaagccccggcaaagactaaagccaaaaaagagcaggaagcgcgcgagggtgagtacatggccggtgaggctgacaacgtgctggagcttacaaccatctacgcgacaaaggcgcaggccatgcgcgccgctcaggcaaagtgggacaagctgcagcgaggcgtggcggagttttcaatctcgcttgcgattggccgtgcagatttgtttcctgaaacgccaatcgcggtgaaaggctttaagcgcgtcatagacgatcaggcgtggataatcagccgggtggtgcataacctcaacgggagcggctatacgacgggcttagagcttgaggttaaggtttcggatgtggagtacgaaagcgaagaattaacgcaatga

SEQ ID NO: 121594 - DNA, 222 bp, Enterobacter cloacae
atgtttcactgtccaaaatgccatttcgccgctcacgcccgcacaagtcgctattttactgacacgaccaaagagcggtatcaccagtgcacaaacatcaactgcagcgcgacgtttgtgaccactgagacggttgagcgctttatcgtttcgccgggggaggtggtgccagtgtcgccgcatccaacaacgtcaggtcagcaatcaatcaactggatgtaa

SEQ ID NO: 121595 - DNA, 891 bp, Enterobacter cloacae
atgtcaatttattatgatcttcctgaagatcaaaaaacaataactaaaaatgatttaaccactcggccaactgaatttcagattgaagttatgcgcacatggttttttcaaagatatcaagatcctgttcatgagtgtccatatatcagcgatgaaggtggatacctatttatttatggggggccctacgatgcaagagaagagttatttggagagtttactaatataatacccgacgaagtaattgaaatgttggcagatgaattggataatgaaggtatagaatggtctggcatatcaaaaccagaagattttgatgatgattatttcttcgatacatcaggtagtacaattgatccatataaagatttccttggttcaattaataacctccgagcaatgatgtcactaaatattcatgatgaaacacaaaagcaaacttacttgactatgctttttattaattccataactattatggaagtttttttatccgagtattttatagggcgaattgaaactgataaatgttacctcagacggtttattgaaacaaataaagatttcacaaaggaaaagttttcgttatcagaaattttttctaaaatggatgagattgaaaaattcgcaaaagaatatttgatggggttgctatggcataacttgcctaagattcgagcgatatacaaacattctcttaatatagaatttcctgagtcactggagaatcttattaaagcaacgcatattcgacatgatttagtccatagagctggcaagacttcggaaggaaaaaaaatttctctttgcatgaatgacatagatgtattactagatgaacttgaagcatttgcatcacacatagagaaaaataatttcccggaattttaa

SEQ ID NO: 121596 - DNA, 477 bp, Enterobacter cloacae
atggataatagggtattaactttttttagcgctagtgacatatttgatcatatggttacccggcaattaagtcatataaaatctaattgggaattaacttgggatgatatagaagaacaatttgaagtagaggaaaatagttatgcctctacattaaatgatttattgatcgaactaagtttgcttgaacctcctagagcttaccatgataatgaggatcaacttgcagaatactgcaaagaaaatcttaattggccaatttataaagaaggacgattttggcgcggtatggagtatgtttctattttggaacaaggaggctttgacgatgaagatcaaaaaaacttgtgcctgtccgttgccgggagattagaagctgcattggtgcgagaacaactccattttgatgagatggaagaatctcaccagaaaatattagctgacgttatggcgatcattctttaccaccgtagttaa

SEQ ID NO: 121597 - DNA, 2187 bp, Enterobacter cloacae
atgaataatataataagatttgccccggctacacttacgctcgccattctttcaacgctataccagagcgcgcacgcagcggaagatcctctcgccgatggtgaaacaatggttgttcaggccaccgctgaagaggcgctgaagcaacagccgggggtttccatcatcacggcaaaggacatagaaaaggatccaccggttaacgatctttcagaaattattcgcaaaatgcccggggttaacctcaccggaaacagcgcgacaggcagccgcggcaacaaccgccagatcgatatccgcggtatggggccggagaacacgctgattctgattgatggtgtgccggtgacgtcacgtaactcggtgcgctacagctggcgcggggagcgcgacacccgcggggatactaactgggttccgccagagatggttgagcgcattgaagtgctccggggacctgctgccgcccgctatggttcgggggcggccggcggcgtcgtcaacatcattaccaaacgcccgaccaacgactggcacggctcgctctccctgtacactaaccagcctgaaaatgataaagagggggcgacgaaacgcgctaattttgatctgagcggccctcttgcgggcgatgcgttaacgatgcgcctgtacgggaatatcaataaaactgacgcagatgctcaggacatcaacaccgcgcaaaatggctcttacgccgccggacgtgaaggcgtgcgcaacaaggacatcaatgccctgctctcctggaaactcacgccacagcagattatcgatttcgactacagctacagccgccagggcaatatctacgcgggtgatactcaatacagcaacagcaacgtcagccctgacggtctggtgtcgtccctgtatggacacgaaaccaaccgaatgtaccgccagtcttatggcattacgcacaacggcatctgggactggggtcagtcaaagttcggtgtctattatgaaaagaccaacaacacccgcctggaagaaggctctacgggcaaagttgaggggatgatcaatagcgataaatacgataccagccggctggagtcataccgttcaacgggtgagctgaacattcctttcttctggctggtcgaacagacgctaaccgtgggtgcagaatggaaccgtgatgaactgaacgatccggcctcaatgcaggcgacaaatgtgtcgggagaagtgattaacggcgttcccggcacggcttctgagcgcaacagcaaaaacagcgctgacctcaccggcatctatcttgaggacaatattgaagcgcgtcagggcaccaacctgatcccagggatccgctttgattatcacaatcagttcggcagcaactggagccctagcctgaacgtctctcaggatttgggtgacatgttcaaggttaaagcgggtatcgctcgggtatttaaagcgccaaacctgtatcaatccagcgaaggctatctgctttccacccgcggcaatggctgcccgaacaacgtttccgaaggaagctgttatttgttaggcaacccggatctggatcctgaaatcagcgtgaacaaagagattggcctggcctttgcgctggaaggctacgaggctggcataacctggttccgcaacgattacaaaaacaagatcgtttcaggaacggatgtgctgggccagacaagcagcggcgcaaatatccttcagtggcagaacggaggaaaggccgttgttgaagggctggaaggcaacctcaccgtccctgttattcgcgacacgctaacctggcgtactaatgcgacgtatatgattcagtctaaaagtaaagacaccggtaatccgttgtcgattatccccaaatataccgtcaacaccatgctggactgggaggttaacagcaagctttcagccaacgtaagctggacgatgtacggccgccagaagcccagagaaaacgctgaaatccgcaaagaggaaaatgcgatgtccaacagagagatcggcgcgtattccatcgtgggtatcggcagtaactatcagctgaccaaaaacctgcgcctgaatgccggcatcagcaacctctttgacaagcagatttaccgtgaaaatgacggtgcatcgacctataacgaaccaggccgtgcgtattacgcaggcgtgaccctgtccttctga

SEQ ID NO: 121598 - DNA, 882 bp, Enterobacter cloacae
atgaagacgttgttttctggtcgttcagatatgcctttcgccatgctgctgttggcccccagcctgattttgctggggggcctggtggcctggccaatgatttccaacattgaaatcagttttttacgtttaccgctgaacccgcgtattgatgcggtgttcgtcggcctggatagctacattcgcattctgggcgatgctgcgttctggcactccctgtggatgacgttctggtatacggcgctggtcgtgctcggcagcacagggttgggactggccgtagcgatcttctttaaccgtgaattccgcatgcggaaaacggcacgttcactggtgattctgtcctacgtgacgccgtctatttcactggtatttgcctggaaatacatgttcaacaacggctacgggattgtgaactacctgggcgttgatctgctgcatctctacgatcaggcgccgctgtggttcgataatcctggcagcagttttgtcctggttgtgctgttcgccatctggcgttacttcccgtacgcctttatctcattcctcgcaattttgcagaccattgataaatcattgtacgaagcggcagagatggacggagcgaatgcctggcagcgttttcgtatcgtgacgctgcccgccatcatgccggtgctggccacggtggtcacgctgcgaaccatctggatgttctacatgtttgcggatgtgtatctgctcaccaccaaggtcgacattctgggcgtatatctctacaaaaccgcctttgcgttcaatgacctgggtaaagcagccgccatttccgttgtgctgtttgtgatcatcttcgcggtcattctgctgaccagaaaaagggtaaacctcaatggcaacaaataa

SEQ ID NO: 121599 - DNA, 843 bp, Enterobacter cloacae
atggcaacaaataaacgcgttctgggccgtatcggtttttatctgggactggcggtattcctgattatcacgctgtttccgttttttgcaatgttgatgacgtcattcaaaagcgcgaaagaggcgatctcgctgcacccgaccattctgccgcaggagtggacgctacagcactacatcgacatctttaacccgctgattttcccgtttgtggattacttccgtaacagcatggtggtgtcgctgacctcctcggtcattgcggtgtttctcggtacgctgggcgcgtatgcgttatccaaactgcgctttaaagggcgcacgacgatcaatgcgagcttctacaccgtctatatgttctccgggatcctgctggtggtgccgctgttcaaaatcatcaccgcgctcggcatttatgacaccgaactggcgctgatcatcaccatggtgacgcagacgttgcctaccgcggtctttatgctgcgcagctatttcgacaccatcccggacgaaatcgaagaagccgcgatgatggacggcctgaaccgcctgcaaatcatcttccgcatcaccgtgccgctggcgatctcgggtctggtgtcggtctttgtctactgcttcatggtggcgtggaatgactatctgttcgcctccattttcctgtccagcgccagcaacttcacgttgccggtggggctgaacacgctcttcagtacgccagattacatctggggtcgcatgatggcggcatcgctggtaacggcacttccggtcgtcattatgtatgccctgtctgaacgtttcattaaaagtggtttgaccgccggcggcgtgaagggctga

SEQ ID NO: 121600 - DNA, 1053 bp, Enterobacter cloacae
atgaaaaaattagttgcgacagcgcctcgtgtagcggcgctggtggaatacgaagatcgtcctgttgcagcacatgaggtgaagattcgtgcccgttatggtgccccgaaacacggcaccgaagtcgtggatttccgcgcggcaagcccgttcatcgatgaagagttcaacgctgagtggcagatgtttaccccgcgtgaaaaaggtgcagcgcgcggcatcgaatttggtaaattccagctggggaacatgatcgtcggcgacattatcgaatgtggtgcggacgtgacggaataccagatcggcgacagcgtctgctgctacggcccgttgcaggaaacggtcatcgtaaacgcggtgaacaactataagctgcgcaaaatgccgcagggcgcatcctggaaaaacgccgtttgctacgatccggcgcagttcgccatgagcggcgtgcgtgatgctaacgtccgcgtaggggatttcgtcgtggttgtggggctgggcgcgattggccagattgcgattcagctggcgaaaaaagccggtgcgtcagtggttattggtgtcgatcctatcgaacatcgctgtgagatcgcctgccgtcacggtgcagaccactgcctgaacccaatcggtaccgatgtcggtctggaaattaagaaactgaccggcaagcagggcgccgatgtgatcatcgaaaccagcggatttgcagatgcgctgcaatctgcgctgcgcggtctcgcctacggtggaacgatctcctacgtggctttcgccaagccgtttgcggcaggcttcaaccttggtcgcgaagcacacttcaataacgccaaaattgtcttctcccgcgcatgcagtgaacccaacccggattatccgcgctggagccgcaagcgtattgaagagacctgctgggaattgctgatgaacggttatctcaattgcgaagatctgatcgacccggtcgtcaccttcaccaccagcccggaaagctatatgaagtatgtcgatcagcacccggaactcagtatcaaaatgggcgtcactttttaa

SEQ ID NO: 121601 - DNA, 789 bp, Enterobacter cloacae
atgaaaatcgcaacacaaaaccaggcctttttcccgaccgctatcatggaaaaattcgaatacatcaaagcgatgggatttgatggctacgaaattgatggccgactgctggtggaaaacctcgacgaagtaaaagcggctatcaaagccaccggcctgccggtcacgacggcctgtggcggatacgatggctggatcggggatttcattgaagaacgccgcctgaacggtctacagcagattgaacgcattctggaagcgctggcagaagtgggcggaaaggggattatcgttccggctgcctgggggatgtttaccttccgtctgccgccaatgacttcgccacgtagtctggacggcgatcgcaaagcggtcagcgcttccctgcgctggctggatgaggtggcagcgcgcaccggtactaccgtctacctggagccgctgaaccgctatcaggatcatatgatcaacactctggccgacgcgcgtcgttatatcgaagagaacggcctgaagcacgtgcagatcatcggtgatttctaccacatgaatattgaagaagactccctgacggaagcgctgcatcagaaccgcgacctgctgggtcatgtgcacattgctgataaccaccgctatcagccgggcagcggcagcctcgatttcgccagcctgttcgatcagctgcgtgccgataattatcagggttacgtcgtgtacgagtgccgggtgcgtgccgacgatccggctcaggcctataaggactctctcacttacttgcgtgaatgctaa

SEQ ID NO: 121602 - DNA, 366 bp, Enterobacter cloacae
atgagtgcttctacacctttgcctctgcgcgtcgccatcattggcgccgggcaggttgcagacaaagtgcatgcctcgtattacgccacgcgcagtgatgttcaaatggtggctgtcatggacagccgccttgagcaggcacaggcgttcgcggaacgttatgctattccatcggcatggcaggacgctcacgagatgttgcaggaagtaaaaccggatgtggtgagcgtctgttcgcctaaccggttccattttgaacatgtgatggcggctctcgaagcaggttgtcatgtgatgtgtgaaaagccgccggcgatgacgccgcaccaggcggatgagatgcgtctcgcggcgcgcaaggcctga

SEQ ID NO: 121603 - DNA, 2280 bp, Enterobacter cloacae
atgctgaaccagtctgtattaaccgatccgagcttttgcccgcatagcctgaataagtacgcgtccattatggcctgcggcaatggctacatgggcattcgcgccacgcatgaagaagattacacccagcagaccagaggcatgtatctcgcggggctgtatcatcgcgcgggacgcaacgaaaccacagagctgatcaatctgccggatgtcaccggggttgaagttgagctggacggcgtcaatttcacgctcctttcaggcgaaattcttgagtggcaacgcgagctggcctttgctaacggcgaactgcatcgtaacgttgtctggcgttcgccggacggaaaacgctatcgcctcgagagccgtcgttttgtttcgctggaccagttgcccttagtggcaatgcggctctcgattacaccgcttgatggcgccgctcaggccgtgctgaaaaccggcatagatgcgacacagacgaacagcggcaggcagcatctggatgaaatctcggtcagggtttttgaccagcactacatgcagggtgtgtatgaaacgcaggaccgggcgtctgaagttgttgtttcggcgttttgtcagctctccgctcagagcgacagctgtttcaccgccaaaaatcgtcgcctcagcgttcatcattctctgactatctcgcaaggtgacaccgtcacgcttgagaagatcgtctggctgacccatcgcagcgataaagcgctctcacaggagtctttcgcccgcaacgcgctggccgatctcaaagtctgcgcggcaagaggctacgatgcgttgcttgaaagctcagcgtacgcctgggaagcggtctggcgtgacgctcgggtggaagtgacttgtgcagaacagcaggatcagcttgcactggattatgccgtctggcacctgacgacaatgacgccagcccatagcgaaagaagcagcattgccgcgaaagggctgacgggggaagggtacaaagggcacgtcttctgggataccgaaattttcctgttgccgttccatctgtttacccgtccacagattgcccgcagcctgctgcgctatcgctggctgaatctttctggcgcgcgtgaaaaagcacgccgtaacggttggccgggcgcgttgttcccgtgggaaagcgccgccagcggagaggaagagacgccagaattcgcagccattaacatccgcaccggggttcgccagaaggtcgcctccgcactcgctgaacaccacatcgtggctgatattgcctgggccgttgtcgcttactggcaggcaacacacgacgatgcctttatgcgcaatgagggtctgacgctgctgatggaaaccgcttcgttctggatgggacgcgcgacggaaattaatggtcgtcttgagatccatgacgtgatcggaccggatgaatacaccgagcatgtcaacaacaacgcttacaccaactatctggcctggcacaacgtggcctgcgcgcgtcagtttatggcgaaatttgggcgtgaagatgcgcgttttacggagaatgccggtaagttcctggcgcgcctgtggctgccagaggccgacgcagagggtgtgatcccgcaggatgataccttcatggcaaaacctgccatcgatctgagccgctataaagccaaagcgggtaagcaaaccattctgcttgattactctcgcgcggaagtgaacgagatgcagatcctgaagcaggccgacgtggtgatgcttaactacctgctgccggaacggtttacgccgcagcaatgtgccgccaatctggcgttctacgagccacgcacgatccatgattcatccctgagtaaagccattcacggcatcgtgctcgcacgctgcggtgacaccgagggggcgtatgccttctggcgcgatgggattgccatcgacctgggggacgacccgcacagcagtgatgacggtattcatgccgccgccaccggtgcgatctggttgggcgccatccagggatttgctggcctgcacattagcgaaggggagctgcatcttgcgccgaagctgcctgctcactggcagaaactcgccttcccgctgcggtggcggggcgcaacaatgcacattacctgtgaagatgaccagttaaccattgaaaccaccgcacctgtcacgttgacgctgtggggtgaaacgctgcatgtatcagggcgaaaggtctgtgagcgtaaggactttcttgtacctgttaatgggaccgctaccacggaggggcgccatgacgcttaa

SEQ ID NO: 121604 - DNA, 2151 bp, Enterobacter cloacae
atgactgaaaataaggtcattttagcggtcaacaacggagacggtaaaacgcggttgttgacagcagatgcaggccgtacggttaaggtaaagcttatccccggcaataaatatttgctgaaaaatgtgaatgacgactttgcgccagaaaatattacgcttcaacgcgttggcaaagcgttacatattattcaggaaggcgacacacagcccagcattattattgaaaattattttgacggcgattcgaaaaacccaaccctgatgggtatggccgaagatggattgctttatgcctatatccctttgtctggtgaaagctacgataatggctatctcatggctgaaggtggtctggctccggttgccctgggcggtgaaccgttaggcgccggtgggcctcttttgtctgccccggacgacgaaaatgacatgctgtttggcatgttagggtggtttgcgcttgcggcggcaggtgttggcgctgcgtttgctctgtccgaactggacaaggatgaaagcgatagccagcccgcccccgaaaaaccgagcattggcaaggctgtggatgatgaaggctcgattaaaggaccgcttaagtctggagacgtgactgatgactcaacgccttcattaatcggtaaaggcaagccgggcgataccatccatatcatcgataatgataaggaaattggctccgtcatcgtcgacgacgaaggcgaatggagctatacgccggataagccgctgggcgacggtgaacatgacctctccgttgtggttgaagatccggacggcaacatgagcccgccgtctgaccccattaccatcgtggttgataccgttgcgccagatgcgccaacgattgagcacatcatggataaagtgggtaaagtcaccggcgagatccttgaagacgcttacaccgacgatccaaaaccggagatgagcggtaccggtgaagcgggcgcgacgattaccatttacgataacggtaaaaagatcggcgaaaccagcgttaacgacgacggtcgttggtatttcaaaccttcagaaaacctgactgacggcaaccacagcatcacggttagccagacggataaagcgggtaacgtcagcgagccttctgatgaacgtgattttattgttctgacggaacctccggggaaagcagaaacgccgtcagttattgacgacaacggtccggtaacgggtccgcttaagccgggtgacgtgacggatgacactaaaccttcattcagcggtgaaggcacgccgggcaataccatcgttatcaaggataacgacaaagagatcggctccgttatcgtcgatgacgaagggaagtggacctacacgcctgagaaagatctcagcgagggtgagcataacgttgaggtgattgaagaagatccgctgggtaatgtcggccaaccctccgatccgatccagatcattgtcgataccacgccgccggcaagaccggacagggtctatgctgaagataataccggtccgattaccggccagctgaagggcggcgacgtcactgacgaaacgcgtccggtattcagcggtaaaggtgaaccgggcgacaccgtgaccatttatgatggtgatgaagttctgggctctaccgtcatcgatgacgaaggcaactggtcgctgaaaccggagaaaccgctgggcgaaggcgatcacagcatcaccgttacgcaaacggataaggcgggcaataccagcgacccctcggaagcgctggagtttgaagttgacactaccgcgcctgatgcttcagcagatgttctgaaaattaccgccgtagcggatgacgtaggcgatcgtcagggcaacgttgccagcggtgaaatcaccgatgacagcaagccgctcattagcggtatcggcgaagcgggcaataccgtctatgtctatatctccttcttcgaggacgatggaaaactggagctggattactcctcccgcggcgtgctggattacgtcaaggtggaagttgtcggaagcgataccgtgatcagtatcgaccgtgacggtcagggcggacagcatggatttactcaggttgtcacgctggctgatgttcaaaccgatctggttacgctgctgcagaataaccaaataatgatgtaa

SEQ ID NO: 121605 - DNA, 942 bp, Enterobacter cloacae
atgaaagtaacccctcggaattttaaaaaaattaatctggcgttctgtgtcgctgctgccttaagtgcatttatggctaatcccgcttattcagccgaaaaagtggaaaaggccatcgatttaccggtagtgattaaaccagcgccgaaaaatacggcaccgcagccttatcgtccggtagctggcgtaacgcctgaactggcgcaggttgtcgtctattatccgcagggcaccgttcctgcgacagtctatgtggaccgcgagctgcagtcggtgctgttgccaggccagtttaccgtcctgtgtgccgcacccggtgcgcacacggtggaatcctggttcaacgaccagccgacctatcagggcaaacaaaacccgcagcagcagctcaataccgaaagtgctcaaacctattttattcaggtgaacccaggcactacgggaaatacggcggcgctggaggaacgcgcgcgcgcggaatcacttctgaaaaatatgcataagcagaccaggattattaatcgagcctcgcaggtcaaaccctgtgattacgttaataataccggcatagtgcttattcaggagcaggtactgttccgctttgccgcaagcaacacggtgggcatttttgcggaatctcgccagaagttggatgaggtagtgaaatttatccgccaggcgaataacgttcgtgaaattcagattattggttataccgatgcgattggtagccgtgaagccaaccagcgtctctctgaagcgcgtgcgaatacggttcgttcgttattgattgagaaaggtattaagccagagcttattaataacacagttggacagggggtagcacaaaccgctgaaggttgtggaaccagtgccacccagcaagcggcgggttgtaacgttaatagccgtcgtgtagaaattttagtgaaaagctactaa

SEQ ID NO: 121606 - DNA, 696 bp, Enterobacter cloacae
atggatacgtctaaagttattttatcacgatgtcagtttagcaatatcggtctacatcatttgctttcagaaacattcaggaaagagaaagtcatctcttttgacaatcaacagaatcttttttcctggactaaagaggtcaggaggggctctttttttaccctatatttagttttacctgactcgatatacagtaatatcatttacttccactggctgatctctcttcgaaaaaaagcgcataatgcaaccatatcagaagttattatcgcctatcattcggatatttttcccacactgttttcctgcatttgctcccatttcaggcatcgtcttgtaaacataaataatcttacgaacgatgagatcatcaaaaaaatgcatgcccagcgtcaccccagcaaaagcaaggtagttaacaaatacatcgaactgacgcatatggagttttgtgtgttgaagctgatgattgcgggttacaccattgatgacattagcctcgtgcacaacattaaacctaaaacaacctacacctataccaataatattatgaagcaactgggttttaactcgttgaaaaaaatatattcctgtggcgagatcatccgggagtcaatcgagaacgagattatcagggagaagaaaaaatactacagcagcgccagccctcttgctttcgaaccccagtgtgcataa

SEQ ID NO: 121607 - DNA, 1137 bp, Enterobacter cloacae
atgaaaaaaatcgcggttctgtttattttaagttctaccttacttcttgccggctgccagatcgcgccgggcagccatatcgatacctccggaaaaaaagtggttcattcgcaggagaataagcagagcgagctggatattcatgtttatcccgtcacacctgcgctgatagcgcagctgcgggaaaacgtggctgttgcccagggcaatgcagagctaaacaagcgcctggaggcgtatgaataccgtattggtgttggcgacattattatggtgaccgtttgggaacatccggaactcaccactccatcaggacagtatcgaagcgccagcgatacgggaaactgggtacattcagacggaactattttttatccctacatcgggaaagttgtcgtgaaggataaaacggtgacggaagtcagagagatgattaccgggcatctggcgaaatatattgagtctcctcaggtggaagtggggattgctgcgttccgttcacagaaggtcacggtatcgggtgaggtaaaccagtctggccagcagcctattactaacgtgccgctgacgattattgatgcagtaaaccaggccggtggcctgacggaaaatgccgactggagcaatgtggtattaacccaggggggcaaaaagtcgacaatttcgcttcaggccctcatgcagtatggcgatttacagcagaataaattgctttatccgggcgatattctctatgtcccacgcaatgacgatttaaaagtgtttgtcatgggggatgttgttaagcagagcaccatgaaaatggatcgctcaggcatgacgctgacggaagcgctggggaatgctgaggggatgaatcagctaaccagcgatgccagtgggatattcgtgatccgttctgaggccaaatcagaagacgtaaacgagaaacgtgcggcgatctaccagctcgacgcgcgagatgctactgcactggtacttggaacagaatttaagctcaagccttacgacattgtctatgtgacatccgcaccagttgcgcgctggaacagggtcattaaccagctaatgccgaccattacgggtatctacagcctgacggaaacgactcgctttgtgagaaactggggaaattaa

SEQ ID NO: 121608 - DNA, 450 bp, Enterobacter cloacae
gtgaaggggcactataacgccatcctggtggtttgcacgggcaatatatgtcgttctccggcgggagaacgaatattgcgttcctgcttgccggaaatgacggtggactccgccgggatttcagcactatcgggtgaatgtgccgatcccgttattctgcaaaccgcccggaattatggattttctctggaagggcatatcgcacgtcagctcaccccagcgatgtgccgtgagtacgatcttatcctgacgatggagaagaatcatattgaagcggtaacccggatggccatggaggccagggggaaaacgtttttattcggctactggcttcagcagctcgaaattgccgacccgtaccaccggggacgtgaaatatcagatttgatttttaaacaacttttatcctctgctgaagaatgggtaaaggtttttcagcagattgaataa

SEQ ID NO: 121609 - DNA, 2148 bp, Enterobacter cloacae
atgaataacagatacgttagcaacgatcctcccgattatctccagcgcggggaggagattgatcttgtccatatcctcaaggttttattttatagcaaagtgtggatagcggccacgactctcctgtttattgtgtgcggcattattattgctaacactttgacgcccatttacaaaagtgatgcgttaattcaggttgagaaaaacccttctctgggaatattaagcaagctgtcccctgtgctacctgagggggcaggggtaagttctgaatcagaagtgtcgttaataaaatcacgcctggtgattggaaaaacggtgcgcgatttagggctggatatcgtcacgactgaaaaaacctatcctgtagccaacggcctattgcaacgtctgttcggtcatcaaccggcgaaaattgcgattgcctatctttccgtaccggaaccgtatatcaatcagcccctgaagctggacatggttcagtctggaggcttcgtattatatgtcggagagtccattgttgagggcaaagtcggtgtgcctgtccacactgacgacgttgatttcctgattgacagcgctcagctcactgaaaatacttcatttattattataaagcgcaacgagtattctgtcatcgaagaaataaaggagagactctccattgataccaaatcgggtgggaacggcatgttacatttgagcatgactggccccgaaccggtgattatcagcaaaatactcgataatatagcacataactatctggctcaggacgttgcgcggaagtcagaagaggccagtaaaagcctggcttttttaaataaacagttactgcaaattaaaagtaatttgatagaggctgaaagtaaacttaatgaatttcggaagaataatgagtctgttgacttatcattagaagcgaaatttattctggataatgttgttgctattgacactcaacttaatgaactgacgttcaaggaagcagaaatctccaagctgtataaacgaacgcaccctgcgtataaagcattgtcagagaaaaaagcgattcttgttgcagaaaaagagaagctcaaccagcgaattagcgcgatgcccagcacgcagcaagagatcctgagtatgacccgcgatgtgcagatgggtaatgacatttatctggttttactgaataaacagcatgaattaaatattagtaaggccagtacgctgggcaacgtgcgtattatcgatcgcgcggtaacgcagctgaagccggtcaaacctaaaaagctgctgattgttattctgtcagccatgctcggtttccttttctcatcggggatcatccttgttcgcaacatgctgataaaagggatcaggcagccggcggaacttgagatgcgcgatattccagtgtatgcggttgttcccctcgctccggagttgacgaagcgcagacggtgccgtgcgatcccgacgtatcagtctgatgagctgctggcaaattcagccccaacgtcgcttgcgatagaggcgctgagagggcttcgtaccagtctccatttcgccatgcttaaagccggtaataacatattaatgatctccggcacctctcctggggtagggaagtcatttgtctgctccaacctggctgtcctgatggctcaggcgggaacacgggcattgttgattgactgcgatttacgcagaggatatttgcatcgcattttctcaaagaccgagagcagagccggcctggctgatttcttaacggaaggcggcaatatcgaaagcgttattcagaaaaccgaatattcaggagtggattttatcggccgcgggcgcatggtcactcacccggcggaactcatcatgacggataattttgcagagttgataagggcatgctcaacgttgtacgacgtggtaatcgttgatacccctcccatcctgagcgtaacggacgcagcgattataggaagatatgcatcgacttccctgatggtggtgcggttcgaacaaaactcgataaaagaagtggaggcgggactgcgccgctttgaacaaaatgatgttgccattcagggtacgatatttaacggtgtagaaaaaagggctgctgagtcttacacctatggtgattattcttatcaggattag

SEQ ID NO: 121610 - DNA, 3873 bp, Enterobacter cloacae
atgaaaagtaataagaataatgtctttcaattagaactgaagtggcaccctgttgccgcttcagttctgctcgctctgccgtttgttgcgcacactgcagagatcagcatgaagaacggtgtcgtttcttctgtcggcaacgtgcctgttatcaacattaataaagccaacgataaggggctttcacataatgtgtatgacaagctaaacgtagataagaacggtcttatctttaataacagcgttgggggtgcgaatacaaccctggcgggccagattcaggggaacagcaacctgacctccggtgcagcaaaagttattctgaacgaagtcacttctaaaaatgcctctgcaattaacggcatgatggaagttgcgggtgataaagccgatttaatcattgccaacccgaacggaattaccgttaacggcggtggttctattaacaccagtaagctgaccctgactaccggtacgccagatattcagaacgatgcgttagccggttattctgtgaatggtggaaccattacgctgggtaaactgaacaactccagcccgaccgaaattctgtcccgcaacgttgtggtgaacggtaaagtcaccgccaacgagctgaacgttgttgccggcaataactacgttgatgcagcaggccaggtgaccggttcggtaacggccgccggaacgcgcaatgctaacagcattgacgttgctgctctgggcggtatgtatgccaataaaattaacctcatcagcaccgagagcggtgtgggcgtgcgtaaccagggcgttattgctggcggcatcggcggcgtaaatattgacgctaacggtcagctgctgaacaacaatgcgcgcattgaatcctctggtcagatcaatattaaaaccaagggtgcactgaacaacaccaccggggatattacttccgtcggtaccattgcgctggacaccaataaaaatagcctcaacaacagccgttcgggcaatatttcgaccatggcagacctctatgtaaatagcggtgctatcgacaataccaacggaaagattgcggctgcaggcatgctggcggtagataccaataacaataccttaaccaactatggaaaaggtgttgctgtagggattgaagcaggaattgttgcgttaaaaaccggcaccctgaataacagcaacggtcagatcctcggcggatacgttggccttgagtctgcttcggtaaataacaacagcggtatggttgactctctgggcgatgtgaacgtcgtcagcggcggtaacgttgataacaaccgcggcatgctccgttctgccggtggtttcaccaagattgcagccaaaggtaccgttaataacggttcaaccaaaacggcagataccgccagcgatgactctttaggcattattgccgagaagggcgtgcagattgcagcgaacagcatcaacaacaacggtgggcagatggcgtcgaatggcgatatctccctggaaagcgccggcgctattgataactactctggcaagcttaactccaacagcaaagtgattgctaaagcggcctccctgcgtaacgacaacggcggtgttgcaggccgtaccggcgtgagcgcggcggttggcggcaatatcaccaactacatcggcgtcttcagctctgaagaaggtgatgttgccctggcgtcgaatgccctgaacaaccgcggtggcttcattatgggacagaacgtctccattaataccaacgctggtgtgaacaacaacacggcatttattgtagccaataaggttctgtccgtaacggccggcgacaatattgaaaaccgctacgctgatgatttcggcactgccttcggtacctacttcggtatgccgcagcaaaatggtggaatggtcggcaagcagggcgtttcgctgtctggcaactacatctacaacagccaaagccgtatcgtttcggaggacggtccgctcacaattctggcgaaaggtaccatcgacaacagccgcgcgttactggtgagcggtggagatgcaaccatcaaagctggcggtacgttgaacaacaactactcgaccatctacagcatgggtaatatggcgatcgacgccaacagcctgagcaactacagcgatggcgcgctcgaagataacgatgcaacgggcgttattgcggctgataaaaacctgaccatgaacgtgaagggcagcctgaccaactacggctggatcagcagtctgggtgatgccatcgtcaacattctgaacggctctttcactaaccgtaataccgtttctgccgagaaatcactgacggtttccgcgctgaccggtatcgacaacctgaaagatatcgctgctggcgagcatctggtggtgaacagccagcgtggcgtgaccaacagctccaacagcaacatggttggcgataaggttacgatctccgcgggctatgacatcaataaccgtgggaatatcgttgctgacagcagcctggcaatgagcgcgaaaggcaatatctataacgatctgaatatgatcagctatggcgatgcgaccttaagtgccaataccattgataacaactcgcgcaaaatcaaagcggtcggtgatttaacgctgactgccgcagggaatgttaacaacagccgcggtgaaatcagcgctgaggctggcgacgtgaccattactgctggtggtacggttgataactactacggtcagatcctgtccggtagcgacattgccctgaaagccaaccgactgaacaacgattacggtcaggttgccgcctacggcaatatcgatctggctctgacgggtaatttcgacagcaaccgtggctctgtcctttctcagactggtgacatcaaactggctgccaacaccgttgacaacaataacggtttgattgctggtaagaacgttaccgtcgatgcaaaaggcaccgtgtacaacaacaccgccatgatcgtagctgataagaagctctctgttactgcggcagggaatattgaaaaccgtgacggtaacaactttgttcgtaatcacggcgaaaccttcggtgtgacgggcgatgttggcggcatgattggtcgtcaaggcgcgtcgctttccggtcagaacgtctacaacaacaacagcagcatcatcgcggatgaaggtgcgctgagcgtactgtctaatgggacgctggataatacgcgtgcaatgctggtgagcggcgcggatgccgtcatcaaagcagcgggaacgttctataacaactatgcaaccacctggagtgcgggcaaccttgacgtcaccgcaggtacgctgaataactacagcgacggcagcatggagaacaacaccgcgaccggcgttatcgcgtcagataagactctgaatctgaccgttgataacaacgtcaccaactatggctggatcagcggtaaaggcgatctgaacttcaacgtcctgaaaggtgcactgactaaccgcaatgccatctcttcaggtaatgcattggcaattaatgccgcaaacggtgttgagaactataaagacatcgtaggcgtcaccagcgcaaaaattgatactcagcgtcatgtcaccaataacgccaacagcaatatcctcgcgcagaatatcgcgattaatgccggtaccgacattaacaaccgcggtaatatcgtgagcgattataccctgctggtgaaaacggcaggcaatatttataactacctgaatatggtgagttatggtgttgccggtatcaccgtcaacaacttgactaacagcggtagcagcgccgtgttcggcggtctgtctggtatggaacttaatgcaaataaagtcactaataccggcgacgttgtaggtctgtaa

SEQ ID NO: 121611 - DNA, 1620 bp, Enterobacter cloacae
atggaatcgcgatttaaatttttaccgctattgttgctgttgagttttcacgccttcgctgaagatggcataaacaatcttatcaaacagcagcaaaatgccgatctgaatactttcaaagagcaaaaggtttatcggcaggacgtttattccagcaccgagcgtaaagtattcaggctgaatgatttaccgcaagaagagaactgctttacgattacgtcgctcgttcttaaaaatgattttctacagcgtaagaccgacagggccattaaaaaagagatcctgggccgctgtgtaggcagtattggcgtggtaaaaattgccgcggcgctgcaggacttttatattgatgcgggttacatcacgacccgaattacgatcccaacgcaaaacatttcgtccggcacgctgaagcttgacgtgagcgcagggaaaattgaaaagattattatcgacagtagcgacattaatccgtggatgctgccttttgcgaaagaagacatcctgaatattcgcgatatcgagcaagggctggaaaacctccagcaggagccgggcgttgacgtcaaaatcaacatcgaaccgggtacaaggcagggctatagcacgattcacatccgcaccaaccgcgtgaaaaactggagcgtgcgcgcgagctataacaactggggggttaaagagacggggcaatacctgacctctgcggtgggctacctgtataacatcgcccggttcagtgacctgttttatctggcgggaacaaaaagcacaaacggccgctatgaaagtgtgagtggttactacgcgctgccggtaggctactggaactattctctgttctacagcaccagcaggtcgcgtcagaccataccgcttttctacaccagcgtagactatgcgggtaaaagcgattacgcaaacgtcaaagcatcgcgcacgctgtatcgggataaaacccgtaaggtgagcggcagtgcagagctgatacgccggaaatcaggctataccgttgatggcgaagcgctggtcttacagaagcgtgatatggataacgttaaggttggcgttaactataagcaacagttagtgaatgctcactgggactcctcactctcctggcagcgttttttaacctggttcggggcagaacatacgcccgatatggtctacggcgacgtcagtcccgttagccagctggtgaacgttgaaagcaactacacccgccagctcggcagcagcgtatatagcgccttttttgtggcgcaatacgcaccgcgtgagctgacgcttcaggatcagatgacgataggcgatcgctggagcgtgcgcgggtttgaaaacagcgttggccttaccggaaacagcggatactttctgcaaaatacgttttatcatccggtgcgtggaattgacgctaattattatttaggcgttgacgcgggtcacataagacgagacagccagtatggccaggaaattatcatcggcagcacgctcggtattcaggggaacgtgaagagcctggcatatgattcgtccatctcaatgccgataaaattccccggcagcatggacgtgaacaaatttaattttaatctgaatatttcttatcagctctga

SEQ ID NO: 121612 - DNA, 369 bp, Enterobacter cloacae
atgcgtatcggcacggacatcgtggaggtttcgcgaataaagcgggcgataacaaactggcaaaatgattttttacagcgcgtctttacccagcaggaaaatataaaaattaaccgggaagatccgaactatgaacgcgcctcgggcttctgggcggcaaaagaggcgatggttaaagcgcttggttgtggatatcgcgacgggattacgtttaaagatattgaaattagccatgacgaactgggctgcccccatttcattttttccgggcgagtcaaagagatgcttgacgacaagcagctcaagaatgcctcgctcagtatttcgcattgtcagaattatgcgactgccgttgtcatactttattaa

SEQ ID NO: 121613 - DNA, 756 bp, Enterobacter cloacae
atgtatcaatataacgatctgaaggcaaagacggttctggttaccggagccagcggtgatattggtctggcgatctgtgcgaagtttctcgatcaggactgcgatgtgtatgcgctgtacaaatcgaatgccgtgcagttaacggagctgaaagagacgcatcctgccgggaacaagctgtcgattattcagtgcgatcttgccgatccgcagagcgtttctgcgctctgtgctcatctgacgcaagctgccggaaagctggacgtgctggtcaacaatgccggcattgtcaaagacagcctcttcgcctcgatgagctttgatgattttagtcaggtagtagacaccaacctgttcagtattttccgcctgaccaaagaggcactaatgctgctgcgttcggcggaaagcccggccatcatcaacgtggcgtccattgcggccattatcccaagcgtcgggcaggcgaactacagtgcctcaaaaggggcgatcctcggatttacccgtacgctggcagccgagctggcgccgtacggcgtgcgcgttaacgccattgcgccgggaatgattgaatccaaaatggtcaaaaaagtttcccgcacggtagtgcgcggcgttaccgcgtctattccattgcgccggctgggtaaatgcgacgaggtggcgaacaccgtcgtttacttaggatcgacagcgtccagttacattgtgggccaaaccgtcgttatcgatggcggcctggtgatgcggtga

SEQ ID NO: 121614 - DNA, 549 bp, Enterobacter cloacae
atgtctaaatacgttatcccctcgaagatctttctggaaatgggcggctggcgtcagccgctgctgatggtcgacagaattgatgacttcaaatacggcgaaaatggctttgtgaaggtgacgaagcacatcacctataacgaaccttatctgctcgggcacttcccggacgatccgatcatgcccggggtgattatttctgaaatctttgggcaggccagcgaatacctctcgttcctcaccgatatctgcgacatctacggcgagacgtatggtggcgaactcaaatcgttacgcgatatccatgcgctcattcagcgtgatgaaatgcgggagatcatccgcacccgccgcgcgcaggtgcgcggcgtactggctgcccagaatttaaaatttaaggatattgcctaccctggcgactcgattgaagtcaccagcaagctggcattttctgatgctcatggctttaagcactactccgtgacggcaaacgtcggaaagcgattaatcagccacggcacaattattaattaccgcgaaagtaagtaa

SEQ ID NO: 121615 - DNA, 282 bp, Enterobacter cloacae
atgtctacaatgaaaaacgaaattgaccagcgcaaggatgtgctgataacaattaaaactgagattattcagcgtttgaatattcagcgcgatgaatctcaaattgatgatgatactgccctgtttggtaatggcttaaaactggattccgttgatgcaacggaaatcgtggtcatgctggataaagttttcgatattaaagtcagcgaaagcgacgatccttcttatatgagaagtatcaacaatctggcgacatttatcatccagaagaaaaaagcgtaa

SEQ ID NO: 121616 - DNA, 1161 bp, Enterobacter cloacae
atgacgtctctttatgattttcatttgaaaaacaatgcgaaaatgggcatttataacaatgccaacgtgccttctgcctaccacgacccgatggtggaatataaagccgtgcgtgaaaatgctctgctggtggactattcccacatgtccatcgtcagcgtgatgggcgatgatgcctgggctctggtgaattactatgtctctgcggacgtttctattatccgtgacgagcaggggatttactctctggtactgaatgaagacggtaccgtgcgcggtgacgtgtatgtcctttgcgcttcagacggctactacatcatgtctgaaaacattccggcagcggaaattatcgctggcctgaatgcccttctggtaaaagcggacgaactggatattcaggaaaccccggacattgctgatatgcgcgagcagaactggggggccatcatggttgaagggccatactcctgggaactgatgtctgagatccacggtttcgacgttatcggcctgccttactatgagtatatgaataccgacgacgagctgatggtattccgctgcggcaagcacggcgagttcgcctatatggttgtgggccagcaggaacagctgctggagcagtggcagcagctgctggagcggggggataaatatcagctgaagaccggcggtctggactaccagaaaatcgtgcgtatcgaaaaccctggctgggacgaggcgctgtgggctggctaccgcctcaacccggtagagctccagatgcagtgggccgtacagtacgacaaagaaggctttgtgggtaaagaggcagcggaagcgttgtcccatagcgaaggctctcgcaaggtaatcggcatgattgtcgaaggggaatgtgcgggtattgcctcaggcgacagcgtactggttgacggtcaggaagtcggtaaagtggcgaaggctattttctctccagccctgcagtgcgttattgcgctggcactgattgagaatgaatttgcctggtctgatattagcggctttgatattcaaaccgcttctgaaaacgtcgccgcgaaaaccaaagggatgcctttcatctataacctgagcatgctggttaatccgaccgagaacagctttgttgatgcatctaaagcaaaaagcgcgctgtag

SEQ ID NO: 121617 - DNA, 2559 bp, Enterobacter cloacae
atgaagacaaaccggaaacgcgttgttattaccgggattgggatcctctcctcgctggcggataacctgcaggatttcagagacgcattattaaataaaaaaaatggcgtgaccgacagcgtgcgtttttcaaaatggtttgaaaacgccagagcggctgaagttttgcatgatattgattattcagaattgcctgatgatgtgattgcatctctggataatgctgcactctgggcctacaaggtcggaaaagatgcgctgaaccaggcgggcttggccgaaaataaggctcacctgaaagacaccggcctgattgtgggcgtttcttccgccggcaccgaggcgttcttaccgctgttcgaacaacgtatggaagatttctccctgcgtaaagccttattctcaggcggtttctcttcctgctgttccagcgtttctacgctgctcgggctgcagggcggggttgagctggtggcgaccgcctgtacggccagcccgaatgcggtcgggatggcgtttgactatatccagaacggcaaaagcaaaacgatgctggccgttgggacagagccaatctacctgccaaccttcgctgggttttacgccctcaacgtgatgcatcccgaagcctgcacgccgttttccggcaactccggcatgtcgattggcgaaggcgcgggtgccgtggtgctggaagaatatgagcacgccgttgcgcgcggtgccaccatttacggtgaaattctctcctatgccacctcctgcgatgcgttccatgaaaccggaccggatccgcgcgccagcggcgctgtgcaggtaatgcataaggcgatggaaaacgcgggcgtcaccccagagcagattgagtacgtcaacgcccacggtaccggcactgaagcgaacgaccgcatcgaaacgctggcgatgaaaaaggtgttcgctaacaacgaaaagctgctggttagctctaccaagtcttacttcggccacaacatcggtgcggcggggatcgtcgaactgatcgcctgcctggttacgctaccggataaccgcgtgctgccgacgctgaacttcaataacgcgcgtcctaactgcgatctggactacgtgccgaacgacttccgcgatcggaaaatcaacctcttcatgaagaacaattatgcgttcggcggtaataactgcagcatgattatcagcatggatccgtgttccgttccggtcagcgtctacgacgaaaagcgcgtcgcgatctccggtctcggtgccgtctccgcgattggccacaccgttaacgagatcctcgacaacgtctggaagcaaagccaaagcgtagagctggggggcgtcaccttcccggaagacacgctggaagaagcgaaagagctgctggatgttctcgaaacgacccgtcagtttgaggacctgttcggtgaagcgtttagcgatctcacggcaacccgtccggaagcgaacgagcacttcaaaaccttccaggtcaccggccttgagccgcgtaaacatctgcgtcgcttcgatccgcgaaaagccacccgtggcggtacgtttgcgctaatcgcgttgtccgaagcgctggagcaggcgaagcgtaaaattaaacgtgatggcgatgcgctgggtatggtgatgggaatgtccagcggcccgcaggaaaccacctacaaatatctgcaaagcctgaagcccgatccgcgcaaggtcagaacctctgaattcccgggctcgctgatgaactctatcccaacgttctgcggcatttccgaagggatcaagggctataccaccacgctggcgaccggggaaaacgcggcactcggcgcattaacctacggctacgaaattgtgcgtcaggatctgcagccgcaggtgctggtgggcggtgcggacgagtatttcccctcaatgtctctctacatggatgcggtcacccggaagctccatatgacctctgacgcgcgggattatcacatctacggtaacgatccgaagggttatatcccaggcgaaggtgcgtgcatgctgctgctggaagatccgcagcgcgcggcggagcgtggcgccgaggtgctggcagaagtggttggttacggcaaatcctgtagcaatagctattttgacgcctcacagcagggcgagaaatctgcctctatggcgctggccatcgcccgcgcgctgaaggatgccggcatgacggcgcaggagatcgacctggtctgcggcaccagcaaaggcagcgatgaaagttcacgcattgaaatcgatgcgatcgctgaagccttcgcgcaggcaaaaccggacgtgcctgtggtgaactataacgcctgctttggttttgtcgcgtctgctgccgggctgcttaacctggcggtcatcattgactgtattaagaagcaggcggttcccgctattcctcataccgttgagttcttcgataagcgaattaacttcgttcgtgaaccgttgaaattggcccttaagcacgtgctgctggtgggcgcgacggaaggcggcaactactacgcgtttgtgattaaaggataa

SEQ ID NO: 121618 - DNA, 1218 bp, Enterobacter cloacae
gtggataatgccgctattatttcggggttcagttcctgcctgccgtttgccgaagacagccttcagcttatgcaaaacctgaagctgggcaaacgcgttgaaagaaagccctggtttaaatccgacgacgaggcaattaagtgtgggttcgatggcaataagcatattgccacgctggatcatacggatgatagcgcattagatctgctttatcgtctgattgacgatgcactcgcccaggccgggctggatgtccagtggctgggcgggtgtaacgctcgcgtttatttaaccggcatcggccctcgggtcgatggtatggccttcaagaatttttataacaaaaatgatgttgaagatatttatctttcaaaatcattaatgacgctgcacgtcgacaatatgtcgcaggacaagattgcaggacatattgcgcgtaaatatcacctgcagtatctcccccccaatatgaactgcaccagtaattcagcgatgacggcggtgcatttaggctgtcaggccatcgagcatggcggcgttgatattgtgctggtggtgaattgctcaaaaattaaaacccaggatatctggttcctcgatacccaatcgatgctggatacgcacctggttcagcctttcggtgagaacagtaaaggtgttctttttgcggaaggatacagcgcgattctgctcgaaaatgcgcgtcaccgccgcgcaaggaaggcaggctccggcgtgcggctgcaaaccacctacacgcagattagcgccggaagaagcaatgacagctcatggctcagcaccaatatcctgaaggtgatgcaggctgcgatgaaaaaagcggacctgagtgcggaagaactgtgcgcaatcatgccgcacggtaacggctcatccatcagtgacaaagcggaagctaaagcaatagcggtcttcgctgaggaaaataccattccggttctcgcctacaaaggccagattggctataccgccaccggttcaggaattgtcgatttaattattggacaccatacgttatcgcagcaagagcttatttccccggtggggaatgacaccattattgaaagcgttgcgcagcatgtccttattgaccagggcattattgggcaccacaaaaaacatcttcttaaagtcggcgttggcgtggatggttcaatcattggtgccgtgatgtctgatattcaccggggcctttga

SEQ ID NO: 121619 - DNA, 951 bp, Enterobacter cloacae
atgtatttatcctcattttcgcttgttgagccggaagataaattttatttctatcaacccagctggttaaacgcctgggaagcacatttatttaataaggcgcttaaatctacccacgccaatggatggggattaaaacgttttggtacgcagccggacctctacccgggagagatgatccgtaaccctcactatcaaaaatatcttgaggcgatggagaaggcggctgatgacgcgctgatggcgctgccgaccaaagagcgtatgaagctattaaagcagcgtacggcatttatctacgtcgattcctggggcgaatccgggccgtttgagaatatttccagcgcgttgcacatatcaacgatcgatacgctgccgaaaaacctggtcaagaaattctcggttaacgcacctacgttcaagctgcgaagcgagaagcaatctttcgtgcaggccatcgctctggcgaacgattacctgagctgggatgtttttgattttgtggtgatttgtacggcttaccgggcgatccccatcctggtgttttctgatgaagatatttccctaaagtggggggagaaacgcagggacaaggccgaagacgtgaatttaacggttgaacgcgccggatgtttcatcttcagccagcaggagagcgctattcgggtgaagggggggcaatacgtcatggccgatgccatcgagcacacccaggttcctgaacagattgcgttttcgggcctgcgcaaagacctgctgtctcgctcggcgctgcccgcgaataacacgctggatctggttgatctctacggtgccagcggctgcctgactccagcgttaagtttcgcctggctcaaacaacatgctgatttttcggggcgattaagaaccatcgttcccgacaagcagtttggctacagctatttcgacattgaatattgcaaggaataa

SEQ ID NO: 121620 - DNA, 708 bp, Enterobacter cloacae
atgagcggaataattaaagaactcccaatgatatcgttgaacaatatctataagagttatggctcgggcgaaggcaaagtcgatgccctgaaaaatatcaatctggaaatagaaaaaggtgaatttctggcgctttgcggcccgtccggcagcggtaaaagtaccttgttaaatatcctctcgggaattgataaacccaccgtgggaacggtgatgtttctgaaaaaattactcaaccatctgccggaagaacagctcgcggcgatccgcggtagacacctgggttttatttttcagtttttcaatctgatacccgtattgagcgtattcgataacgtctttttcccgctggtgttaaacggccatgtcggaaaaaaagaagccagagagcgggcgctgcattttattgagagcgtggggcttgcgggatttaccgaacgtaaaccgggccagctttcgggcgggcagcagcagcgcgtggccatcgcccgggcgctggcacacgacccgcaggttgtcattgccgatgaaccgaccggaaatctcgatctggtcaccggggaagccattctggatctcctgctgaaaattaatcaggagacacgcaccacttttattatttccacgcactccagccagcttaaagagcgtgcacggcgcgtggttgaaattaaggacggagttttagttcatgattcacaaacgtaa

SEQ ID NO: 121621 - DNA, 648 bp, Enterobacter cloacae
atgattcacaaacgtaattttttccttctctgctggtttctgctgtgcctggcctatgccggaaacatcaaagctgcaccggcaccggtagccgagcacgtcataaaaagcggtttcccgatggaggcagatatgctcgccgagatgacgcagtcgctcttcaaggaatacaaagccaacgacaatcctctgtctctggttttctatgcctacggtacgctgcgtcaggccgactatttccttaaaaccaatgactttattcgggcatctgagttcggcaaaacgggctttttctacctggatgaggcggtcgatctctatgcagagaacccgctggtgcgctacatgcgcgcgcgagtcgatgcgtatttgcctgcggctatcggacgctgtgtggtgacgttaaacgatacggaacagatgctgaaaacccctggcatattcaatgccggtttagtggaacacattaacgaaatgcgctatcgcgcgctgttgagttgtaaacgcaagaagcaggcggacgcgttactggctgaaatagagctgcgtaatgccagtaccgcatcgtctctggcatcgggcaatgcgccagagtgggatatcaacgaagtgacagaagtcctgttaccgctggtgaaagggaaataa

SEQ ID NO: 121622 - DNA, 1311 bp, Enterobacter cloacae
atgtccggggaaatggtgttcgcgataagcgttgttgtgttgatcctgctttttgtcctctggtgtgtattatttcgttcgcgggacgtaaagtttgctttcttaaatctgtttcgccacaaaaggcgctcgttttcaacgattgccgccattatgttaggtggcgtgtcgatttttctgtacggcggttttattgattactccttttggatcctgaaagagcaaaccatccgtactaacattggtcatgttcagatttataatagaaactatttcgaaacatccaataaaaacaaaagtctgatcgaagattacccggcattaaagaaagcgatcctcaacgatccgactctggccgagagtatctcgacgctctccggccagctggagttcaccggtgttatttcgcagtatgagagcgaaacctccagctatttctccgcgctgggcgtagagccgctgccggcactgaagctgggctcgtttgataaattaatcatcggcagcgatctgtcccgcatccgtacggatgaaatcacgcttgggagcgggctggcgaaaacgctcaatgcccactatgacgactggctggacgtgctggtggtcaacacgcagggcggacagggcgcgctgtcaatgaagcttcgcggcatctttgaatcgggcatcaaagattacgatgacgtagcgatgaaaattccgctggatactgcgcaacgtattatgggcaccgctagcgtgagtaaggtgctgatcctgttaaaagaggacgatactgccgcgttcacggcgaaactgcgtcaatttattgccgaccacaaattaccgttaatcgtcaaagactggaaagaggcctcgatattttatcagcaggtcgaggggcttttatcagggatctacttcttcattaagctcatcgttggtctgattgtcatctttatgatcggtaactcgatgacgatgaatattatcgagcgcacccgggaaattaccacgctcagggcgattggcctgaagccgctacacgtgactcgcctgtttttgctggagggcattttcatcggcattatcggcgcgttgggcagcctggcgattggttatgccattgctgccgtgattaacctctacggtatcgcgatgccgccgtcgccagggcaatcgcagggctacacggcatttatcaaaaccgacagcgccgcgcttaactggataaccctggtattgccgatcctggccgcgacgggagcttcagtactgcccgcgctgcgtgcttcacgtctcaatatttcggatgcatttaaattctcgtaa

SEQ ID NO: 121623 - DNA, 789 bp, Enterobacter cloacae
atgaaagttcgtgttattgctcatctcctgatgggggcgtgcctcttttcagcagcggcttattctgccgcggctgacgaacgcgcgctggaaattattcgccgtgcggatgaagtccgttcgccaaataagccgtttcgctacaccctcactattcatgaatttaaagcgggcgccacacggcccgaaaataaacaggtgctggatatttccatgcgctttatgaaaccagagggggaaatcaaagcggatgcccgctccctggcgcgctttgtttatcccccgcgcgacaagggcaaagtgctgctctcagactggtacgatctatggttctacacccctgaactgcgccgtccggttcccgtctcacgccagcagcggctgattgggcaaatatccaatggcgacgtgattgtcaccaactttgaatatgcctacgacgcctcgcttaagggagaaactgcctgcggtgaggcgcggtgttacgtgctggagctggtccgcaaatctgcggaggtcacctggccgaaggtgatgtattacgtcgaaagcgtgggagataaccgtccgtataaggcggcctatttctctctggataataagttaattaaagaagttttatatcaggatttccaaatggtattaggcaagatgcggccgatgaaaattacagtgaaagaggtgcgtcacggtaacagttattccgtcatggagtacagcgacgtccgtctggagtcgttacctgaatcggcgttcactcgcgagtctattcagcgaggtgtgaaatga

SEQ ID NO: 121624 - DNA, 1389 bp, Enterobacter cloacae
atgaagcgcacgttgaccggattaaccctcgtgctttctgctctgccggtaagcgtgtttgctgactgcctctcgggtaatgacgccgcaaaaaacacgtccgtgacgttatatgagcaggtgtccgccgttaaaaaacagatttcagactggcgaatcaatggtcgaaacccatataccagacacaatatctataacgatgccggagtgaatgtttcaagtcgctgctcgttgattgataatgcgcttgatctggacttttccgtctatgggctgacctggtacacgccgcgcaagctcggggcatttgaagaggacgatcgccgctcgcgtctgctaattgagcggctcaagcttgcctataccgtgtcggacagcctgcagcttgaggttggcaaactccaggccaggcaagggctcttcttcctgcgctcgccttccgatctcacgccgcattattacgacggagcaaaaccaacgcggatttacgatcccgagctccgtacggcttatcagtcctcttcatgggcggcaacgctgtcgatggacaaccgggatgagtcgttctcgctgacggtgattccgaagctggcctcaattgataaatattatctgacctccggaaactggtctgcaaaccagcgcggcaacagcagtgagtcatggctgctgggctatacctctcacgccttccgtgaccatacgccgggtatgcgcgttctgatgggcgattcgcattcggttgcgctttcagacagttaccactacaccccgcagctcaccatcagtgccgaagtggcgtggcatgcggagcagcgctggcgccatctgtcggacgaaaaaactgctgagctggcgcgatatgaattccccgactcgctgtatgaaacagaggataaacagggcgtggaggtggccgttggtgcgcaatacacctccgataccttcaacgtgtttggactggaatattactaccagagcgaaggctattcgcgctctgagtggaataaacagcgtgacctgatgacctttttgaacaccgcgacaggctatgcgccgctcgacagggcatttgattcctacaagtacctgatggcctccgagataagcaatacgggcaataaaggcatgctgcaggggaaacactatctcaacgcctggtccagcgtgcagttcacgcatcagatcgccgcgcaaccctatttgatcctcaacctgatggatcaaagcaccctgacggggctacacctcagcgcaccgctgacctttattgatgaccagctggaggcctataccggcgtctattcagcactgggtagcgcaaattctgagtttgccttcttcggcgatgtcgccggtggctatgttggctttaagtattatttataa

SEQ ID NO: 121625 - DNA, 933 bp, Enterobacter cloacae
atgacgcttaataacgcatcgcagcctgtcgtgctgctgttttccgggcaagggaatccagtgattgggatgggtagcgatctctgggatctgaattcaacgacgaaacagatttgggattgtgccagcgatatttctgggcttgatttgcgccgactctgcctaaaggggccgatgaacagactgattcagactacagtgcaacagctggccgtcacggcaattaacgtatcgctgtataccctttgccgcgagcgttttccggcgcttcgggtgacgggagcctgtggccacagcgtgggggaatacagtgcgctttacgctgcgggtgcgatctcgctggagacgcttttccgcaccctccattttcgcgccagcaccatggatgcggtcagcaaaaggcagaagggcgcgatgattgcgctgaagggggcggattttgccgccctgagcaacatcatcacccgctacgggtttgagctggatattagctgtgataataccccgagtcagcaagttatcggcgggacaccggctgcgcttagcgagttcgctaaggtgctggtggacgaaggctatgagccgattaagctcggcgtcagcggcgcgtggcacacgcgtttgatggaagagggcgtacagctgatgcgcgattttctcgccggacagcctttcacctcacccgcgtacgacgtgctgatgaacgtgacgggcaaaatagaaatcgttccggaggccattaaggaaaacctctcgctgcacctgacccacacggtcaaatggcgtgaatccatgacgcggtttatcgaacagccaggcagcccgctgttcctggagatgagtaacaaaccttatcttggccaaatgctgaatgatttcgtcggttttaatgccgaacgcgttctgcactgtagaaaagcattagagatgtaa

SEQ ID NO: 121626 - DNA, 1002 bp, Enterobacter cloacae
atgattccagattatttaacgttcattcgctttcaggataaaaggaaccttctttttatctatatcgtgacgtttgtgctgctgggcttttactggaaaaatgccgggttctcctttacccgacaggatgtctggctggcgagcgctatttttgcgctgatactgtatagcttcactgccgacctcaaggcgttctgggcgtacaagtgcgtggttaagaatgtcgacttgtccatttttctcaagaaagaggcccggccgacggctccgattgtttacgatcctctcgttgctatggttatcgccacgctggttttcgctggcattagtgcactgatgcttaccctggctcagccggacatcgtgctgctgacgctgaccatcgttgccccgctgattatctggggaatgttcgccgcgatgcgcacgatctacattcgacaggtcatcgcatcgacaagggataaagggaaatataagcgtttgtcccagtatctggccatcgccattaccctgtccatcgtgatgaacctgctgacaataagtcccttacgtaacagtgagcaatttgagcgctatggccggtacttcaccctcgagtccatcattaccatgctggtgctttgtgcggtggtgctggcaatcaatcttctgtttttacggttcacgaagcgatatatctttttggggcaccttttccttaacgagatcgatctctttttctctccggcgatcccctggcgggctttgtctgagaaaccgctgtggctgaggctggtgatgctgttgtgtgtggagtttgcctggtcggcgattgtcggattgctgcttaccctgctcggatggaaggtatggtttgaagtgtacttcctgctcagctacctcccttgcctggcctattacgctctccatacgtggtggaaatggcataacgatttcatgatgtcgagcgatatgtatctgcgctgggcggagatcgataaagaaaacccgctgtggtaa

SEQ ID NO: 121627 - DNA, 1746 bp, Enterobacter cloacae
atggttaaggcacgtaaagagcgccgttgggccagggttgcagccgcggttgcactctgtttgccctgctcttcttttgtcaccccgctttacgcggctgacgcggcgcagatcaaaaacatcccggcctcgctgccacctatgcgcacgcagtcagaactaaaccgcgcatcgcaaacgcagccggtagcacgcgcgcgttctcagaatgccgcgcctgccacatccttgccttctatgcgcacgcagtcgcaatatgccagtacgtccaaagccgtgccgactcgggccttctccgcgccgcaacctgagcgttatgccaccgcacagcaggccgcagcgccaatgtcgaagccgcaaagcacggcgggtaacagggcagcactgaaaaagaattacgacttcttcccggccgtcaccgaatactatgagcccgatccggcctatgccacagttcgtcgccacagcgcgtcggcaaatagtcgcgccaccagcggcatggtgcaaggcaacttcaacggcaccagcaccagtgattcgcgggagtttcttcgcagcatggtcgcaagagcgctggcgtacagccccgaacttcgtgcagcctcctctgaggttctggcctcggattatatggtggatcaggtcaaaggccagcgtttgccccaggtgcggctgggcgtaacctcgccgttgacgacgatgggcggagatcggcaggcttcttccaacaacacgcattttagcgactccagcggaaccgtatccgttaataccccgatcatcgactggggcaggatcggtaatcaggtggataactcgctggagacggccaaggccgctcgttattcaaaagagtattcccgggagcagctggcctataacaccgtgtctgaactgatgaatatgagccgctatgagcaaagccgaatagtggcgaagcattacgttggtcggatgaaagagctggttaatatgctgtcgcaaattacccaggcggaccgcggcagagagagcgaactggtacaggcaaaagcgaaactgatgtctgcacaagcgagcatggacaatatcgaacatcagctgagcgcgagtaaaattaagctggtgcgcctgcttggcgcagagccatcgctaccagacgatctcaactggcaggatacgattattccggcatcggtcgccattgcgtcgctggataagaacccgatgatgctgaacctgcaagcaaaagtccgcgctgcggaatatgaagcggagagcattaaggccgcggcgctgccgcaggtcaactgggtggtatctaaaagcacagccaaagacagcaacggcaacgaaagcggctggtataccggccttaacgtcgaatgggaagcgtttagcggcggctctcagcgtgccgctcagatgacggcccgcgccaaagctaacgtcgcgcagcagcagtatgaggtgagttaccgcgacctggagtatcaaatcaactatcaggtgcaggtccgtgattcgtcattcctgcgcgccgatgactacgatcgtctctcaggcgaaacagaccgcgtgcgtcagatgttctaccagcagtggtatcacctgggcaaacgaacgctgcttgacgttttgaccgctgaaaacgaccactttaacaaccagctctccgccattaataatcgctatgacggatacatttccaacgtaaatgttattgccagcgccgcgatgatgctgtcctggatgcgaataacctga

SEQ ID NO: 121628 - DNA, 1350 bp, Enterobacter cloacae
atgatgaacgaggacgatgtgaatcagaacgcctcaaaaggagaggccgatagcggagcgggagcttcctccacggcgttgagaaaaattgagggcggcgccggaaaaacagcgctggcggtgcaaaaaccgcagccgacaggaaaggtaaaagcggacgatctgaaattcatgcatgacctgcagggcgccctgatcgcgcagaaaacccctttcagcatgatcatgctctataccatcacgatggttgtcgtcgtcgcgctggtgtgggcacatttcgctcgcgttgaagagattacgcgtggcgatggaaaagtcatcccggccagccgtgagcagcttattcagagcctggaggggggcattcttgaggagctgaacgttcaggagggcgatattgtcgagaaaggacaaatcctgctgaaaatcgaccccacgcgtgccggcgccagctacggtgaatcgctttcaaaagttcaggggctgaagggcagcattgctcgtctcagggctgaagcctatgacactcccctgaccttcccgccggaaattgcaggaattgagtccatcgtgcgtgatgagacgcaggcctataacgcgcgcctcaaaaccctgaatgaaagcgtacaggcattgcagcgcagcctggcactggcgcaaaacgaggtcagcctttccgagccgctggctcgcaaagggctgatgtccgatgtggagatcctgcgcctcaagcgtcaggccaacgagttcagcctgcaaattgccgaacggaccaaccgcttccgctctgatgccaacagcgagctaaaccgtctggaatctgaactggcgcaggcggaggagatcctgcgcggacgtcaggacgtgatgaaccgtactaccgttgtcgcccccgtgcgcggcacggtaaacaatatccgcgtgaccacgcgcggcggagttatacagcagggagcggagatcatgaccattattccgctcgaagataacctgctggtcgaagccaaaattaaaccctctgatgtggcatttattcatccgggtcttcccgcgacggtaaaaattaccgcctacgactacgccatttacggcggcctgaccggcgtcgtcgaacacctgagttcagacacgctaattgatgaagagaaagcccgtcagggacgtggtgattcgacctattaccgggtctttgtccgtacaaaccgggcggcgctacaggttaaagataaagcgttcccgatcattccggggatggtggcaaacgttgaaatcagaaccggggagaagaccattttgtcttacatcctcaaaccaatactgaaagcgcgtgaagcattcagggagagataa

SEQ ID NO: 121629 - DNA, 2250 bp, Enterobacter cloacae
atgaatacgcatctttccaccgtaaaagttaattcagagcacgatttcaataatattgaagaacccagaaaagattctcttctgtggggtgttgaatggctttgtgcacatcacgctaagtatgccagcaaagaagttctttacgctggcttgccgaaaagcgacaagcttgagccggaaatggctttgcgtatgctcgaccagatggggatatctgctggctgggtaaaacgcgatcttaattcaatatcgtcctggctctttccgctgctgatcgcccgcaaagatggaacgtattgcattattaccgcgcgtaacggtaaacgcggacaattcacctatcagatcgtggtgcctgaaaacgaaggaatacttaccgtttcagcggctgatttgctggaagtttacggcggctatgcccttgtcaccacgccaaaacccagtctggatgcgcgtgccgacgatcttctcttaccgaaagcgcagaatgaaggtcactggctttattctacgctgtggcgctaccgccactatttttacagcgctgcgctggcggcactgctggcaaatatacttacgctggctggcaccttctttacgatgaacgtctatgaccgggtgatcccgacgcaggcctatgtcaccctctggtcgctggctattggcgtcgtgattgccaatatatttgagttttccagccgccagatccgcgcatacctgatcgatatcgcggggaaaaaggcagacctgatcctgggcgcgaagctttttcgccaggtgatgtctatgcgcatggaatataaaccacagtcttccgggaccttcgctaaccagctgcgcgattttgaggcagtacgggattttattacctctgcgacgctcgccacgatgtccgacctgcccttctgcgtgctgttcatgttcatcatttatatgattggcggtccgcttgccgtggtgcccctggtggcaatgccgctcattttaattgccagcatcgttattcagtggccgctgggtcgctatatggaagaaaacgttcgcgagatttcgctcaagcaaggcctgctgattgaaagcattgagggactggaagccctgaaagctgcgcagggtgaaggcgttatgcaaaagcgctgggatgatttcagcgcgctggctgccgcttcctccatgaaaacccgcaacctttccatgctgacaaccaattttgtctccttcgttcagcaaattaccacggtctgtattgttgtgctgggtgtgtatttgatccacgcgggcgagctcacgatgggcgccatgattggcgtagtgatcctttccagccgttctctcgccccgctggcatccgttgtcgggctggcgttgcgttatcagcatgccaaaacggccctgaaatcgcttaaccagctgatggatacccccactgaacgcgattccttaattacctatctaccaacgccgaatttcacgggcagcatgcgcctgcacaaagtggggttcacctatccagtgccgggaatgatggtagccccgcgcattctcgagaatatcaatatcaatattgaagccggtgagcagattgcgattctgggcaggatcggcagcgggaagtctaccctgctgcgggtgatggcgcgcctgtatcagcagagcagcgggcagatattcattgatgacgttgatgcaacccaggttgatccggcggactggcgtgcggccgtaggctatgtcgggcaagactgccgtcttttttacggcacgctgcgtcataacatcattattggcaacccgggcgtaagcacggaagagtttctgcgcgtggttcgcctgaccgggctggatcaggtcgcagccagacacccgctgggttttgacatgcccattggtgaaatggggaactgcctgtcgggtggacaaaagcagctcgttgcactggcccgctgcctgttgctaaggccgaagattttactgatggatgaaccgaccagctccatggatgcgatgacggagacgttattcctgcggcggttaaaagaggccacaaaggggcaaacgctgatcattgtcacgcatcgcatgtccgtactcagtctggttgaacgcctgatagtgctggaagacgggcacgttgtgaaagacggggcaaaagatcgagtcatggaaagcctgaatgagaacgtgctgaagaaaaaacaaacgatgcattcggttgaagaaaagcaacaggaacaaggtgtgaagggatga

SEQ ID NO: 121630 - DNA, 636 bp, Enterobacter cloacae
atggatatcgttactattagacatattgagcacaacgacaacactatgcgctgctatgggtgtatgaataaatgtgtttttccttcttttcgtactgaacaacagggcgagtgtaatggttctgaattttatatctggcctgaaaataactcttttttgatagaaggtatattacaatactttaacaacattacggttaaaatcatttctcaacccattgtagtcattgattttaactataagaatataaattttttcttaacaaacagctggttagatcgttttaaaaacgcaagactgatcctgataactgataaaaagatggccgcgattgcccattactggttttataacgacacaagcgaaacaataatcagcaccgtcatttttcatgatgatattattgatgatataaaatttaaaattcgccagtcgttccttggcaagataacgcgaccttcggagaagaaagccaaacttagtgcaaatgaatacgccctgttttctgaattgtataagggacaactcccgaaaaagatagccatgaagaatgctacaaatgttaaaaacatttacgccatgaagataagaatcgagaacaagctgggcgtacctatttcaaggctcgccagttaa

SEQ ID NO: 121631 - DNA, 663 bp, Enterobacter cloacae
atgttatttcacactaataactctatttatttatctcataatgatggtcagcaggtgagccacacgccgtcgatgcattgctatggttgtgtgaaaaaatgcctgtttggtgacgctgaagcgtgcgctcgtaaaacctgcacaggacttgaatgctatatttggcctgataacaattcttaccttgtagaaggtatccggcactattttgaatgtgtgagcgacaaatatatttctcagccagtcgtgattattgattttagccataaaaatatcacctattttctgaacgatagctggctcgaacaattcaaaaatatgcgccttatcctcgtcactgacaaaaagatgacggcgattgcccattactggttctataacgatacgttagagaccaccatcagctctattatcttttatgatgattccgctgaggaggttgccacgaaactgaagaaaacgttcctggcaaaaacgatcaaaccatccgggagtaggccaaaactgagccagaatgaattcagcctgttttcgttcttgttcaatggatggacacctaaaaaaatcgcgtatcagaacggtactagcgtcaaaaacacctatgccatgaaaaacagaattgagcgcaaactgggagtttctatcacccgcctggtgaattag

SEQ ID NO: 121632 - DNA, 543 bp, Enterobacter cloacae
atgagcgcacaggcagaggaaggaacattacgccggatgaccttaggcgagattgcaatggctcgcagagtgttcggtgattcgatagtgtatagccgtgtctggattcattgcgacagctatttaccgttcggcctccagaaacagaactacgcgatgactcccaacggggagttgtggtacagaaaacagatgtacagggaagacttttccgcaaactcagttttcgttgaagataaatatgttttcatccatgaattggggcatgtgtggcaacaccagcacgggcaatgggtgagaatgcggggtgcgtttagctgggctgctgaatatacctacaggctggataaagaaaagctcactgattactctcttgagcagcaagcctctattttagctgattactggttactgctggtttatgggatcagtaagtggtcttactatcagagaccagggcgcatggggatgtacaggggcgtagacaaattgcaggatgtcccttcgctttaccagaaaatcgtaacagggaaggggcgttaa

SEQ ID NO: 121633 - DNA, 1290 bp, Enterobacter cloacae; identical to SEQ ID NO: 108038

SEQ ID NO: 121634 - DNA, 513 bp, Enterobacter cloacae; identical to SEQ ID NO: 108037

SEQ ID NO: 121635 - DNA, 897 bp, Enterobacter cloacae; identical to SEQ ID NO: 108036

SEQ ID NO: 121636 - DNA, 408 bp, Enterobacter cloacae; identical to SEQ ID NO: 108035

SEQ ID NO: 121637 - DNA, 945 bp, Enterobacter cloacae; identical to SEQ ID NO: 108032

SEQ ID NO: 121638 - DNA, 855 bp, Enterobacter cloacae
ttggaactatacacagccaactctctgaatgaactagagaatatactttccaagcatggtactgatgtcttattccgtggtcaaaatactagatacggagatccagggttgccttcggtcaaaacttcttttgaccgacatggatgtatacctagtgaaatgctcaagtggagtcgttacgcaaaaaatgttcttagcacgactatcgggcatcacgttaacgactttaaatttatacaggcactcctccaacattatggttggcgctctttttatattgattgctcgtcgaacgcagctgttggggcgtggttcgccagccatcagtatgatcaacagcatacattagaaatgagtgaagactttgcagagcgacccgtctggttacgaaagctaaaggcgcgatatactcatagcgagggtgtgggttatctttatatcctagataagaaagcagcagaacaggttggtttagtcgatttagcttctttaaagttagagggtttccatcccaggatggaggctcaggcggcatggttagtgggacctctacagcaaactgatctccctcaaaattgttttctctctgaaattaaatgcagtagtgagattttgcgtaagtactcttcaaagaatggctttgatacaacaagtgaccttttccctcctataacggacgatcctattctaaggatgttactcggattaccttggagagaattagctgacgtaaaagataaatcattccccatccctgcgtttcatagggcccttgaattaccagagtatcatgagagctatgttaagattgcatggctgacctgctccccgttgattagtacaccccgatgttag

SEQ ID NO: 121639 - DNA, 402 bp, Enterobacter cloacae; identical to SEQ ID NO: 108030

SEQ ID NO: 121640 - DNA, 816 bp, Enterobacter cloacae
atggcccgtcggtcgaagggctggcaggatcgtcggtgcaagcgcaagcctgatgatactgaagcgctggctcgtatccataccgttatcgacgatctgcccacctatggttatcgtcgtgtatgggcactgctgcgcagacaatcagaaactgacgacatggcggtgatcaatgccaaacgcgtataccgtatcatgcgtcagaatgcgctgctgcttgagcgtaaaccggcaataccgccctcgaagcgggcgcatagagggaaagtggccgttggagaaagtaaccagcggtggtgctccgacggcttcgagttcagctgtgataacggtgaaaaactgcgggtcacgttcgcgctggactgttgcgatcgcgaggcacttcactgggcggcaagtaccggtggatatgacagtgaaaccgtgcaggacgtcatgctgggtgcagtagagcgtcgcttcggtaacaggctgccgacatcccccgttgagtggctgacagacaacggttcagcctaccgttctcatcagacgcgtcagttcgccagaatggtaggactggagccaaaacatacggcggtacgtagtccagaaagcaacggaatggcggagagcttcgtgaaaacgatgaagcgcgactacatcagtatcatgccaaaacctgacgggttaacagcggcaaagaaccttgcggaggccttcgaacattacaacgaatggcatccgcacagtgcactgggatatcgttcgccacgggaatatctgcggcggcgaaccagtaatgggttaagcgataaaaagtgtctggaaatatag

SEQ ID NO: 121641 - DNA, 309 bp, Enterobacter cloacae
atgcgccagtcgctgatatacgggcttgaaccctggaaggcatcgggctgcatacgttttgccaaatctaatcgtattaattttaatcagtctccaagatacaaggaaggcagtctcactgcggttgccgctggtgaacaggttgtacccgcgtcggagctggcatctgcaatgaagcaaattaaagagttacagcgcctgctgggcaaaaaaaccatggaaaacgagctgctgaaagaagccgttgaatatggccgacaaaaaaagtggatagcgcacgtgcccttgttgccggaggatggcgaataa

SEQ ID NO: 121642 - DNA, 969 bp, Enterobacter cloacae
atgagtcagccaaatccactttgtgtgggcatcgatgtttccaaagccacactggacatcgctgccagcagtgatgttgctcagtttacagtcagcaatgactctgatggctttaacgcgattattaccggactgagacggcactccgttgctctggttctgatggaggccactggtgggctggaagttgcggtggcctgttcgcttcaggccgaaggttttgaggttgccgtggtcaatcccaggcaggcccgtgacttcgcccgtgcaatgggatatcttgcgaagaccgaccgaattgatgccagagtcctcacgcagatggctgaggttattaatcgtcaccctgagcggaaacgctttatcagggcactgccggatgctgaacgtcaggcccttgctgcaatggtggttcgcagacgccagttgattgcgatgttggtggctgagcgtaaccgactgtatccatcccatccacagaacaagaaaagcattaataccatcattaaagcgctggaagatgagcttgccaggctcgagaaagacatgaacagtcacatccggaaccactttaaagagattgctgagcgcctgagcagtatcaaaggtgtaggcaccatgaccgtttccgcgatgttggcggagattccggaactgggaacgctctcccggcgcgaaatcagtgcgcttataggtgttgctcctgtcaaccgggactcagggactatgcgtggccggcgaaccatttttggcggcagggctggcgtaagatcagcactgtacatggctgcgcttgtggcaacccgctttaatccggtgataaaaacgttttatgtgcgcctgcttgcagccggaaaggccaaaaaagtggcgctggtagcctgtatgcgtaagctgcttaccatcctgaacgcaatgctcagaaagaacgaagaatgggatgagtcgtaccaccacgttgctccataa

SEQ ID NO: 121643 - DNA, 174 bp, Enterobacter cloacae
atgattgatgttctaggtccagagaagcgcagacggcgcagcgttcaggaaaaaatcgccattgttcagcagagctttgagcccggaatgaccgtgtcgctggtcgcccgtcagcatggcgttgctgccagtcagctgttcctgtggcgtaagcaatatcagcaactgtcttga

SEQ ID NO: 121644 - DNA, 618 bp, Enterobacter cloacae
ttgtttatatttggatatcttcgtgcttcaacacaagaacaggatgcgttgcgtgcaaaagcgaggctcaaggactttgctcaacaacacaatcatcgcatagctggctggtatgttgaaaatgcttcaggtgcagcattgcatcgaccggaactgatgagactgcttcaggatgcagagccaggagatgcgatagttatagaacaagtagatcggctttcacgtttggatgataacggctgggagtctttaaaaaagatgattcatgagaaatcgctttcaataataagccttgatctgcctacaagtcatattgcgctatccagctcctcagctgatgactttacccgtagtatgctccgggcagtgaataatatgatgctggacatgttagccgcaattgctcgtaaagattatgaagatcgccgcagaaggcagatggtgggaattacaagcgccagggagaagggaaaatacaggggaaggctggcagacaaggaaaaacatgaattaataagaactctccgcaagaaaaacggaaagtcaataaacgaaacggcaaggctcgctggcgtatcacgcatgaccgttattagagcatgtaagaataaagattga

SEQ ID NO: 121645 - DNA, 1683 bp, Enterobacter cloacae
atggcgtcagacacatcattgattgccgagcaaggcgtggccaccctgcccgatgcggcttgggcgcaggcccggcaacgggcggaaatcatcgggccgctggcagcgcttgatgtggtcgggcatgaagccgccgatgccgctgctcacgcgcttggcctgtccaggcggcaggtgtatgtcctaatccgccgtgcccggcaaggtgctgggcttgtgacggacctggctcgcagccgatccggcggcggaaaaggcaagggacgcttgccggaatcagttgagcgcatcatccgcgagttgctgcaaaagcgcttcctgaccaagcagaagcgtagcctggcagcgttccaccgcgaggtcgcgcaggcttgcaaagcgcaaaagctgcgggcgccggcgcgcaacaccgtggctctgcggatcgccggcctcgatccgctcaaggccactcgccgccgggaaggtcaggatgcgtcccgcagcctgcaaggtgtcggtggtgagcctcccgccgtgaccgcgccactggaacaagtgcagattgatcacacggtcatcgacctgatcgtggtggacgagcgcgaccggcaaccgattggccgtccgtatctgaccatcgccatcgacgtgtttacccgctgcgtgctcggcatggtcgtcacgctggaagcgccgtcatctgtttcggtcggcctgtgccttgtgcatgtcgcctgcgacaagcgtccctggctggagggtctgaacatagaaatggagtggccgatgagcggcaagcccaggctgctctacctggacaacgcggccgagttcaagagcgaagcgctacgccgaggctgcgagcagcatggcatccggcttgactatcgcccgctcgggcagccgcactacggcggcatcgtggaacggatcatcggcacggcgatgcagatgatccacgacgaattgccagggacgaccttctccaaccctgaccagcgcggcgactacgattccgaaaacaaggccgccctgacgctgcgtgagctggagcgctggctcacattggcggtcggcacctaccacggctccgtgcacaacggcctgctccagccgccggcagcgcgctgggccgaagctatcgcgcggaccggcgtgccaaccgtcatcactcgcaccacggcttttctggtcgattttctgcccatcatccgccgcacgctgacccgcaccggcttcgtcatcgaccacatccattactacgccgatgcgctcaagccgtggatagctcggcgcgaccgcttgcctgcgttcctgatccggcgcgacccgcgcgacatcagccgcatttgggtgctggagccggaggggcagcactatctggaaattccataccgcaccttgtcgcacccggctgtcaccctctgggaacaacgacaggcgctggcgaaattgcggcagcaagggcgcgaacaggtggatgagtcggcgctgtttcgcatgatcggccagatgcgcgaaatcgtgtccaccgcgcagaaagctacgcgcaaggcgcggcgcgacgcggatcgacgccagcatctcaaggcaacggcagttcttttcaaaaccacgccaccaccggacgcggacatggctgacccgcaggcagacaaccagccacctgccaaaccgttcgaccagattgaggagtggtag

SEQ ID NO: 121646 - DNA, 909 bp, Enterobacter cloacae
gtggaagaatatcccatcatcgacttgtcccacctgatgccggtggcccagggcttggcccgtcttccggcggacgaacgcatccatcgccttcgcgctgaccgctggatcggctatccgcgagcagtcgaggcgctgaatcggctggaagccctgtatgcgtggccgaacaaacaacgcatgcccaacctgctgttggtcggtccaaccaacaacggcaagtcgatgatcgtcgagaaattccgccgcacccacccggccagctccgacgccgaccaggagcacattccggtactggtcgtgcagatgccatccgaaccgtcggtaatccgcttctacgtcgcgctacttgccgcgatgggcgcgccattgcgcccgcgcccacggctgccggaaatggagcaattggcgctggcactgctacgcaaggtcggcgtgcgcatgctggtgatcgacgaattgcacaacgtcctggccggcaacagcgtcaaccgccgggaattcctcaacctgctgcgtttcctcggcaacgagctgcgcatcccgctggtcggggtcggcacacgcgatgcctacttggcgatccgctcggacgaccagttggaaaaccgcttcgagccgatgatgctgccggtgtgggaggccaacgacgattgctgctcactgctggccagcttcgcggcttcgctcccgctgcggcgaccctcgtcgattgccacgctggatatggcccgctacctgctcacgcgcagcgagggcaccatcggcgagctggcgcacctgttgatggcggcggccgtcgctgccgtggagagcggtgaggaagcgatcaaccatcgcacgctcagcatggccgattacaccggtcccagcgagcggcggcggcaattcgagcgggaactgatgtga

SEQ ID NO: 121647 - DNA, 1218 bp, Enterobacter cloacae; identical to SEQ ID NO: 108025

SEQ ID NO: 121648 - DNA, 615 bp, Enterobacter cloacae; identical to SEQ ID NO: 108024

SEQ ID NO: 121649 - DNA, 237 bp, Enterobacter cloacae
atgaacagccccgagcgcttgccgtccgagacgcacaaaccgatcaccggctacctgtggggcgcgctggccgtgctcacctgtccctgccatttgccgattctcgccattgtgctggccggcacgacggccggcgcgttcatcggagagtactggggtatcgcagccctcacgctgaccggtttgttcgtcctgtctgtgacacgactgctgcgggccttcaaagatcgatcatga

SEQ ID NO: 121650 - DNA, 366 bp, Enterobacter cloacae
atgagcgcctacaccgtgtcccggctggcccttgatgccggggtgagcgtgcatatcgtgcgcgactacctgctgcgcggattgctgcgtccggtggcgtgcaccccgggcggctatggcctgttcgatgatgccgccttgcaacggctgtgcttcgtgcgggcggccttcgaggcgggcatcggcctggacgcgctggcgcggctgtgccgggcgctggatgctgcggacggcgatgaagcggccgcgcagcttgccgttctgcgccagttcgtcgagcgtcggcgcgaagcgttggccgatctggaggtgcagttggccaccatgccgaccgagccggcacagcacgcggagagtctgccatga

SEQ ID NO: 121651 - DNA, 1647 bp, Enterobacter cloacae
atgaccgaaatcaccgtgaatggcatgacctgcacatcctgcgccacccatgtcaaagatgctttggaaaagattcccggcgtgaatgccgctgtggtgtcctatccagaaagccgcgcgcaagtcatggcagacaccgccgtgagccacaaccaactgctggccgccatcgccgcattgggttatcaaggctcgatccgggttggtgatttcaaagatgaaccaaaaatccgtgatgcacttgagggcgccggtttgcatatcgccatcattggcagcggcggggccgcgatggcggcggcgctgaaggccgtcgagcaaggcgcgacggtcacgctgatcgaacgcggcaccatcggcggcacctgcgtcaatatcggctgtgtgccgtccaagatcatgatccgcgctgcccatattgcccatctgcgccgggaaagtccgttcgacggcggtattgcggcaactgtgcctgcgattgaccgcagcaaactgctggcccagcagcaggcccgtgtcgatgaactgcggcacgccaaatacgaaggcatcctggacggcaatccagccatcaccgttttgcacggtgaagcgcgtttcaaggacgaccagagcctggtcgtccgtttgaacgagggtggcgagcgcgaggtaacgttcgaccgctgcctggtcgccaccggtgccagtccggccgtgccgccgattccgggcctgaaagagtcaccctactggacttccaccgaagcgcttgtcagcgacaccattcccgcacgcctggccgtgatcggttcgtcggtggtggcgttggaactggcgcaagcctttgcccggctcggcagccaggtcacgatcctggcacgcagcaccttgttcttccgggaagacccggccatcggcgaggccgtgacagccgctttccgcgccgagggcatcgaggtgctggagcacacgcaagccagccaggtcgcccatgtgaacggcgaattcgtgctgaccaccggacacggtgaattacgcgctgacaagttgctggttgccaccggtcgggcaccgaatacgcgcagcctcgcgctggacgcggcgggggtcactgtcaatgcgcaaggggccatcgttatcgaccaaggcatgcgcacgagcaacccgaacatctacgcggccggcgactgcaccgaccagccgcagttcgtctacgtggcagcggccgccggcacccgtgccgcgatcaacatgaccggcggcgacgcagccctcaatctgaccgcgatgccggcagtggtgttcaccgacccgcaagtcgccaccgtgggctacagcgaggcggaagcgcaccacgatggcatcgagaccgacagtcgcacgctgacactcgacaacgttccgcgagcgcttgccaacttcgacacacgcggcttcatcaagctggtcatcgaggaaggtagcggacggctcatcggcgtgcaggcggtggccccggaagcgggcgaactgatccagacggcggtgctcgccatccgcaaccgcatgacggtgcaggaactggccgaccagttgttcccctacctgacaatggtcgaggggttgaagcttgcggcgcagaccttcaacaaggacgtgaagcagctttcctgctgcgctggataa

SEQ ID NO: 121652 - DNA, 246 bp, Enterobacter cloacae; identical to SEQ ID NO: 108023

SEQ ID NO: 121653 - DNA, 276 bp, Enterobacter cloacae
atgaaaaagctgctttccgcccttgccctcgctgccgttgttgcccccgtgtgggccgccacccagaccgttacgctgtccgtaccgggcatgacctgctcggcctgtccgatcactgtcaagaaggcgatttccaaggtcgatggcgtcagtaaagttgacgtgaccttcgagacgcgcgaagcggtggtcaccttcgatgatgccaagaccagcgtgcagaaactgaccaaggctaccgaggatgcgggctacccatcatcagtcaagaactga

SEQ ID NO: 121654 - DNA, 351 bp, Enterobacter cloacae
atgtctgaacctcaaaacgggcgcggcgcgctcttcactggcgggctggccgccatcctcgcctcggcttgctgcctcgggccgctggttctgatcgccttggggttcagcggcgcttggatcggcaacttgacggtgttggaaccctatcgccccatctttatcggcgtggcgctggtggcgttgttcttcgcctggcggcgcatctaccggccgtcagccgcctgcaaaccgggtgaggtttgcgcgattccccaagtgcgagctacttacaagctcattttctggggcgtggccgtgctggttttggtcgcgctcggatttccctacgtcgtgccatttttctattga

SEQ ID NO: 121655 - DNA, 435 bp, Enterobacter cloacae
atggaaaacaatttggagaacctgaccattggcgttttcgccaggacggccggggtcaatgtggagaccatccggttctatcagcgcaagggcttgctcccggaaccggacaagccttacggcagcattcgccgctatggcgagacggatgtaacgcgggtgcgcttcgtgaaatcagcccagcggttgggtttcagcctggatgagatcgccgagctgctgcggctggaggatggcacccattgcgaggaagccagcagcctggccgagcacaagctcaaggacgtgcgcgagaggatggctgacctggcgcgcatggaggccgtgctgtctgatttggtgtgcgcctgccatgcgcggaaggggaacgtttcctgcccgctgattgcgtcactgcaagggaagaaagaaccgcgcagtgcggacgcggtgtag

SEQ ID NO: 121656 - DNA, 639 bp, Enterobacter cloacae
atggctgactggtttattgcgactgagggcgtgaaggtggtcaaggacagcgccagtctgtggccgcagatcattacggcggtttcgtcaatcggagctgcactcggcggtgtcagcctgacccatcatttcacccgcagacgtgaggaaagagctactgctgcgcagcaggccagtgagcgactttttattgctacggagttggtctttttgctggagtactatgcgattaaatggttagaagtggatactgaaaagcgtcttctccattataaggcagaaaagatacccactttgaatttatcaagtgtatccggtgactggcgtactctaaatacaaactatatattcaaaattcgtgagttcgatgccaatctggctgtaatgcttctcacattaaagccagagactgtagatactggctatatgtattttcactatgaagatcgtgtgtatgtcttaactcaggcaattaaagcttttcttctggccgccaagcttcgccgtgaggttgggttgccggattctatacatttaaaaggtaaacagggcgtgttgttcctgctccataaagcaagaaaaaggtactggcgcttagtgcattgtgatcgcaaaaacgtaaatggcaagaaacgatag

SEQ ID NO: 121657 - DNA, 786 bp, Enterobacter cloacae
atggataatttgactggtctttcaacatttattagccaagaaaagcaaacacaactgcctttgactatcgattatcaggcagcactggcgctgcgccagatggctttggtgcaggatgaactgccgaaatacctgctggcgcccgaagtgagcgccctgctccattacgtccccgatctgcacagaaagatattgctggccactctgtggaataccggggcgcgaattaatgaagcgttggcgctgacaagaggggatttttcgctggcgccgccatatccgttcgtgcaactggccacgctcaagcagcgcaccgagaaagcggcaaggacggcaggtcgtgcccccgcaggcagtaagatccatcgtctggttcccctttccgatcaccactacgtcagccagctgcagatgatggtggccaccctgaaaatccctctcgaacgtcgcaacaagcgcaccggccgaacggagaaggcacgcatctgggaaatcaccgatcgtaccgtccgtacctggctgaatgaagctgttgacgcagctgccgccgacggggtgacgttctcagtaccggtgaccccccatacgttccgtcactcctacgcgatgcacatgctgtatgctggcataccgctgaaagtgttgcagagcctgatgggacacaagtcactgagctcgacggaagtctatacgaaggtattcgcacttgatgttgctgcgcggcatcgagttcagtttcagatgcccgaagcggatgcggtagccatgctgaaagggaatatttaa

SEQ ID NO: 121658 - DNA, 129 bp, Enterobacter cloacae
atgctggcgaacgtcctgctcgccggtgaggtctgtcagaagttatctggcccagctggcgggaatatctgcactatatcccttataccgctcataaatcgcatgctgcagcattttaatacgagctga

SEQ ID NO: 121659 - DNA, 432 bp, Enterobacter cloacae
atgaagctacaacttttcagcgccgggaaagaactcccgccacaggcccatccattgtttgccgatctggcctgctgcggttttcccagccctgctgctgactatgtcgagtccgatctggatctccatgattactgcatacggcatccgagcgcgacttactacctgcgtgccagcggagacagcatggccgacggcagtctgtacaatggcgatctgctggttgtggacagtgctgaaaagccgcggcacggcgatatcgttgtcgccagcgtacagggggagtttacggtgaaacggcttctgctgacgccacggctgacgctgcagcccatgaatgcctcctggtcgccgatttatcctgaccccgacgagctggatatctttggcgtcgtcacgcatatcatccatcgaccgagggagatgtactga

SEQ ID NO: 121660 - DNA, 972 bp, Enterobacter cloacae
atgaatatttactgcgatgatggttcaactaatgttaagctggcatggtttgaaggagatgagcttcagacacgagtctctgcgaactccttcaggcatggctggaaagtggcagaattcagtgcggcaaccttcaattatcaggtgggcacgctgaaatacacctgggacagtgtcagccgggatgccatcccgacaacaaacgtggaatatcagtacggtgatctcaacctgctggccgtgcatcatgcgctgctgaacagcggactggagccgcagccggtgagcctgaccgtgacgctgcccctgagcgagtattacgacggggactgccagcggaacgaggagaacatacgacgcaaacgggaaaacctgatgcgtgagctggttctgaataagggcagagcatttaccgtaacggacgtgaaggtgatgccggaatcactaccggcggcgttctcccgtctcgcggagctgaagcccggccccgctgagaccaccctgattatcgatctcggtggcaccacgctcgatgccggtgtgattgtcggccagtttgatgatatcagtgcggtgcacggtaatccgtctgtcggcgtgtcacaggtcacccgcgcagctgcaggcgcgctgcgggcggcagacagtgaaaccagcgccctcatcgctgacactatcatccgcaaccgcaatgatcgtcagtatctgcagcgtgtgatcaacgatgccggtaaaatcgacgaggttcggaacaaaataacagaggcgatcacttccctgggggcgcgtgtcaccagtgagctgacggccttcaggaacgttaaccgggtattcctggtcgggggaggggcttccctcatagaagaagctatccgtcaggcctggcctctggctcctgaccgtatcgaggttattggcgatccgcagatggcgctggccagggagattgccctttacaataaagaggactaa

SEQ ID NO: 121661 - DNA, 672 bp, Enterobacter cloacae
gtgccggacggccagtattctttctatctgcacagcgacgatcgcaccgacatcgcggcaatggcaaccatcagcaccatctcacagcccctgcgcggtgagttcatccgtaccgccgccaccgccggggcggtggtataccaggtggatgcccgtttaccggcgctgatcccggtgttctttgccgggcaactgagcgctgtccgcctttgcgccgtgatggccctggtctccggaacctggtcctcactcaccggccttccggatgagcccgaaaatggtgaggcagctctgcccgtgtcaccggagacagaataccagcgccggcgttacaccctgacgcttcagaatggccggagtggggaacgggtggaaagtgtgctgacggaagcgtcatcccgtctgcgtggggatctgctgagaaacctgattatcaccggtcttgccctccacacgacggcgccggaactgccgcgcctgctggccagtatgccggtaccgcccacctcggtcagtgagctgcaggcactggttcagcagatggccggcaccgctgacgtgaacagggctgcagctgcagtaccggatacgccggcagcatctgccgcgccggtgtccgggtcggatacccgggaattaaagaaaaatatgcggcgtgcattcggtgactaa

SEQ ID NO: 121662 - DNA, 231 bp, Enterobacter cloacae
atgtcaccaggattcagaaatgtgctccgtctcgcccgcattcccgtcgacagcagtgaaccggtgcgcagaaaatttggcagccggctgattggcattgtgacggtatgtctgcttccgcttctggttttcgacgttccgcagtgggttttcattttgtcgcaggtcatctggggggcgggcgtctatattggcctgtccctggccggggataaatccctgaaccgctga

SEQ ID NO: 121663 - DNA, 702 bp, Enterobacter cloacae
atgtccagattcattctcgggaactgtattgatgtgatgcgcggattccccgaccgtgccgtggaccttattgtgaccgatccgccttacctcgtcggttttaaggaccgtcagggcagacagattgccggggatgtgacggacgaatggctgcaaccggccacgctggagatgtaccgcgtccttaaaaaagacgcgctgatggtgagcttctacagctggaaccgtgtggaccgctttatggccgcgtggaaggcggcaggattctatgccgtgggccagcttgtgttcaccaaaaactatgcctccaaccgtcgtaacgccagggcccgacgcggatttgtggactactgccatgaaggggcttatgtccttgccaaaggccgccccgtgccgccccttaaaccgctgccggatgtgctgcccttcccgtataccggtaataccctgcatccgacgcagaaaccggtggaggcgctacagccgctgattgagtcattcagcgccccgggcgcgattgttctcgacccgtttgccggaagcggttcgacctgcgtcgctgcataccgtgccggacgccgctatatcggcatcgaaatgctggcgcagtaccaccgggccggaaccgaacgactggccgccatgcaccgggccgtcaataccccggcggcgaacgatgaatggctcccggaggccgcgtaa

SEQ ID NO: 121664 - DNA, 222 bp, Enterobacter cloacae
atgaattacgacggacacgaagccctgcgccgcgatatggccgggctggcgaacaatctttgcgacctgaaaaccaccctgaaagtgctggaagacacgtaccactaccggcacgacggactgacggaacggcttgccggtatcagtctgcgacgtctcagcgtcctgatggatgaggcgttcaatattgccctgatgctcgatgaaagctttctggagtga

SEQ ID NO: 121665 - DNA, 420 bp, Enterobacter cloacae
atgtacggaatccgtgaagacatttgcaggatgctgagtgagcaatatcccgcagaaaccccgctgaacctgattatctggactccggcggatattgaagcgctggctgacgggatggaatattccttttcagaacatgacgtaagggcagtactggaacgcatggacgctataccggaagaacaacggcttgagtcgggcgtgtcagccggcctggtgatggcactgatagaccaggtgaaagagaacgggcagagggtgactgtgccggttgacctgcttgaaaccctgctgattaccgccgaacaggcattgtgggacagggaatggaccgcacgggatcgcaatctcccggtgccggaaagcgtaatgcgccgcctggcggatacagcaaaagtgcgggcattactgaaaagctga

SEQ ID NO: 121666 - DNA, 768 bp, Enterobacter cloacae
atgatgaaaaatgaaacccttaacacgcttattctgcgtcacggcgaccggatgctgcgccaggctggctggcccgacactgttgatatggcgcccgtcgcccctgaaaccgtacccggctggcttgccgcctgcggctctctcagtggcgtggaaatcctcacgcttacggaacagctttgtcagccgctgacgtatggccgggcagcgttgttgctcgccagcgcccggcggctggcgggaaccccggctcgtctgcatctctttccggtgcaggcatatccgcatccggagcggctggctgactgtcaggttatccgcctgccttacgctcaggagtggctgacggcggcggaatgtgacgatctgctggccttcctgaaagcctccctcacgcagatatcggaaatcgtccaccgggatacgaagcgcatcgccgccgcgctgacgtcgtccgtcaatccccgtctgatggacaggcggatcggtgactggcgcttgctggccgtcgagtatgatcatgataactgcctggacgaagacgaaaccgacaggctggatcaggtcctcgatgccattcttattcgcgatgcgcgattctgcccgatcctgctcaccctggttaacgagcgggaggaaactatcaggagcgcaggggttatcgctgatcagctgcgttttacggacactccggtccggcgctggtttgatcgccgggttttaagggaaatggtgagagaggcccgcgccagcagaactcaggagtga

SEQ ID NO: 121667 - DNA, 429 bp, Enterobacter cloacae
atgcagtatgtgaagacatgccctgtcctgaatgttgaggagtccgaccgcctgtcttttatgccctacctgttcggcacggatttcatgctcgcggaattacaggtgtacgctctggccaaaaaatggatgcccggatatgagggcggcttctggcatttcatccgcctgccggaagggggcggatacatgatgccagacagtgggcgggtacatctggtcagtggcgaaaactggtttgatcgcatggtcagcgccgacgcggcgggcattattctgaccagcctggcgattaatcgccgtctggcggcccatcatgacagcagtaacccggcactgactcgcctttatatgctgcgtgatgcccagctctggaatcacattacccttcacccggaatgcaacgccatttacgccgcgctggactga

SEQ ID NO: 121668 - DNA, 507 bp, Enterobacter cloacae
atgaattcatccatcaccactccggccatctacgtgggcacgtatcaccagtacaactgcggcagtatttttggcaaatggtttgatttaaccgatttcgacgacgaagacgaattttatgacgcctgccgggcgttgcatgccgccgaggatgaccccgagtttatgtttcaggactgggaagggatcccgtctcagtttgcctctgaatcctctgttaagtgggcgtttatcgaggcattccggcaggcgcaggacgacgggcgcgcagccgcgtttgtggcctgggcggaatataccggcgagtgcgactatgacgcctttgatgatgcgtattgcggcgaggctgaaagcgaggaggattttgcttatggctttgtggaggatcacggcctgttaaacgaggtgcctgaatccctgcgcgtctatttcgattatgaggcttacgcgcgggatctgttcagcagcggctatgtcttccatgaaggctatgtattcagcaactga

SEQ ID NO: 121669 - DNA, 192 bp, Enterobacter cloacae
atgaaacttgcaccacaaagccgcgatatcctgcgacagtacaaagccctgattaatgcccgccgccgcgatgccggtcagcgggaactgaccactgcgcaggtgatggatgaaatctgcgaatacatgacctgtcagtgtgccgtctacattggcggacacttcatcttacagggcggcaagggcctataa

SEQ ID NO: 121670 - DNA, 261 bp, Enterobacter cloacae
atgcatatgtcaaagtggaatatcgccgctttttcaaaagaggagcaggacaaagttgccgtcgataaggtggccgcttccgttgcctggcaggagcgcatgaacaagcccgtcatgccggaacttgttgaacgggaacagcctgaacacctgcgcgaatatttccatgaacggctccgcgtacatcgactgaacagtcagcagctgccgcgcgcaaatgcgcccgaatataataaaccgggcgaggatcagcagaattaa

SEQ ID NO: 121671 - DNA, 321 bp, Enterobacter cloacae
gtgcgtatgtctctgatgtttgctgccgtgacgcttttaaccggtattaacctgttttttattccgtttcagcctgttccggctctgtggggggctatcctggccgttgcttttgttctgattaatgtcgtggcagaaaaactgcgcctctggagtggcatggcgtggattatcgttgccggcatcatcataacgctgatgctgcaggggaaagagccgggtgacgaatttcgtgccctgatcaccgttttcgctttcctggcttctgcctggtactgcgttgttcagtacagaaaagagaagggcgaatctcagtcctga

SEQ ID NO: 121672 - DNA, 543 bp, Enterobacter cloacae
atggcagcacgtggcgttaacaaagtcattctggtcggacatctgggacaggatcccgatgtgcgttacatgcccaacgggggcgcagtggccagtctgacgctggccacgtctgaaacatggcgtgacaagcagacgggagagatgcgcgaaaacaccgagtggcaccgtgttgtcatgttcggcaagctcgcggaagtggcgggcgaatacctgcgtaaaggcgcgcaggtctacatcgagggccagctgcgcacccgcaactggcaggacgatgccggagtcacgcgctacgtcaccgatgtgctggtcggccagaacggcaccctgcagatgctcggcggccgccgtgaatccggtgagcctgagagcgctgcgcagccgcagagtcctgccgccccggcacaacctgctcaggccccggctaaatccccgaaagcaaagggcggtaagaaaggccgtcaggatgcggctccgtcgcagcaaccgcctcagccactcccggatgatttcccgccaatggatgatgacgcgcccttttaa

SEQ ID NO: 121673 - DNA, 249 bp, Enterobacter cloacae
atggaccacaacgttttgtccccgcttgaatccctgccggatggcacgtttacccgcaggcaggctcaggttgccgcagcgcagtatcagaatgtggcgattgaagatgaccaggggacccattttcgccttgtcgtccgtcatcaggatgacggcagcatgatctggcgcgtctggaattttgaaccgggcggtgagtacctgatgaaccgctatatccgggactacggagtacgcaaaacgcaataa

SEQ ID NO: 121674 - DNA, 2001 bp, Enterobacter cloacae
atgtcagtgaccgagtctaaagcaaaagcaacggttaaaaccagcaaaataacggtgaaacctgccgaagccgccgccctcaaagccgcgcttgaggctgctcagattgaaatagtgccgctgtcgtcgctggtcaaatccccgctgaacgttcgcacgatcccctatccggctgacagtgtccgggagatggctgattccatcatggcgatcggcctgatccagaatctggtggttcactcgctgccggacggtatgtcaggtgtggctgcaggtggccgtcgtcttgccgccctgcaacagttgctcagcgagcagcgtatcgatgccggatatccggttgtcgtcaagcgtgtcagtgacgacctggcggtggtcgcctcgatggtcgagaacgacaagcgtgtggccatgcacccggcagagcaaatcagcgggttccgtaccctctcagaacaggggaaaaccccggcgcaaatcggggaccagctgggctacagtgcccgtcacgttcagcgcatgttgaagctggcaaacctcgccccggaactgattaccctgctggcagaggacaaactcgacgtggagcagtgtcaggccctgagtctggagagcgacccggcacgtcaggtgcaggtgtatgaccaggtgaaaacctcatacggcagcacacccgctcacctgctgaagcgggccatcacggatacggaaatcgccgtaacccactcccgcttcgtgtttatcggtcgtgaagcgtatgaggccgccgggggcgtggtgcgtgaggatctgttcagcgcccaggagggagacggaacggcggacggggtactggttgagcgtctggttcaggagaagctggcggcggctgcgctggccatcgaacaacaggaaggctggtcatggtcactggctcgtgagggatccgtcagaaactacggcgatgaccgcgagcattatctggtgctgccggcgccggagggggaattcagcgctgaggaactgcagcgtcttgatgaactgtacgccacgatggaggcaacggaaacctttgaggatgaagccgcgattcaggtgctgattgatgagattgaaaatgcggcatcggttcgggcgtggacaccggagcagaaagcggcctgtggcgtggtggtcagtctgtatgacggtgagctttgcgtccagcgtggtgtgcagaagaagagccagacggcggcatctgacggcggggagcacggtggcgaacaggcttctgtgcatgtggtcacccgcagtatgccggatgcagcagagggtatcagcgtgccgctcctgaaaaaaatgtcttcagaaaggacactggcggttcaggccgaactggttaagcagccacagaaagccgtggccctgatggtctggcggctgtgcagctgcgtgttcgactactgcaccaccacccggcacccgtttgtcctgcgccttgaggtgcatcacagcggcctgaccagtgaagccccgaccggagaggaaggtcaggcatggcggtatctgatgcaggagaaagcccgtctggaagccctgctgccggagggctggcagaaagatttcaccaccttcttcaccctcgacggacagaccctgatgtcgctgatggccttctgtaccgcctgttccgtcgatggcgtccagacccgtgaatgtggccatacccgccgcagtgacctcgatggcgtggaggcggcgctcgggttccatctgcgcgactggtggcagccgacagcggataacttcctcgggctgctcagcaaggcccagattgtggcggcactgaaggaggccgggctgaccggagccgcctcggatgccgaaaaaatgaaaaagggtgatgctgccagccatgctgaacagtggctctccggctcccgctgggtaccgggctggatgcagtcctcggatgccgcaaagccggacgatgcacatgctgccccggacactgacaaaccgacttcccacgctgcctga

SEQ ID NO: 121675 - DNA, 432 bp, Enterobacter cloacae
atgaaaacgttactgactctggatgttctcaaaactatgtccgctgacgagctggaagactaccgtgcagccggtgaagattttcgccgggagctgagccacgctgtcatgcgcgatctgacctcaccgtccggctggtccgtgaatgccgagtaccggtgcgaatttgggggctttttcccggtgcaggtccgcttttctccggcccattgccattttgatgtcgctgtctgcagccccggagagttgagtgaccgctggatgatcgtctttgtgacacgtgctggccagccgttctctgttgttcgcagcatggaagaatttaacccggcgttgatctcccacacgctggcattgatagcgtgtctcgatactgacggatattcctgcgccagtatcatcagcacgctggaacaggagggcgcacaatga

SEQ ID NO: 121676 - DNA, 729 bp, Enterobacter cloacae
atgatcccttcgtcccgttcccttgtcaccctgcagccagcccgacaggctgcgctgcaggccatcatggccgtggagaatgcccgccagcgcggtgctcgtctgtctgcagcgccacacgtgcgtaccttcctgcgcctgctggccgggaacagccgtatgaacacgaccgtggcgcagcgcattcccggcctgaactgggacccgaaacatcgtctgagcagtcttaaacaggtggaagaggcgctcgatgcactgattgccagtcacggggagtgctgtccgctgccgctgccggttgatgttcaggccgaactgttccccgaggtgcagcacagccggactgagcgccggaaactgcgcagcagcctcgcctttacccgtaagatgcgtcgggaagaacgcgcattggcgcatcactggcggttacggcagaacctgctgggacaggccgtcacggagctgaatttccagtcaccggagacggtcagcagctggtaccgccggtggagcaacgagtttgacgcgcgtgagcttgcccctgccttctggcactggcgatcgcgatatgcctcgctggcctctctggactggctgcgggatgccggggagccgctgtgtggtgtcatccatgaaatcagcttcattgtgagagagacgccggagtctgtgcgtcaggcagaacgctggcaggtcccgaacaagctgacacaccggagccacggatga

SEQ ID NO: 121677 - DNA, 327 bp, Enterobacter cloacae
atgaagtggcgctattccctgcgctggaaactgccgcacaggccctgcccgggtccactggagctggtttccgttgtcgtggaggctgggcaggcggcacctgaagaagtgatgtcttgctgggtggcgggcgcgggatatgcggtatgcgtggattttctcgacgagaggcagattaagcgatggagcgacgagcggaaagccgccgcccgccaccggaatctggtgcgccgcatcaacaggattgcgcccttgtttgccgacgagctgatcgagcgggagcttgagagcagacccgggtattttcgcggcaaatcagaacgatga

SEQ ID NO: 121678 - DNA, 510 bp, Enterobacter cloacae
atgtcaagacgtaagtacacctttgaacagcgcctcgaagtggttatgcactatttagctactgatgaaggctatcgcttaacatcagctcgctttaacgttcccagaacccaggtaagattatgggttgcagcctatgatgtttatggagaagaaggtctgaagcccagagataagggcgtatcaatcgatcccgaaatcagagtagaagccgtgaaggctgtgctgacggggcagatttcccagacgcaggcagctgcgaaatttaacgttgctggtgcggcatctgttgggaagtggatgaaggtgttcagcgaacatggagagcaagggcttcgttctcttcgtgtgggcaaaaaaagggcacttcatatgattgatgatcctgttgcgcttgaagtggcattggaacgttcgaaagataaacatattcaggagctggaaagaaaagttcggtcccttgaattacgggtactttatctaaaaaagctgaaagccttagttcggtaa

SEQ ID NO: 121679 - DNA, 810 bp, Enterobacter cloacae
ttgcagattgctcagataccaagaagcaccttttactatcacctgaaagcgcttaaatctccggataaatatgaagagattaaaagcagaatcatagagatatataacgagaactgtggtcgttatggctatcgcagagtcacgctggcactccggcaggaggcaggccgcattaaccataaagttgttcagcggctgatgaacctgctttccctgaaagcggctattaaagtcaagcgatacagctcgtggcgaggtgcgctgggggaaactgctgacaatgttctaaagcggaatttcaaggcaacccgacccaatgaaaaatgggtcactgacgtcaccgaatttgccgtcaatgggcgaaagctctacctctccccgattatcgatctctttaataacgaagtgatttcctacagtatctcagagcgtccagcaatggctatgattgatgagatgctggacaaggcgtttgcaaaactggacaagaagagcacgcctattctccattctgaccaaggctggcagtaccggcaccgctggtatcagtatcagcttaaagcgagtggtgtagttcaaagtatgtcacgaaggggaaattgcctcgacaacgcctgtgcagaatgcttttttggcacactgaagtctgaatgcttttatctcaataaattcaacaatattgaggaactaaagacagctctttcggattatattcactattataataatcaacgaattagcataaaattaaaaggtctgagcccggttgaataccgtctgaaggtctgttcccaccctgtcaggacttaa

SEQ ID NO: 121680 - DNA, 1041 bp, Enterobacter cloacae
gtggctagcgcagagcaacttaaggcacttatcaaatcgcacattagtcgcgatgatggtcacttttattcagtggctatgcaggttgctgcgcatgaggcgaaacagggccatggacgattagctgaggagcttttaactcttctcgacaaggcaaaagcaaaactggctaatgataaaagtgggaagctggtacccctgtccaatgcggccaaaaaccgtacagatcttggtaatttattgattgttagccagccagaataccgattggccgatgttgttctggatcattctgcccattctcagctgcagcggctcatacgtgaacagcgtatgatgtctcgaatcaaagagcatggcctttccccaagacgaaaagttttgttagtcggtcctcctggaacgggaaaaactttaacagcatcagcattagctggtgaacttggtattcctttgtttcaggttcgttttgatgctctgattacaaagtttatgggggagacagcttccaagctacggcaggtgtttgatgctattgctgatattcgtggtgtttattttttcgatgagtttgatgctatcggctcccaacgcagcctcacaaatgatgtaggtgagattcgccgcgtactcaatagctttttgcagatgatcgagcaagacaactcaagtagtataattattgctgctactaatcatccggaaattttagattatgcgttgttcagacgttttgatgatgttattgagtaccatttgccaacgttagaacaggcactcgacttaataaaatctcgactaggagcatttgcgcccaagcctttccgtaaaaatggattagaaaaacaggttgctggtttaagctatgctgaaatttgtcgagctgtcgatgaatcaattaaagatgccctcatgagcgatcgcatgcaggtcgatcttgccatattaaagcaggctttagaagagcgtcgtttgatcagtagtaagttatcacttaacgaaaaaaacaagttaaaacatgacggaacaaaccaacgataa

SEQ ID NO: 121681 - DNA, 2511 bp, Enterobacter cloacae
atgacggaacaaaccaacgataaaaggcttcatctctctttaccaaaaaattctacagcacagccctatacagcacattctcttggtgggagtggctctaccttactacctgagcgggatcgacaagcacatggagtagccctaagaactcaactgcagcaggttaaggaaatgtcggcccaaattcgtgaagggcaagaaaaccttgagctaattagcggtctcggaatgcaaattgagtttattgggcaacctgatgttgaattagcatttgaaagcttgggtaatgagagggggcggaacaaagctcagcacatagaagttttaagtatacataaggagggcgatataacctctgcaaatgtatttgtgcctgatggaaagctagtgcatttcgaaaattacattcaggattatttgactgagaaacgccgcgcagacggggtttccgctgaccataaatcgttaataaatacattatcagcaatacgtcttgcagaaattaaatctctttggacagacgatttgagtttattgccatctgacccggatgaggcattttggtgggaagtatggctaccagtgaggggtaatagaaatgccgttgttactgattttcatcgaataagccatgcgactggatgccaggtcagcgaacacaaagtcgattttcctgagcgaaccataacctggatgtatggttctcagagccaattttctcaagctaggttggttttaaactgtgtagcagaattgcggcgtgcaaaagatacagctgagtttttcgaaggactaccagcattggaacaacagctttgggtggatgatgcactgcgacgtctccaggttccttcacccgaagacaatgtaccttatatctgtttgttggattcaggcattaatcgcgggcacgctatgcttgcacctgttttgcaccagcaggacatgcatacagtcaatgacgcgtggggagtcaatgacaccgcaaaccatggtacggggttggctggagttgcaatctatggcgatatgattgacgctttgtcttctactgatgcaatagaagtaggacaccgactcgagtcagttaagcttactccaaattatggggccaacgttggtgacgcaaaacagcatgcatatctgttcagctcagccgttacacgtcctgaaattctcaatggtcagcgcaaacgtatttttagttcagcagtaacagcaactgcttatcgtgactttggtcgcccttcagcttggtcatcaatggtcgattcactggcagtagatgcgctagcagaaaccccttttccccggttgtttgttctttccgctgggaacatagttgatcgcgaccattggggaaactatcccgccagtctttcagttaatcaaatccatgatccgggccagtcatggaacgcattaactgtaggtgcatttactgacaaggttgagttaaatgagcctgaatttattccggttgctgatcaaggagcattaagtcctttcaccactacctcaatgggatgggaacctgtctggccgtttaagccagatgtagtttttgagggggggaatgcagctgctaacacagaatttgtcgataactttgcgagtttagaattactaacaacaagtgcttcatcccaccgccaattttggacaactaatgcaactagtgcagcttctgcgctgtgtgccagaatggctgcaaggttaatggcacaatatcctgagtatcgcccagaaacgatccgtgctctgatcacacactctgcgcaatggacacctgctatgttgcgtatgtatcctgctcgcaataaaagtggcttcgcacagcttatacgccattgcggctggggctcaccagatgttgaacgtgcgctctggagtgtgaaaaatagtctgacactggtagctgaagacagcttgtacccctatcgtaagactcgcgacggtattaaaactcgtgacttgaatttacatgcgctaccttggccactggaacagctccaggagttacaggatacgcaggtagagctcagggttacattgtcttatttcatcgaacctaacccttcagcacgggggagttcatcaagatatcattacccatcccaccgtcttcgctttgcgatgaaaagacaaacagaatctttagacgaatttaaaactcgcatcaatgcagcagctgagtctgaagagagtgagcatgggactaccggtaacgatgataactggtcattaggtgctactcaacgacataaagggtcgttgcatcaggatatatggcggggggcagcagcagagcttgctagttgtggttatttggctgtttatcctgcacaaggttggtggagaaccagaggcgctttgcaacgatttgattctgaagctaaatacagtctggttgtatcgattcatgcacccgaagcagacgtagacctttatgccgcagtggaaaccttggtcgaaaatatggttgaaaatcctgttgaaataatgggttag

SEQ ID NO: 121682 - DNA, 1341 bp, Enterobacter cloacae; identical to SEQ ID NO: 84378

SEQ ID NO: 121683 - DNA, 411 bp, Enterobacter cloacae; identical to SEQ ID NO: 99291

SEQ ID NO: 121684 - DNA, 1131 bp, Enterobacter cloacae; identical to SEQ ID NO: 99292

SEQ ID NO: 121685 - DNA, 270 bp, Enterobacter cloacae; identical to SEQ ID NO: 99293

SEQ ID NO: 121686 - DNA, 1299 bp, Enterobacter cloacae; identical to SEQ ID NO: 99294

SEQ ID NO: 121687 - DNA, 759 bp, Enterobacter cloacae; identical to SEQ ID NO: 99295

SEQ ID NO: 121688 - DNA, 921 bp, Enterobacter cloacae; identical to SEQ ID NO: 99296

SEQ ID NO: 121689 - DNA, 372 bp, Enterobacter cloacae; identical to SEQ ID NO: 99297

SEQ ID NO: 121690 - DNA, 384 bp, Enterobacter cloacae
atgaaactacatatccttattctgacactgcccactgagcaggccacattacgtatgcgtgtctggcgggcattaaaaaataccggtgccgccatgctgcgcgacggcgtttatctgttgcctgaagcgcaacagagccatgagatttttaacgagatgagtcgtgaaatcagcggtgagggaggaacggcctttgtttttgacgcagagagggggggtaagcgggaaccccagaaaattccgccattccgcattgtggaattttttgggggggtggtccgcggcatgacgacccgccaaaggctaccgcatctatctgaggcgctgtggcgcgacgctgaaaccccggggaattccgctactccagttccaggtccgcaatag

SEQ ID NO: 121691 - DNA, 1320 bp, Enterobacter cloacae; identical to SEQ ID NO: 22860

SEQ ID NO: 121692 - DNA, 882 bp, Enterobacter cloacae; identical to SEQ ID NO: 94091

SEQ ID NO: 121693 - DNA, 780 bp, Enterobacter cloacae; identical to SEQ ID NO: 22857

SEQ ID NO: 121694 - DNA, 1026 bp, Enterobacter cloacae; identical to SEQ ID NO: 22856

SEQ ID NO: 121695 - DNA, 3030 bp, Enterobacter cloacae; identical to SEQ ID NO: 94088

SEQ ID NO: 121696 - DNA, 1716 bp, Enterobacter cloacae; identical to SEQ ID NO: 94087

SEQ ID NO: 121697 - DNA, 681 bp, Enterobacter cloacae
atgagcgtgaccggccagctctttaaactggaaacctccccggccaaatacacccgacgtggcgttgaggatggcgtttactggtacgtgtcggactacacgcgcccgcaccagttcgcccccggttcggtgtgccatttgcttgagcccgatatcaatcaggagctctacgggatgccggaatacctgagcgcgctcaattccgcctggctgaatgaatccgccacgctgtttcgtcgcaagtattatcagaacggcgcgcacgcgggttacatcatgtacgtgaccgacgcggcgcaaagcagcaccgacctcgaggcgctgcgctctgcgatgcgcgactcgaaagggctcgggaattttaaaaacctgtttttctatgccccgaacgggaaaccggatggcatcaagattgtgccgttgagtgaagtcgccacaaaggatgattttttcaacatcaaaaaagtgagcgccgctgacctgctcgatgcgcaccgcgtgccgttccagctcatgggcggcaagcctgaaaacatcggctcgatgggggatatcgagaaggtggcgcgggtgtttgtacgcaacgagctgacaccgctgcaggagcgtttcaaagagataaacgactggctcggaatggaggtgatccgctttaaggattacaacatcgataaagagtaa

SEQ ID NO: 121698 - DNA, 1200 bp, Enterobacter cloacae
atggcttttacaaaaatcaaaatcgacaatcttttttgctttgaaaacagcattcttgatttgagcttttccagatcgccgatcaacagctcactggaaggtgagtacatcgaaggctttgaaaaattttactttaaaaaagtgtgcgtggtttcaggcgcaaacgcttcgggcaagacatctttaggtcgtgtcatgctctcagttgtgcgcttaatcagtaacggtgtattcaatcctgatccactgagggtgacggataaaactaagcctgcatacattgaagctgatttctttcaggttcatttaaaatctctttttagggttggtatttggcttaaggcaagtgatgagtctgtttctgtagaaaaaattgctatagcgtccgttgaattgaggaaactggattcatgcgctaaaacaaccaaaagattggattctgtctgggatacacaaaaatttgagcttaacggaacaagtaaatacttctctaccgagaaatctaaccctaaagaatttacccaatatataaaagacttggattttattttaggctggcattttattctctctgaaaaccaagagaatacagataaaatatcacgcataaagaagaacgtattaaaaagcatacttaaaacctttgacaataccgttaagtcggtttcaggacttatagttaaagatgaagaaggcaaggaagaacttcaggggtactctttacttttcaataatggtgacaaagtcattattgatatggaaggtgaaataacaaataaagatagattgtcacgtggcacatatgaggctgtaaaaataacccatctactctctggtattctggaggataaggatgaagaggctgcaatgaatttcccttgtagcggtctttattttctagatgaaaagatggcctttactcataccgaattagaaaaaatgatggtaactttgataatctcaaaattgtgtagatatggtcagttcatctatacaactcataattacgatatattgagtttagatttgccaacgcattcatttactttcacaaaaaaagtagaggggctaaccacctttgtagaagctactgccaagcataaaaaaaatgaccgaaatcttttgagcttggttaagaatgactgttttggaaccattccagatgtttcattgattgaagaaatgttgttcgaggactga

SEQ ID NO: 121699 - DNA, 519 bp, Enterobacter cloacae
atggcggccaaaaaatttgctatcgtcctcgtagagggagagactgaaaaagcattattcaaggatttcaaatcaatctatggatatcctataaaaaaaatagtcattgtaaacttgtggaatgttggcataaaaaaattcataccttcattaactgaagttaatgacatcattataactttcgacacagataggattgaaaacttagaaagatttaaagagaacataaatcttttactggcaaaaaaacataacattcatttatttcagcagatagaaaactttgaagatgaacttgctaaagcttgcggcttgagcaaccgttcactttactcttcattctgcccgaaaatcgtttcttctgataatttcaaaaatgaattcattgccttgcacaatcgattagttaaattggacagtatcaatttaaacaaaacctctctatggagcagaggtttaatcccacaactcaatgcctatacgcaacagcaatcatctcatgacaaatattttttatag

SEQ ID NO: 121700 - DNA, 555 bp, Enterobacter cloacae
atgtcaaaattcgatgaactatgcgcggcatacaaaaactttaggtctgaatattcatctgtaagggaggatgcaattagtttttcaggctggctagttgcacaatatctatcatatttggggatagaccacagctcacccgcattcaggttgatacctttagtgggtgaggaaaaggtcaattcaacatacagccctttcggcgcaacacatcttggcgatgatggctactggtgtatggggattaggcttacaatttacgagcagaaaaatatgcaccctcaacttcctttgcaaatcgggatcaagttcctccgcaacattgatagttctcatactgtaggtctcttgggctcggactcaacatttaaggtatcgcgtgatgatgacgggcgtgaattgaatgtcttcttcgattcgatacaaaaagaaatccaaaaagtcctaaaggctcaggctgattttttgcatggaaaaaataataaaatgagcaccatcggatttatacagcaacaagttgatgatgatctcaaagcagaaagtagcggggaataa

SEQ ID NO: 121701 - DNA, 285 bp, Enterobacter cloacae
atgaaaacttattacatccatccgatggcattcggtagcacacaagacccaggacacggccatgtgcacgttgttaaggctgatgaagcagagaagcgcatagcagaactgcaggcgcgggaggtgaaattacctgaacgttatgaagttgaaatgtgtcccacgccgtccccgaatggggaagtgcgcattctctacgcagcccttaacagtacaccaacgatagcaacgccaccggtgctgaaacttgctttcagtgccggtggtgttgaacaacgttattaa

SEQ ID NO: 121702 - DNA, 2298 bp, Enterobacter cloacae
atgtccaacgaacctcgggggcgtgttgccccctcgccaccaccaccatttttgaagggcgccagtgattcattcgttggtgcttatccctggaataacgtcatcaaagaggccattggccgcgacagaccccttacacgtgccgaactccgtcaggtgcaaggtgttttaaaccggattgaccgtctgccgtttttcctgcaaacgctgtttacatcgcgttataacttcatccgccgtaaaaagagccctttaggtgggctgtatttccttaaaaacacgtttgagcgcaagctgctgccgcgtcttgagcgtgttaatgagttgtgcgggatgaatgaatccgcctcgattggtttcctgtccgagcgcgaccagtatgcgcgcttaccagatatgaatgacaaagaactcaggaaatttgcggccagaattgcctctcagctctggagcaaatacgaggagttaagcgacgcctgggcggaggcgcacggcgggaaagaaacacttttcaccgatgaagctcagtcgcacctatacggtcaagtggccggtgttgctcgcgcttttaacatcacccctatgtactggaaaaaataccgtaagggtcagatgacgatccgcatggcattttccgctatttcacgactgattaaagacgagtggtgggttaaccagctcaaggcgcagcgtatgcgctggcgcgaggcgctgctcatcgctgccggtgaggtcaacaaagaccgctccccctacgccagcaaaatggcgatccgcgatgttcacgcgcgccgccaggctaatctcgaattcctgaaatcctgcgagctggaaaacaaagttaccggcgaacgtatcgacctcatcagcaaggtcatggggagtatttcaaaccctgaaatacgtcgcatggagctaatgaataccatcgccgggattgagcgctacgcggccagcgttggtgacgtggggatgtttatcacgctgaccactccatcgaagtatcacccgacccgtcaggttggcaaagctgaaagcaaaactgtgcagctcaatcatggctggaacgaaaccgcattcacgccaaaagacggccagcgctatctctgccgaatctggagcctgatgcgtaccgctttcaaggacaacgatttggaagtgtacgggatgcgcgttgtcgaaccgcaccacgacggcacgccacactggcacatgatgctgttttgcaaacccggtcagcgtaaagccatcaacgaaatcatgcgtcgttatgccctcaaagaggacggacacgaaaagggcgcagcaaaacagcgctttgagtcccgtcatcttaatcagggcggcgcggcgggttatatcgctaaatacattgccaaaaatatcgacggctatgcgctcgacggccagctggatcacgacactggcaaacctcttaaagatacggccgccgccgttaccgcatgggcgtctacatggcgcatcccgcagtttaaaccaattggcctcccgacaatgggcgcttaccgcgaactgcgtaagctgccgcgtggcgtaagtattgccagcgactttgacgacagggtcgaggccgcgcgagctgctgcagatgagggtgactttgagcggtacatcatcgcgcagggtggggcaaacgttaagcgtgacgctcaggccgttagggtcgcgcgtaaggtgacggatgaggtcaacgaatacgaggaagatatcgagagggtggtcgggatttatgcccctcatctcggggctgaccgtgtccatgtaacccgtacagccgaatggcgaatcgttccaaaggttttggtcgttgagcctttgaccttaaaaagcggctctgccgcgcctcggagtcctgtcaataactgtggaaagctcaccgccgctggcgatccagttatgacacccacaccgtctgagcaagccgcagcggtgttaaatctgattgagcgcggggttatcggctggaatgagccggacgtcgtgaaggtgcttaacagggcgttaaaagctggcgcaccgcgcaaaaattggcagcaaagaagcaatgcgccgctcaaaaccagcgagcaagcgccatcagccaggatgacaaaacccgaaagggatcgcgtcgcaaaaattcgtttcgatttagctcaggagggcatttccccggaacggtgggagctcgatgcgctgactcgtggggcaatggtgatttatggcgataaaaaattcagatatccggttgctgatgagtggccgggaaattcaactaaaaaggagtgggctttatga

SEQ ID NO: 121703 - DNA, 264 bp, Enterobacter cloacae
atgagcatacacatcgagattaataaccagtacgtcatcaccagtgaccgctatcaattcattttgcaggaaaaaaagaccgcaacatccgggaagaatgaaggtaaggaatggttggacgttgtgggttactacccaactatccctaagcttatctcaggcttggttttgcatgatcttttgaccagcgatcttaccggcttttcagctttggaagctcggattgaacgcatggggaagcaatgtctggacgcttttaaataa

SEQ ID NO: 121704 - DNA, 219 bp, Enterobacter cloacae
atgcaaaagcaaaatacagcgcagcgggggatgtattcggcacttctggcgcaggcagtaagcgaggcacagcgcgacttggcgacccgtttctcttctcagtttgatgggcttatcgcgtacatcagtaagtcagaacttaatcgtaccgagattatcgagttattaggccaggagtcggaaaagttacacaactcaattttcggtagagctggttaa

SEQ ID NO: 121705 - DNA, 501 bp, Enterobacter cloacae
atgacggtaatgacacttgacgtgatccagaaacaaccaatagcgcttcgcggtctagtctgcaagtatctggctaagcctcgctggcaggacacttgcgatttttacaatcagatgatggagcgggagcgtcttacggtttgtttccacgctcaattaaaacagcgtcactctgttatgcgcttagaggaaatgaccgaagccgatcgtgagcgtcttgtttgtgcgcttgatgaattgagaaatgcatttgcccggcaccgccaacttggcgcgtcaaaagcaactttcatcagccgcctgaccgtcagccaaagacgctcattgtttcttcatgctggactgacagagcaggaatttatgatgccgcactggcgtttgaatgaggaggactgttattggcgtgacaaacttttccgcgctctgcgagagctgtttagcctttttgagtacgcaccaaccattttaacctcggtaaaacctgagcagtatttacattaa

SEQ ID NO: 121706 - DNA, 174 bp, Enterobacter cloacae
atgaatagtgaacctcgctgtattgcacagttgcttcgaagagaaagtcctaaacctaccaacttcactattactcacggtcgtggacgcaagggcatcatcatccgaacccgaaagctgggcgttatcgagaaacttcgccgcttggtcaaaaagagaggactgtggttatga

SEQ ID NO: 121707 - DNA, 276 bp, Enterobacter cloacae
atgagtaaccagcttgtaagcagaacagatgcggttccatatcaggaatttgcccgtcttattggaaaaactcccgcagcggttaaagggatgattgagaagggcaagttgcctgttgttgagatgaccgatccgcagtcaacgagtgggcgcgcaggggaatattgggtttatctgcctgcctggaacaagggtatgaagatggcatatgacagccgcccgaaggaaattcgtgatggttggctgatgtggctcggattaggggagccagtatga

SEQ ID NO: 121708 - DNA, 300 bp, Enterobacter cloacae
atgtcaatacagatccatgaaaaaatcaagctgataagagagtcagaaaggttaaataggagacaattcagtgagttaactggaatcgtttacggttctttttgtagttatgaagccggcgacaaaaagccgggaatcgaacaaatcatgaaaatcctccagcacccgcgcttcacgaaatacaccatgtggtttatgactgatcaaataacacccgaagctgggcagattgcaccggctctcgcgcactttgggcagcagacaacaacgtcaccccactcagaccagaaaactggctaa

SEQ ID NO: 121709 - DNA, 1011 bp, Enterobacter cloacae
atgtctgttaaaaagctcgatgatggtcgatatgaagtggacattagaccggctgggcgtaacggaaaacgcatccgtcggaagttcgacaagaaaagcgaggcgatggcttttgaaaagcatactcaatataaccatcactcaaaggaatggctttcaaaacccacggacaaacgccaactgtcagaactgaaagagttatggtggaagctgaaaggtaaacacgaggaacacggtcaatcgtacctcaggaaaattgagcgtttcgaaacgatgaccggtaacccatgcgctttccagatcaccaagagcctgataacgcaatattgtgctcaacgccggggtgaaggtattaagccaactaccatcaaccgcgacctgatcacactaggtgggatgttcacaaccctgattgagtcagaaatgtataacggcgagcatccgttcagagggttcaaaaaactgaaagagcagactgccgaaacgggctatctcactcttgaggaaattgacgccttactggcagcgctatcaggagacaatcgtaaaattgccgtcttgtgtctgagtaccggggcaagatggggagaggctgcaaggctgaaagcggagaacgtgattcataaccgggtgtctttcgttaagacgaaaaccaacacaccgcgaacggttccgatctctgacgacgttgcggcttacatagtcggtaaaacaaggggctttctgtttgctgaggccagttatgctgaattcaggcgaatcctcaaagcggttaagccagatttaccggccgggcaagcgacacatgcgctgcgacactctttcgccacgcactttatgattaacgggggcaacatcatcacactgcagaggatcttaggtcatacgaaaattgcgcagacaatggtctatgcgcacttcgctcctcagtacctgcaggacgcgatttcgcttaacccgttgaagggtgcaaatggtcgtaagagtgtccacaatgtgtccacaccctag

SEQ ID NO: 121710 - DNA, 525 bp, Enterobacter cloacae
atgcgtaccgttgtttataccgccgaaatcgacgatcgctttggggcagggaaggtaagctcaagaatagggctttcatcgcctgcaaggctgtttaaccctcaaacggacctgctggaggacattcgtgtcgagcatgcctctaagcctgtccattgcgtgctggtagatgaaagccagttcctgacccgtgagcaggtccatgcgctttcagaggtcgttgatgagctggatattcccgttctttgctatggattacgtaccgattttcgtggggagttatttgccggcagccagtatctgctcgcctggtcggataagctggttgagctgaaaacaatctgcttttgtggccgcaaggcaagtatggttcttcgcctggaccagtcgggtaaaccctatgctgatggcgagcaggtggtgataggaggcaatgaacgttatgtctcggtctgccgcaagcattataaagaggcgctggctgtaggctcgctgacggcgttacagggcgacaatcgaaaataa

SEQ ID NO: 121711 - DNA, 2532 bp, Enterobacter cloacae
atgattggcttacgtcactgcattgccatgatatcggggttatgtctgagcattcctgttcagtcattagcacaggacagcctgtttaacccgaaacttctggaaatcgatcatccggtcgatgtcgatattcgtcaatttaaccgttccaacgcgcttccccctggcagctataaagttgatgtattcattaacggcaaattttttgaacgtaaggaagtgacgtttgtgcaggatgctcccgaggacgaactccatccttgctacgtcgctatcaatgatgtccttatatcttacggcgtaaaggttgaggcgttgaaaacgctgcgtggagtggatagcaccgcctgcgtcaaccccgctccgttggtggagggatcacgctggctattcgacggcaacaagctggtgttgaacatctccattccacaaatttatcttgattcagcggcgtatgattatattagtccctcgcgatgggatgaaggcattaacgccttgatgaccaactatgacttttccggttcgcatactcttcgatcaaattatgattctgaggaggatgacagctactacctgaatttgcgcaatggtcttaatctcgggtcctggcggcttcgcaactacagcacagtggattcgacagcaggcagcgctgagtaccactccatcagcagctatgtgcagcgagatatcgccgcgctacgcagccagatcatggttggcgatacctggaccgcaagcgacatctttgacagtacgcagatccgcggcgtcagactctataccgatgacgacatgctaccgtccagtcagaatggctttgcgccgatagtgcgcggtatcgcaaaaagcaacgcgaccgtgacgatccgccagaataactatgtgatctatcagtcggcggtaccgcagggcgcgtttgaaatcaccgatctgaataccaccagcggtggcggcgatctggacgtaacaatcaaagaggaagacggcagcgagcagcgttttacacagccttacgcttctctggcaatactgaaacgcgaaggacagaccgacgttgatgtcagcgtcggtgaaatgcgcgctgagagcggctttacacccgatgtgttacaggcgcaggtattacacgggatgccgtggggattaacgctctacggtggaacgcaggttgcgcaagattatgcctccgcagctatagggatggggaaggatatgggtgcgctgggtgcgatgtcgctagatataacccaggctcgctcgtcttttgacaatggcgacgaggaaaaagggcaatcataccgtttcctctattccaaacgatttgatgatacagataccaattttcgtctcgtaggataccggtactctacagaaggcttttattcactaaccgagtgggcatctcgccagaatgatgtttctgatttctggaacatgggaaaccggcgtagtcgcctggaaggtacctggacccaatcgttggggcccgatcggggaaatttctacctgacgctgagccgtcagcagtactggcacaccgatgaggtcgagcgtctgcttcagcttggttacagcaataactggcggcagatatcatggaacctgacatggaattataccgactcgatcaaccgctattccagcggcagccacagcgacgactacaccgatagcgaacatatttttatgttcacggtttctttgccgctctctggctggttggaagggagttacgttaactactccatgacccagaataatcataacgacagtagcatgcaggccgggatcggcggcactctgttggaaggccacaatctggcgtatagcgtgcaggagtcctggacgaatacatcgaataatacccatagcagcaatgccagcctgaactacgacggcacctacggatcggtaaatggcagctacgcctatagccaggattcgcagcgtataaactacggggcgcgtggcggtattctgattcaccgcgacggcgtgaccttttcccaggagttgggtgaaacggtggcgctagtggaagcgccaggagcgggcggcctgtcggttgaaaacacgaccggggtagcgacggactggcgtggatacaccgtcaaaacgcagcttaatccttacgaagaaaaccgtatagcgattaacagcaactatttttcacgtgctaacgtcgaactggataataccgttgttaatcttgtacctacccgcggcgcggtagtgaaagcagcgtttaaaactcgcatcggctatcgcgttttattcagcgtcattatggctaacggcaaacctgcgccgtttggcgcaatggcgacggccgatctggatacgggaacggtaaccgggattgtgggggataacggcgagctttatctttcaggaatgcccttagttggccgttttaatattactggtcaatccatctgccaggttgagtatcatctcgaagcgccaaaggacaatgggctgttacaactgccggtaacatgcgctaataacggagtatcaaattga

SEQ ID NO: 121712 - DNA, 705 bp, Enterobacter cloacae
atgagaggctgtatggttgcttttacacgtttatttaaaacattcatggctgcgacaatgtgtctcagctcgtcaatagcctgtgcaggcatcattgtcggcggcacgcgcgtcatttttttggctgatagtcctgatgccactatatcgatttacaacaaagagagcgatctgccgtacctgatacaaacctgggtcgacccctttgacaaagaagataaacataaaccgccttttaccgtcataccacccgtttccaggcttgagccaatgcaagaaaaggtcttacgcgtacttaaaatggccgggacgttgcccaccgatcgcgaatccgttttttggctgaacataaaaaatattccgccatccagcagtaaaaaagagaccagctcgctggaaattgcgattaagacacgtatcaaactgttctggcgaccggcggctattacgttaatccctgagaaggcggtagcgaacgtcgcatggtcaaaacaaggtcggcaacttattgttcagaataataatcctatccatatcaatatcatggatgtatcagttgatggtaaagacataccagtcaatatgatcaaaccctttgaaaaactctcgctgacattaccaccaggaagtgcaggccatacgcttgtttggcgttttattaatgattacggcgccgtcagcaacccagtaaaacaggtgctttaa

SEQ ID NO: 121713 - DNA, 564 bp, Enterobacter cloacae
atgaaactaaatgctatcgccagcgcaataatcttgtcttcatccatattatctggtgctgctctggcatctgatggtactgtacatttccgtggtgagatcattgatagcgcttgtgaaattaccaccgttacgaaagaacaaaacgttgatttaggtaaagtcagtaaaacggcattcaacggtgtaggcagcacctccgcaccaacgcaattcactatcagcctggagaaatgcccgccaacctataccaaggcatcggttcgatttgacggtactgaagctggcaatggcgatctggcgataggtaacccggaaaaaacaggcacgccaggcgactttacgggtacaggcgacgcggtcactgcaacgggcgtagcgattcgtatctataaccgcgcagacaactctcaggttgagttatacaaagattctgccacaactgatattgtggatactaaggccgatttaaaattcattgcacgttatattgcaacctctacgaccgtaacgccaggtacagctaacgctgactctcagttcaccgttgaatatgtgaaataa

SEQ ID NO: 121714 - DNA, 1557 bp, Enterobacter cloacae
atgactggcgaaaatgataaaaatcataaggttagagttgcgcagtacttgaggatgtcaactgaccatcagcagtattctttacataatcagtccgaatacataaaagattatgctgaaaagaataatatggagatcgcttatacatatgatgacgcaggtaagagcggggtgagcatcgtagggaggcattctttgcagcagctacttagtgatgtggaacagaaaaaaataaatatacaagctgtattattttatgatgtcagtcgttttggtcgttttcaaaatagtgatgaagctgcttattactcatttctttttgagaaaaatggtgtagatcttatatattgctctgaacctatacctactaaggattttcccttagaatcatctgtcatattgaatataaaaagatcaagtgcagcctatcatagcagaaatctatccgagaaggtttttatagggcaagtaaatttaataaagcgtggttatcatcagggaggtatggcaggttatggacttagaagacttttagtggatgaaaatgacatagctaaggaaatcttaagttttagaaaaagaaagagcatccaaacagatagggttatattaatccctggccctaaaagtgaaatacaaattgtaaacaaaatctatcatctttttatagatcatcatgtgccagagtttatcattgctgaaaaattaaatgagcaaaatatatcagcagaaaacggttcatactggacacgtgggaaaatacaccaaatattgactaatgaaaagtatataggcaataatatatataataaaacctcatccaaacttaaaagtaaatccattaaaaaccctaaacatgaatgggttagatgcgataaagcatttaagcctattatttcaaagaaaaaatttaataaagcacaggaaataatccagcttaggtcaatacatttatcaaatgaagatcttttagaaaagcttaagcaaaaattaaaaactaatgggaaactatcaggatttattattgatgaagacgatacaggtccttcatcatctgtttatagaacccgctttggtggccttttaagagcatatactttaattggctataagccagagcatgattatagttatctaaaaataaatgaagcactaagagcattctattctgatgtaattgaagatttcaaaaatagtattgagaaaaacaactgttgtgtagactcacataaatatgcaccaatgttatgtattaatgaagagacaataatttctgtaattataacaaaatgcaaacatatgaaatctggtaagctaagatggaaagtgagatttgataattcattgaaagcagacataactatcgttatacgaatggattcacaaaatgaatcacctcgtgatttctatattataccaaaaattgataacgaatttagtaaaatggtaatgtcggaaaaaaacaatctccgactagaactatatagatttgataacttagacaagtttctacaaattatttatcgtatcgacttgagggatgtatatgcagcctaa

SEQ ID NO: 121715 - DNA, 210 bp, Enterobacter cloacae
atgagtcttgattgcgtaccactttcaacctactgccgggacgccggagaaacagttgaagccgttaacaaacggatacaaagggggttatggaaagagggtgtccatgtattaaaagtcgatggcgttaaagaacgctggatagacttaacggaggtttcaaagtgggcaagaaagaacaaggatcattatctctcccaagaggagtaa

SEQ ID NO: 121716 - DNA, 285 bp, Enterobacter cloacae
atgaataagccagtttcagaaattattaagcgttggacccgtctggcaacggaggccaaacagctggggcacaccaccatccctgtcgacccggaaaacatgctgatggtcgtgggagatctgccagatagtgaagactatcaggctgcaatcgattttttgcgcaagagagcggccagcgaacttgatggcggttttagagcgcaccacaacgcacttatctatgcggcaaatgaactggaaaatgcccaggcatttgggcgggaggtcggtcatgagtcttga

SEQ ID NO: 121717 - DNA, 414 bp, Enterobacter cloacae
atgaacgataaacgcaccgtaagcatgattgacctggcattacagaaacacgatacgccagttggcccactgttcgtagcagtacgtcacggtcgtatcaaaaaatgcttcacgcaagatacggcgatccgctatctggctttcttcatgactaccgaggcttttgagcgttcaggttttccacagcgtcacccgcgggtgcgtattgatcgcgatgacagggaggtatggcgagacggggaaacaaaggctgagtatctggccgcccaccagcgttgtgttcgccgtctgcgtcgcatcctggcgtgcaagcgagaaatggagaaatggtgtgagaaatgggacgcgatgcatgaccgattcgttaaagaggttgatgcactgcaggccataaaaccagtaggggtgaaatga

SEQ ID NO: 121718 - DNA, 408 bp, Enterobacter cloacae
atggataaattaatcgagacatatcgacgccgaattttaaaagcagcgttattacgccaccagcgtaaaacaggcagtaactgccttgttattaagctcaataaaggcggcattaacacggtcgagttaacagagattcttctcgatggattattgagaaaattcgaaaggcttgcgatcagcgagtacgggaatgtcgaaggcgtaaaagctatcaagggaatttacagcagcgctgttgatgttaatggcagcggtgaattccttacggatagcgggaaggagttaatcgacgagctcatttctgagctggttgagttcgtcaaaaaacaaaaagtggaggctccgaaaacggagggtcatgaaatggggggatctgatggcacttacagcgatacgaattcctga

SEQ ID NO: 121719 - DNA, 222 bp, Enterobacter cloacae
atgggtgttttaaaaagacaggatattcaggaagtgaatatcaaagcggagaagttgtcaggcttgacgcaaacattatttgaatgtcacgacaagttagacagatttcaacttaaaacaatatgcgctctggtttatgacctcgccgctgagattcatggatggaccgaaaaagaagaggaaatagttatgggtttggaggaggaaaagcgcaatggataa

SEQ ID NO: 121720 - DNA, 390 bp, Enterobacter cloacae
atgcataatttacttaatccaataaataaaccagtcgcttatcctcgtgaattatttgttgatgagaaaggtaagtacacgcctggggaaattatgacttgccagatgggtggggattccatgcaaccaaccatccagccatgcgaactgatcgctttcgctgactgtggcggaaaggtctcagagccgggtatttatgtttttacccgtgatgttttcggacgaccatgcgtattcgttaagcgtgttgagccaatgccggacggttctctggtgataatttctgacaaccaccattacgagacttttacgcttgatgtcgacgagcagagcgatatgcaggtgcatggccgggttattgcctcaatgacaatgaggcgctttgtatga

SEQ ID NO: 121721 - DNA, 294 bp, Enterobacter cloacae
atgaatacaacctcccaaccaaacccagcgagccaggcatttgatatccacgccaagcttaaagcagcaaattcacactggatttatttacgagctgcacagcctcatcagaatgattttgattacgaatttaacacaacttttattgatggtttggaattcgctatctacgaacgtgtagataattattttgttctggttgatttcttcaagtcttatgaagaagcatgtgatgatgctaaaaaaatcatagatgaccatcctgatattaaaaaaatgttttctgttagctaa

SEQ ID NO: 121722 - DNA, 693 bp, Enterobacter cloacae
atgaacacacttgcagaaagactaaggctggcgatggctcatgccggggctacacaaagtcaattagcgcatagggttggggtaagccagggggccatacaaaaactaacctcaggaaaagctcagtccagcggaaaaatcgtggatatagccaaagcgttggatgtagatccaatatggttaagcactggtgaaggcaccatggggcccgcaaaaactccagaacaaaggatgtttggtatagatccatgggataagcaaacgccgcttgaggatgatgaggtagaggtgccttacttgaaggatatcgagttcgcatgtggagatggcagcgctcttaatgatgattacaatggcaaaaaacttaggttttccaaagcaacattgcgaaaggtgggagctaatagtgatggtgatggcgttctatgctttgctgcacacgggaatagcatggagccagtgatcgctgatggctcaactgttgccataaactgccatgacaagcgtatcgtggatggtaaaatttacggcatcaaccaaggtggatggaaaaggttaaaaatcctctacagatctgggccagataaggtaacaatcagaagctacaactctgatgaataccctgacgaagaagtagacatggatagtcttgaggttttaggaaggctgttttgggtatcaacaatcttctga

SEQ ID NO: 121723 - DNA, 243 bp, Enterobacter cloacae
atgactgatgaggtttttgaatccccaatggcgaaagccgtgtacgttgctggtgggcaaagttcgcttgctaaaaaggttggcgttacgcaaggagcggtctggaagtgggtcagggggatcaagaaagtttctcctgtccatgcagtggcagtctcaaacgcagttaatggagttgttaagcctcatgaactgcgtcctgatttgccgactcttttcccgcacccgggcaatgaggtgtga

SEQ ID NO: 121724 - DNA, 795 bp, Enterobacter cloacae
atggttaaagcaatgaaggtcaaggtgggaaatccactgcgtaagctcgtgctactgaaacttgcagataacgctagtgaccatggcgagtgctggccgagctatcaacacatcgctgatcagtgcgaaatcagtaagcgatctgtgatgattcacattgatgctttatgtgaatgcggcctggtaaaaaaagaacttcgcccaggtccaaaaggtaactcaagtaatgtatatcgccttgatttcagtagtgcaggagattcactagggggtagtgcaaatcgttcactacctggtgcagcagattcaccccgtagtgcaggagattcactagggggtagtgcaggagctgcacccagaatcagtcactcttttgaaccagtcaatgaatcagtcatagaacctaaatataacggttcatctgataaccattctgaaaatcgctcttccaaagagaactattccaacgagttcgagcaggcatggcaggcataccctaaacgtgctggcggtaattctaaagctgccgcctggaaagcctggaaagctcgaatcaaagacggtgttaacactgaggcaatgctggctggtgtaaaccgttatgcaggttatgtccgtgctacaggtagcgccggaacgcagtacgtgaaacaggcggcgacgttctttggacccgatcggcatttcgaagagccatggcaggcgccatctggtgcggtaagcggtagacctggtgggctgccggtttctgggtttagtgaacaagactatggccaatcagactgcaactggtaa

SEQ ID NO: 121725 - DNA, 882 bp, Enterobacter cloacae
atgctgagtattaaacaacgcgaagaaagggaagctctggtggcaaagcgcgaagggcttcgtgaagaactggcgtttgctgtggaacataaaaaaccgtggcagtggggaagctgggagtcgggcgaagtccatgctgccgcttgtgaaaaacatggtggttatcagcgcatttccctcactgggaaagcctatcgtggcgttgaaaatgttaagcattcccagtgcccggagtgtgtgaaagaggagcttgccggcattgaatctaatctgcatgcattacgagtagccgacctgttggacaatgccgggatcgcgcgacgctttgaaacatgtgaattcgataactaccaggccatcaaccaggatgccgctaaaaatctctcttcctgtcggcgttacgccagcagctggcctgagcgactgaatgccggaactgggcttgttatgaccggcaactgcggcaccggcaaaaaccacctggcagtgtctatggcaaagagcatcatccgcgatcaccttgcgaatgtggaaatcaccgatgtcatgcgtctcacccgatccgtgaaaagcacatggcgccacaatgctgaaatgaccgaggaagatgtcattgagcgcttcgcttcattggatctgctgattatcgacgaagtgggcgttcagttcggaagcccgacagaaatgaccatcctgcaggaaatcatcaatgcccggtacgaaagcattttgccaacaatcctgatcagcaatctcacattcgaccagttgaaagagacgattggtgagcgaatcgtggaccgggttacagatggtggccgcaaccgtctggcatttggctggggaagtttccgtgccatcgcgtcaggagttgtagcatga

SEQ ID NO: 121726 - DNA, 1380 bp, Enterobacter cloacae
atgactcctgtctggaaaaatgaagatctggaaggtgcggtgatcggcgcaatttttctgcgtggagccgaccctgaggtactggatattctatccagggtgccggccactgctttctcggtaccgcagtatcgggaaatatatactgggatctgccgtcaggcgcgtggagctggcgttattgaccctgtactgctctgcgaaaacatgccaaagcacagcgcaatcattatggattcgagccgtatcgcatgggccaagtcggcgcttgtgtcatacgttgccacgcttgagcgtaatgcagctgttcgtgatgccgaagctgtgattgaaagggcgctggctgatctccggagtgctcacaatggtgatgcggctttatcggcattcagggctgcacagaacagcattgccgcaatttctctcgaagaaaagaccgttcagccagttcatatcgacgacattcttcctgctgtagtggatcgggtagatgcacgcaaccgcggcctcgaagaagccagaagcctcatgacgggcattgaagagcttgatgcaaagactggaggcattgaaccaacagacctggtgtttatcgctgcgaggccgtcgatgggtaaaactgaattggcgctggatatcatcgacaaagtttctgagcagggccgcggtgtgctgttcttcagcatggaaatgccaaatatccagatcggtgagcgaatggtatctgctgcgggtggtatgtcggtttcacgcctgaaaagagctgctgattttgatgatgaagactgggcgaggctgactgatggtgtcggtcgacttacagggcgcagtatctggatggttgattctacagatctgacagtggatcagatccagcagatatctacccgcctgcaaatggcgcatccagagatagctttggtggtagtggactacctggcactcatcaaaattgaaagcactgcgcgatatgaccttgctgtcggtgaggtctcaaaaggacttaagcgcctggctaaatctaataaaacgccggtgcttgccctgagccagctttcccgtggcgttgagtcgcgtcccaacaagcgtccgatgaactcagacctcaaaaattcgggtgagattgaagcggatgctgatctgatcatgatgctttaccgagatgaagtttataaccctaagtcgccagcgaaggggattgcggaaattaacgtgactaaacagcgcaacggtgagctgggcacgatctatcgtcgattctataacgggcacttcctgccaattgaccaggagttagcaaaacaacgttccgcgccgcagcagaaagcccataccagacgttactcaaaagaaaggcattccagcaatgcagactattaa

SEQ ID NO: 121727 - DNA, 222 bp, Enterobacter cloacae
atgatattgtttcctccattccaagcgttccaatatttccctcgcggcacctacgcagcctttcagggctatttttggattttttatgttccacatatctatgagttaactctaaaaagcctaaccttcccgtatgttttgaaggtggatttggttcggctaatattgcagatcattgcctggtggctaatgatgctactgctctctgtgcgtagacgttaa

SEQ ID NO: 121728 - DNA, 390 bp, Enterobacter cloacae; identical to SEQ ID NO: 119852

SEQ ID NO: 121729 - DNA, 630 bp, Enterobacter cloacae
atgaaccaaacacaatttcagagggcggctggtatcagcgccgggttagctgcgcgctggtttccacatatcgacgccgctatgaaggaatacggcatcaccgcaccgctcgatcaggcgatgtttattgcccagatggggcatgaaagcaccagatttacccggctggtggagagcctgaattacgcggttgaaaacctggtaccgacgtttggtagccaccgcatcacacaacagcaggccgccgcacttggcagaacggcaacgcaaccggcaaaccagaaagcgatcgctaatctggtatacggtggtgagtggggaaaagaacacttgggcaatcaggttgccggtgatggctggaaatatcgcggtcgcgggctaaaacaggttaccggcctgagtaactatcgcagttgtggccacgcgttgaaactggaccttgttacccacccggacctgcttgaacaggatgaatacgccgcgcgctcagctgcatggttctattcgtctcgcggttgcctgcttcattccggtgacgttgagcgcgtgacattgcttatcaatgggggcagaaacgggctggataaacgccgcgcgctgtttaatctggcgaaatcagttctggtgtga

SEQ ID NO: 121730 - DNA, 204 bp, Enterobacter cloacae
atgggccatattcgcggcaccagcaaagcggaagcgaaagccgaccagcagcgcactgaagataacgcagcggcaacggtcacagcagcagaacgccgggttgaagcaacgaaagaggccagcaatgtacagcagactgttaaccatatgcctggcgatgatgttgatcgtgagctgcgcacaaactggacccgtaaaggttga

SEQ ID NO: 121731 - DNA, 1458 bp, Enterobacter cloacae
atgcaagttactattgatggtgtcccgtatgcacccgcctgcgcaattgcatcgcggatcggcattgcgattacaacccacaaccgggcggacgttttaaagcgtgctattgagcagcaccagaagcatctgccagctggggcgctggtggtggtagtcgttgatggttcaaaacctaccgcagtagtgcctgacggcgtgcagctgcttcgccatgaaacatcactcggcattgtcgcttcgaagaatgccagtttaaccgcgctgatggacgccgggtgtgagcatctattcctttgggacgatgacgcctggccaatcgcagataactggcacctgccttacatcgaatcccccgagccacacctggcttaccagtttctcgatctggcagggacgaataagctgaacgatatgtcggttttgtaccgggatgataagcacatcgcttacaccgggcagcgcggcgtgatgctgtattaccaccgtagcgctatcgagaaggttggcggtttcgatccggtttacggtcgcggcatgtacgagcacagcgacctcgccctgcgcatccataacgcaggactgactacgtgggcttacgctgatgtcctcggttcagacaagctgatccattctctcgatgagcatgaagccgtagagcgttcggtaccgcgccccgacagacaggcgctggtggaacgtaacgtgaagatacacaacgaacgacgtgataccggctttaccggttacgttgaataccgccagcagcgtgacgtggtaatcacaacgctgctcaccagtcagcctgacccgcagcgcggcacaaaaatggcggcctcgcctgacatgctgagcaaatgggcggcctcgcttcgccagtgtggtcgtatagcgctggtggatgaattactgacggccccggcagatgttgagctgtatctcgtacctgacgtgaagatgaatgtctacttccgtcgctggctgcacatctggcagcacctgcgagaacaccctgaataccggttcgtctggtgtaccgatggtaccgatgtcgaaatgcttcgcgcgccgtgggaagaaatggaagccggaaaggtttatgtcggttcagaacccaagacttacgcggacaactgggcaaagcagaatcatccagagcgtatctatcaggagttcatcgaagcacaccgcaacgatgtgatgcttaatgctggtctccttggtggtacccgcgctgatgtgatggcgttcgctcacagcattatccgtctttactaccggatcgagagttatcgtttctggaagaaagaacaggctggcgctgcggtgggtgacatgcttgcgtttggcattgtcgcgaaatctttcggcgatcggatagtaaccggccctcgtatccacaccgtgttcaagtctgaaggtgttggtaaggagtacgcattttggaaacacaagtga

SEQ ID NO: 121732 - DNA, 588 bp, Enterobacter cloacae
ttggaaacacaagtgaaatttgttgtggttggtcaccactcacgaatagatcccgcacatcgtctcgccacgatgctggatgctcatctgctgattgattacagtaaccacggcgctaactggaatcatcgtcgcgcgcttgagtgggcagcagagcaaacatgccgggtggtagtgttggaagacgacgcactgccagtacatagattcaccgaaatggtgaccgactggttggcgcgttgcccagatgaccttctgagcttttaccttggaacaggtcgtcctcctcagtaccagatgcaaatagccgaacggctaatcattgctgataaagctcgatatgaattcatttcgtttcctcgcctaattcatggtgtgtgctacagcgtaccgcctcattgcatcagccgcgtgttatctcgatgggatagtaataagcctgccgattttgccgtgggtgatgcatggggcggttcagtggtctatccgtgttactcgctggttgatcatgcagatggcgaaccggttgagagtcatcctgattcagcgccacgaacagaacgccgccgggcgtggaggttagcctga

SEQ ID NO: 121733 - DNA, 807 bp, Enterobacter cloacae
atggctaaggttgcagaaggcatccgctacgccgagagggtggtggcgggggaaattattgcctgtgagtatgtacgccttgcctgtcagcgttttcttgacgatctggcacacggcgaagagcgcggtattttcttcagtgagccgcgcgcgcagcacattctgaatttctataattttgttcctcacgtcaaaggtgcgctagcaggccagcctattgagctgatggactggcatgttttcatcctgattaatatttttggttttgttatcccgctggttaacgaagagacgggggaaaccgttctgcgtaacgacggcagcggtcggccggtgatggttcggcgtttccgtacagcagatgttgaggtggcccgtaaaaatgccaaatcaacgctttgctccggcgtggggctttatatggctggcgcagacggcgagggcggggcggaggtttattccgctgcaaccacccgtgaccaggcgcgaattgtttttgaagacgcgaaaaatatggtcaagaaggctaaagccactcttgggcggatcttcgaattcaacaagctcgctatctaccaggagcaaacggcctccaaattcgagcctttatcatcagatgcgaacaacctcgacggcctgaacattcattgcgccatcgtcgacgagctgcatgctcacaaaacccgtgacgtctgggacgttctggagacggcaaccggcgctcgcctgcagtcgctgcttttcggtatcaccaccgctggtttcaataaagaaggcatctgctacgaactgcgtgactctctttga

SEQ ID NO: 121734 - DNA, 339 bp, Enterobacter cloacae
atggctatcgaaacttttacctggagccccagagtcagtccgacacaaaccgtctcattcaggacgagaagcgccaagtttggggatggctacgagcagatctccggcgatggcctcaatcctcgcagccagcagtgggaactgaattttgttgggactgaagaatacgttcaggcgatcaaaacctttcttgacaggcatggaggaacaaaatcattccagtggaaacctccgcttgagccgcttgggttatatcgttgtgccgagtataagcccactccgatgggaggtgagaactactccctttccgcaactttccaacaggcattcaaaccatga

SEQ ID NO: 121735 - DNA, 711 bp, Enterobacter cloacae
atgcgtcagaaaaccattgatgcaattatggcgcatgctgcagcagaatatcctcgcgagtgctgtggcgtggtggtgcagaaaagccgtgttgaacgatatttcccttgtcgtaacctcgctgcagagccgacggaacatttccacctctcgccagaggattacgcagctgctgaggactggggaacagtgatcgccatagctcacagtcaccctgatgccacgactcaaccgagcgaactggataaagcgcaatgcgatgcaacgcttttgccgtggcacatcgtgagctggccggagggggatttacgcaccatccagccacgcggagaactgccgctgctggagcgtccgtttgtgcttggacacttcgactgctgggggctggtaatgagttatttccggcaaacgcatggtattgagctccacgattaccgggtggattatcattggtgggaaaacgactatccggacaacttctaccaagattgctggtatgagtgcggattccgtgaattcgacgggccgccgaaacccggcgatatggtgatcatgcaggtccaggctgataagtggaatcatgcgggaattctgctggagggaaatatgctgctgcaccacctttacggacacttgagccaacgcgtaccgtatggaggctactggcaagagagaacgatgaaggtacttcgccataaggacctgtgctaa

SEQ ID NO: 121736 - DNA, 348 bp, Enterobacter cloacae
atgaaacttgccttgagcataatattattatcaacatctctgaatttatttgcaggaactgtaaacgattaccttgatcgccactcagaaattaaatctaattcagttgcagccacttacgttaaccattacgcatttatgattgcgatgatggaagcgcaacagaagcataatagatctgacaatgagtttatcaccggattagtttcagacaacggtgatgtatatgcaaagctagcggttaaaaagcttgctaatgactgtttaatacagcgaagtatcggtcaatctggagagttaaataataaagaatgtaatattatgattcgagcgaataaagcggattaa

SEQ ID NO: 121737 - DNA, 591 bp, Enterobacter cloacae
atgcaagaggtaatgacgcgaattgagctaagtggcgagccgggtaaaatttttggaaagatccaccaccgccttatcaataaagtatctgaagctggaacggccctcgctaaaaccattccgggctttgaaagttatatgattagtagtaaaagtcgtggtctaacctttgccgttttcaaagggaagaaaaacataggagtagatgaccttggcttccccgttacaggtgaagtgatcagaattgtacctgtaatcattggggggaaaaaagctggtgtgctgcaaacagttttaggtgctgtgttggtggccgctggtgctgtgcttagcttcactccatgggctgcagcctcaccatttttatataaatttggtgctgcaatgatgctaggcggagttgtacagatgctttctcctcagccatcaggcatagccagcaaacaaagtgcagataaccgcgcatcctatgcattcggtggtgttacaaacactgcggcacaggggtacccggtccctctgctatatggtaagcgtcttatcggcggagcgattatttctgccggaatttatgtcgaagatcagcagtag

SEQ ID NO: 121738 - DNA, 3798 bp, Enterobacter cloacae
atggctacagataaagtgttaaagggccgcaagggcggcagctccagttcacgaacccctaccgaacagcctgatgatctgcaatctgtagcgaaggcaaaaatcctcattgcgcttggcgaaggggagtttgcagggcagctaaccggcaaagatatctacctggacggaacggccctggagaatgctgacggctcccaaaactttagcggcgtgacgtgggagtttcgcgcgggaacgcaggcgcaaaaatatattcagggtattcccggtaccgaaaacgaaatcagcgtgggaactgaggtatcaagcgctacagcatggacgcgcacctttaccaatacgcagctttcagcagttcgcctgcgtctgaaatggccctcgcttttcaaacaggaggacgacggcgatctggtgggttactcggtcaattatgcgattgacctgcagacggacggcggcacatggcagacggtactcaataccagcgtgaccggcaaaacgacgtctggttatgagcgcagccaccgtatcgatttaccgcaagctggaagcacctggacaatccgcctgcgtaagattacctctgacgccaacagcgcgaagatcggcgacacgatgacgctgcagagcttcactgaggttattgacgccaagttacgatatccaaacacagcgttactctacatcgaattcgattcaagccagtttaacggctctatcccgcagatctcctgcgagccccgcggccgtgttatccgcgttccagatacctacgaccctgaaacccgcacttatagcggtacatggaccggtgcgtttaagtgggcatggacggataaccctgcgtggattttttacgatctggttgtttctgaccggttcggcctcgggcaccgtttgaccgctgcgaatattgataaatggacgctttatcaggttgcccagtattgtgatcagatggtaccagacggcaaagggggcaacggtaccgaaccacgttatacctgcaacgtgtacattcaggaccggaacgacgcctacacagtcctgcgtgattttgccgctatcttccgtggcatgacctactggggcggggatcagattgtggccctggctgacatgccgcgcgatgttgattacagctacacgcgcgctaacgttgttggcggtcgcttcacctattcgagcagcaccacgaaaagccgctacaccacagcgctggtttcatggtcagacccggggaacgcttatgccgacgcgatggagccggtatttgagcaggcgctggtggcgcggtacggcttcaatcagctggaaatgacagccatcggctgcaccaggcagtcagaagcgaaccgaaaggggcgctggggtattctcaccaacaacaaggatcgcgttgtttcgtttgatgtcgggctggacggcaacattccgcagccgggctacatcatcgccgtggcagacgagctgctttccggaaaggttatgggcggccgcatcagcgccgttaacggtcgcgttatcaaacttgaccgcgtagctgatgcagcaccaggtgatcgccttattctcaaccttccctccggagcgtcgcagagcaggaccattcaggccgtgaacggtgaatcagtcacagtcaccactgcatacagtgagacgccacaggccgaagctgtttgggtggttgaatctgacgagctttacacgcagcagtatcgtgttgtcagcgtttccgataacgatgatggcactttctcgattaccggcgcatggcacgacccggataaatatgcccgtatcgataccggagccatcattgaccagcggccggtgagcgtgatcccgcctggtaaccagtcgccgcctgacaacatcgtgatcagctcgttttccgtggtgcagcaaaatatcagcgtcgaaacgatgcgcgtgagctgggaccaggcgcagaacgctatcgcctatgaagcgcaatggcgccgcaacgacgggaactgggttaacgtgccgcgcagctccaccacatcattcgacgtcccggggatttatgccgggcgctacctggtacgcgtgcgcgcaattaatgccgcagaaatctcgtccggatggggctattcagaagagaaaacgctgacgggtaaagtaggcaatccaccgaagccggttggcttcatcgcttctgaaaatgtggttttcggcatcgagctgaactggggattcccggcgaataccgacgacacgctgaagacggaaattcagtatagcctgaccggtaccgaggacgatgcgatgctgctggccgatgtgccttacccgcagcgcaaatatcagcagatgggccttaaggctgggcagattttctggtaccgcgcgcagctggtggaccgcagcggcaacgaatcagggtacacagaatgggtgcgaggacaggtcagcatcgatgtttccgacatcacagatgtgatcctggaggaaattaaagattctgaggtattcaaggatctgattgagagtgccgtagaaagtagcgagaaactggccgaactttctgatgcgattaaggagaacgccgatggtctggctgcagcagtaggttcgaataagcagacagcagaagcaatcattgggaacgccctggctattgctgatgttgttgtgcgtcagactgcgcagcagggggctaactctgcgacattcgaacagctccgggaggtgatcgccactgagacggaagcccgcgtcacggatgttactcgtctagaggcgaaaactgcccagaatgaagcgggtattactgatgttcgccaggcgttagcaacggaaactgaagctcgcgcttctgcggtaagtcaattgacggctgccactcaggtcgcatctgacaaagctgattcagcagctgctgtaggtgctcagaatacagcatcaatcactgaccttagccaggttgtcacggacctcgattcctcaatggcatcacgcctggaagagctgggtgcacaaactgataaggccagcggcggtattcagaacaatgctatcgcgctgatcaccagtacgctcgcgcaggttaaccagcgcaacctcctgagcgtccaatatggagataacaaagccagtatcgatcgagtagacaatgtgatgtccgacgccagtaaagctgtcgctgagtcattgcgcgctttggattccagcaccggtgggaacacggcgaatgtcactgacttgtcgaagacacttgctgattttacccaggcgtctgctacgcaaatcaattcgctaaaggtcacggttaacggtcagtctgcagcgattgtccagaacgcgcaggtatcagccgacatcaataataacctgaatgcaatgtacagcatcaaggtagctattgattctaatggcaaccagtacgcagcgggaatgggcattggtgttcagaatacgccatccggcatgcagtcgcaggtgctgttcctggctgaccgtttagcggtaatggcgcaggctggtggggcggtgtcgttgccgttcgtaatccagaacggacagaccttcatccgggatacgttcatccaggacggtaccatcagcaatgccaaaataggaaactacattcagtcaaataactacgttgctggttccgtcggatggaaactggataagtcaggaacgtttgagaactacggctccacagctggagagggggcaatgaaacaaaccaatcagacaattagtgttcgggactccagcaatgtgctgagggtacaaatcggaagaattactggaacatggtaa

SEQ ID NO: 121739 - DNA, 315 bp, Enterobacter cloacae
atggccgaatatggggtccagacatgggacgcttccggaaacgtaaacaactacggaattaaacctgtcagcgtcagtggttaccttcaacttgccgttaatcagaagtcaggctcttattccgtagtgctaccaccaggctgcaagttgacctactttcaggtcatgaatgatgaccaatggggcacagggaggaggaagataacaatctcgggaggaactgcaactgtatcgtctgcgggagataccgattactcagcaggcactgagcccgcgatggcggcatttttaatattccagattgagaaggcataa

SEQ ID NO: 121740 - DNA, 1128 bp, Enterobacter cloacae
atgatttataccactggcactattgccatcagcggaaacacccttacaggtaccggcacaaacttcactgcagctggctcacttattcgtaacggctgcactgttatcgcgctgaccagcccagcgcaggttttccagattaccgcgattggaagcgcaacctctctcaccgttacgccagctgctaaccctgctatccctgctggaaccaaatatgccattcttctgagcgacagccttagcgttgacggtctggcgcaggatatcgctgaaacattcactatgtaccagcgttacatgagcggtttcgctgatgtgatgaacggtactacagacgtcactatcacaattaacggtgtggccgttaccgtgccgggccagaaatcactggcgaagaaaggggctaacagcgatataaccagcctaagcggcctgactaccgcgctcagtatcagccagggcggtacaggtgcaaagaatgctgctgacgctcgcacaaacctcggtttgggaaatgccgccactaaggatgttggccctaatactggtaatgtcttaggtgttggatactttggtttcggaactccaggtattaacgttttaggaagtaccgaatcagggttttatggtattgacggctctggtacttcctgggcgccgcaagcaggatctggaattgtatgcgggtatgacccaactcgccgacagcaaatcttcacaggaatatccggtaatctttttgtaagaaacctcatcgcatctgcaatgaacacctcatcatccacaataccgtggacgcagatgcaggcggttgggacatctgatatcaactttaagaaagatatcactgaacttgatacggaaatcgcgctggcaaacatcgatgcgatggagttcgtatcgttcaggtataaggatgacgacagtgaagcagtacgccgtggtgtaatcgcgcagcaggttaagaagattgatccgcagtacgttcacagtgccgagggtgtgggtaagatgacccttgatctcaacccccttctgatggatgctcttgccgccattaaggcactgagtatgaaggttacagagcttagtcaggaggtcgataagctcaaacaaggctctgagtga

SEQ ID NO: 121741 - DNA, 198 bp, Enterobacter cloacae
atggcaaaactgatacatgcattcagccacaagaccggtactcagaatgtcggttttttatgccatttatccgcgattttcccgtttttaagcagcgcatgcatcaggtgcatgaatttgcattcgttttttattcctgcgtttgccagccagcgccagcactggcgcggctcggggctgatgatgcacctgcattaa

SEQ ID NO: 121742 - DNA, 429 bp, Enterobacter cloacae
atgatagatatcaccagcggtgacaggcatctgaaattaacgccttatgaaagagtgagtgagcccgagataccagcctatagccgtattatggtatgggttgagttctcaattcctgccttaaaaaccgagtttgcagcagagttttttgtcggtcagttagagcaatttaggaatgatacgcagggtttctatcaggccttaaagaatggggtgaaagttaaggatattaatttaacctcagcattcgagcaggttgtgcttaagcttcaccaggcgcattttgccggggctgttggcgtcagcatggaactaaagcctgaaaaccatgctgaaagtattacgcttgagggttccctcgatattgatgaaagttattttcccgacctgctctcaggtctggacgacatcatttcatggcaaaactga

SEQ ID NO: 121743 - DNA, 675 bp, Enterobacter cloacae
atgagcgttggattaattacagacgagcccggacgtttttacaccttccattcaacattaccagccggtgaatattttgaatttcgcccccgcaacccacctctgaactcaaaacccatcgttgatgacgaaagcgggatgtgtattggttattccgtctctcaggctcccggtctatggcaaatttatgatgccgacggcatgtttgtcaggctggaagaagcaccgttagaagcccccctgattgatccaactgacctcgctttaattgcctttggtgtgtttcgtctttttcgtgcgggtcaggcattactggagagtggtgtcaaaactgccgtaacggtgagactcagtgaggccaccattagtctcttgcgtggtcgtctgaaaatgggcttatcagctcgcgcgctcaggatgagtgagtcatcagcaaaacacatgttgaaccccggtcgctatgtgcctttacagattcaggaaaaggccattcgctatggcacacgaacgccggacccactgaaaaagccaggccttttccggtatgaagcgcgtatgtataaacttgttgagaacaagcaaaataaaggctcatatatttacaagtcataccgtcttgaggttttagtcagagaagctgactggactatcatgcattttcagtacatgccgtga

SEQ ID NO: 121744 - DNA, 465 bp, Enterobacter cloacae
atgagcaaaattcatgagttaaaaatcgcaccagagcattttaaagcagtgcaatctggtgataaacgcgctgagtttcgtttcagtgaccgcgattttgcgtgtggcgatgtcctcaggttaaacgagtgggaacaagaaaaaggatataccggaaaacgcgtgtcagtgagggtaacgaacgttaccgatttaacagagtgggtagcaaattatgtaatgttgagtttccagttaatgctggatgactccgactgtggcatgaccatcatgaactggaaagaactaagcgagaaggggctggttttcagaattaatcatgaaattttacacccactagggctggctgttggatatgaaacgactaacggggtttcggctggggctttcgtcgctgatgatggtgtctggcaatattctgatgagctggtcgctcatgcgaaagtaaatgggtggttaagatga

SEQ ID NO: 121745 - DNA, 294 bp, Enterobacter cloacae
atggagttaggtcaaaaacttaaagcagtacgtaaagctgaggggctaacgcaaaaaagtttctgtgaagcttgcgggctggcgctcggtacagtcaaaaattatgaggggggatataaatcacctggattacaagtggttatgcaggtgacaaacacacctaaatttcagaaatacacactgtggctcatgacagataaaaccgccccgcaagctggtcagatcgcgccggctttcgcgcacaatgggcaagatgcaacaaaatcagaccactccgagaagaagattggttaa

SEQ ID NO: 121746 - DNA, 240 bp, Enterobacter cloacae
atgttcgttgaactggtttatgacaagcgaaatgtagagggacttgaaggggccagagagattatcctggcagagctgacgaagcgagtgcaccagatcttccctgatgccgaagtgagggtgaagccgatgcaggcgaacggcttgaatagcgatgccagcaaaagcgatcgggaaaagctgaaccgcatgctggaggaaatgtttgaagacgcaaatatgtggctggtgaatgattag

SEQ ID NO: 121747 - DNA, 285 bp, Enterobacter cloacae
atggttaaccggggcctgaaagaccagattcaagacctgcaaaaccggctcatccaagccgagtcaagagcgtccgagctgatagacactaatgcgcaattacaacgacaaacgcatgagctcgaacaggccaatgcgatgcacaaaagcaccttggataggcaagtggccgatatccagaacttggagcatcaacttaacgacgcctcggcaaaaaaccgggagcggaagcatgaaagcaaacaattggcggataatattgccgcactcgcaagcggggtctga

SEQ ID NO: 121748 - DNA, 333 bp, Enterobacter cloacae
atggatttaaacactgctgcaaacgcacttcgagaactgggccacccgacacgtctcagcatataccgggagctggtcagggcgggtcatgaaggcctgccggttggcgaactgcagaagcaccttgagattcctgcctccacgctcagccatcatctttcagcgctgatatccgctggactcataagccaggaacggcagagtcgtaccctgttctgcaggccctgctatgcgcagcttgagcaattgatggcctttctgacagaagaatgctgcgcaggcggcagctgcagtctgtcacccgcaaagactcccgaagagaccccattgtga

SEQ ID NO: 121749 - DNA, 723 bp, Enterobacter cloacae
gtgaacaacctgactgatgccctgaaaaatatcgatccggccctcctggacgcgccgctgacggaagataagctgaaggccagagagataacgcatccgccccgcatcctgatgctctacggctcgctgcgggcgcgctcttacagccggctgacaacggaagaaggtgcccggctgctgacggccatgggcgcggaggtgaaaattttcaacccgtccggcctgccactgcccgatgatgcgccggagacgcacccgaaagtggctgagctgcgggagctggttctctggtcggaaggcatggtctggtgctctccggagcgtcacggggccatgaccggcatcatgaaggcccagattgactggataccgctgacgtcaggcgcggtccgcccgtcacagggaaaaaccctggccgtcatgcaggtcagcggcggctcacagtcgttcaacgctgtaaatcagatgcgtattcttggacgctggatgcggatgatcaccatcccgaatcagtcatccgtggcaaaagcctgggccgagtttgatgaggatggccgcatgaagccttcttcgtattatgaccgcatagtggacgtcatggaggaactgatgaagttcaccctgctgacgcgcggtcgcagtgattatctcaccgaccgctacagcgaaaggaaagagagtgccgcgcagctttctgagcgggtcaaccagcgcagcatataa

SEQ ID NO: 121750 - DNA, 429 bp, Enterobacter cloacae; identical to SEQ ID NO: 97189

SEQ ID NO: 121751 - DNA, 1284 bp, Enterobacter cloacae; identical to SEQ ID NO: 97190

SEQ ID NO: 121752 - DNA, 354 bp, Enterobacter cloacae; identical to SEQ ID NO: 97191

SEQ ID NO: 121753 - DNA, 1479 bp, Enterobacter cloacae
atgctgctgtcctcgacgcgtaaggactggctgggtaacgtccgtggtgacgtccttgccggtattgtggtcgcgctcgcgcttattcccgaagcgatcgccttttccatcatcgccggagtcgacccgcaggtcgggctctactctgcgttctgtattcccctggttatggccttcctcggcggccgtccggcaatgatatcgtccgccaccggtgcgatggcgctgctgctgatcacgcttgtaaaagaccacggcctgcagtatctgctggcggcctcggcgctgaccggcgtactgcagctggcggccggctacctgaagctgggcagcctgatgcgctacgtctcccgctcggtggtcaccggtttcgtgaacgcgctggccatcctgatatttatggcgcagctgccggagctgaccaacgtcacctggcacgtttatgccctgaccgctgcgggcctgggcatcatttatctcttcccgtatctgaacaaaaccattccctcgccgctggtctgcatcatcgtgctgaccgccatttccatgtggctgcacctggacgtgcgcaccgtgggtgacatgggcaaactgccggacagcctgccggtgtttctgatcccggatatcccgcttaacctcgacacgctgatgattattctgccgtactcggcaggacttgccgtggtggggctgctggagtcgatgatgaccgccaccatcgtggacgacatgaccgacacgccgagcgataaaaaccgcgagtgcaaggcgcagggcgtggccaacatctgcacctcctttatcggcggcatggcgggctgcgcgatgattggccagtcggtgatcaacgtcaaatcgggcgggcgcgggcggctttccacgctcaccgccggcgtggtgctgctgctgatggtggtgttcctgcgcgactgggtgtcccggatacccatggcggctctggtggcggtgatgatcatggtctccatcggcaccttctcctggcgctccatcagcaacctgcgcagccatccgctgtcaaccagcgtggtgatgctggccaccgtggtggtggtggtggcgaccgataacctggcgtttggcgtgctcaccggcgtgctgattgcctcgctgaacttcgccaccaaggtcgcccgctttatggcggtctcctctgagctgaaggacgacacccgcacctataccgtagccggccaggtattctttgcctcatccgatcgctttatgagccacttcgacttccgtgaagcggtggagcgcgtggtgattgacgtaacgcacgcccacttctgggatatcacctccgtgagcgcgctggaccgggtggttatcaagttccgtcgcgaaggcacggaagtggagatcaagggtatgaatgacgcgacccgcaccctcgttgaccgcttcggagtgcatgacaagcctgaagaagtggaaaagctgatgggtggccattaa

SEQ ID NO: 121754 - DNA, 828 bp, Enterobacter cloacae; identical to SEQ ID NO: 95489

SEQ ID NO: 121755 - DNA, 1197 bp, Enterobacter cloacae; identical to SEQ ID NO: 95490

SEQ ID NO: 121756 - DNA, 375 bp, Enterobacter cloacae; identical to SEQ ID NO: 95491

SEQ ID NO: 121757 - DNA, 1182 bp, Enterobacter cloacae; identical to SEQ ID NO: 95492

SEQ ID NO: 121758 - DNA, 333 bp, Enterobacter cloacae
atgaatggatggatgtatctggtgattgccggcatagccgaagtcttttatgccgcgtcaatgctccggactgagggatttacccggatctaccccagtattttttgcctgacatttatcggtgtgagcatgtactttttgtccctggcaacacggactattcctgtaggaaccgcttatgcggtctgggtcgggattggtgctttagggacagcagcgtacggaataatttacttaaatgaagataagggcctgttacgcattgcctgtttcggactgattctggcgggtatcattggcctgaaaattctggcaggacacaagcagctgtag

SEQ ID NO: 121759 - DNA, 558 bp, Enterobacter cloacae
atggcattactgggatatgcaagggtatcaacgagccatcagaaactgacggcgcagatcatggagctgaaatcttcaggcgtcagagatgaccggatttttactgacatgatgtcgggcgccacggacgaacgtgaagggttacaacggctgcttgcccgtgccgaaaaagatgacattatcatgtgtaccaaaatggaccggcttggccgcaacacagcggatatgatccacattgttgatgcctgctataaaaagggaatagccatccggtttctggagaatggactgagtactgaaggcacgatgggtaaaatggtcattcagatccttgctgccgttgctgaagctgagcgggagcggatcctggagcgcacaaacgaaggccgggtcatcgccatggcggcaggcgtcaggtttggacggaaacctcatcacaaatcggccgccgcactggagcttatccggcacgaaacgcccattaaactggtgatggagaaaaccggcatatccagggccacctatttcaggttaaaaaaactgggcccaggcagttaa

SEQ ID NO: 121760 - DNA, 3009 bp, Enterobacter cloacae
atgagtgacggttttctgaccagtgaacagaccgaaaactacggacggtatgccgccgagcctaacgaggttcagctggcccggtattttcatcttgatgaacgcgatcttgtttttattaatcagcgccgggggaaacataaccgatttgggattgcccttcagctaaccacggcccgttttctgggaaccttccagaccgatcccttgcaaatacctcccggcgtccgaaattacgttgcattacagctgaacattcatcgccctgagatcatggcccgatacgcccagagagagaatacccgttgggagcatcaaaggctgatcaggcaacactctgactaccatgattttggcgatttcccctggtcgttcagactgaaacgtctgctttatatccgcacatggctcagtaacgagcgccccggtctgatgttcgattttgccacggcatggttgctccagaataaagtattgttgcccgcagcctcagcgctgacgaggctcattggcgaaattcgtgagcgggcaagcaggcgtttgtggcgcagactggctgcattacctgacagctggcagactgagcaactggccggtctgcttgtcataccggaaggacagcgggtttccgtgatggagcagatacgaaaagggcccgtcaacgtcagtggtccggcctttactgacgcacttcagcgctacacacgcctgcgcagcctggagttttcccggctgaattttgccgggctgcctgcaattcaactccgcaacctggctcgttatgctggcatggcttcggtaaaatatatcgccagaatgccggaggaacggcggctggccatcctgaccgcgtttgttaaagcacaggaaattttggcactcgatgaggctgtcgatgttctggatctgctgatcctcaatatcacgcgttcagcgaagcaaaccgggcagaaaaaacggctcagaacgctcaaagatcttgatcgcgcggcgctacttctggcacatgcatgtacgcttttactggatgataaaatggatgacgcagcgctgcgtcagactattttcagccacgtaccaaagaaccggctggcggaatccgtaggtaaagtcaatgagcttgcccgcccgcaggacacaaatttccaggatgaaatggtcgagcaatatggacgggttaagcgctttctgccagcgatgctgcgtgatttacattttcagtctgcccctgccggcgaaaatacgctatcggccatacattacctggccgaactgagtggttcgaaaaaacgcctcctggagaatgcgcctgagcagatcattacaggtccctggaaacgtctggtgtacgactccgaaggccggatacagcgtgcaggatactcattgtgcctgctggaacgccttcaggattcgctgcgtcgccgcgatatctggctggagaacagcgatcgctggggcgatccgcgtcagaagtttcttcaggggaaagaatggcaggctcagcggatcgccgtatgccgggcgcttggacaccccaccgatggtggaaatgccgttaaacagctggcaaccgaactggacgaaacctggaaaacggtggcctcacgctttgagctgaatgctgccgtgagcatctgtcatcagggtaaatatccgtccctgaccatcagcagtctggaaaaactggaagaaccgcagccgctgattcttctgaacagccgcgtcaggcagctggtcccccctgttgatctgacagagctgctgcttgaaattgacgcccggactggttttacccgcgaattcactcatgtgagtgagtctgaagcccgtgctcaggatcttaacatcagcctgtgtgccgtactgctcgctgaagcctgcaatatcggacatgaaccgctgatcaaacacagtattccggcactgacccgccaccgtctgagctgggtaaaacaaaactacattcgggctgaaacgctggtcagcgctaatgcccggttggtcgattttcagtccacgctggaactgtctgagcgctggggcggcggagaagtggcttctgcagatgggatgcgctttgtcactcctgtaaaaacgctgaactctggccctaacagaaaatactttggctcagggcgtgggatcacctggtacaattttgtttctgaccagtattccggctttcacggcatcgttatccccggtacgttgcgtgactctatctttgtgctggaagggcttctggagcagcagacggggctgaatccggtggagattatgacggacactggagggtccagcgacattatctttggcctgttctggctgctgggctaccagttttcgccccgcctggcagatgccggtgaggcggtattttggcgtgcagataaaaatgcgaactacggggtactggatgagctggcgcggggatgcgttgaactgtcaaagatagaaacccaatgggatgaaatgatgagggtttccggttctctgaagctgggtacagtccacgcctcagaacttgtgggctcgcttttaaaaagttcccgtccgtcagggctggcgcaggcgattatggaggtgggacgggtcaacaagacgctgtacctcctcaactacattgatgatgaagaatatcgtcgcaggatactgactcagcttaaccggggagaaggccgtcacgccgtggcaagggcgatctgttacggccaacgtggtgagattagaaaacgttaccgtgaggggcaggaggatcaactgggtgcgctggggcttgtcactaacgcagttgtattgtggaacacgctttatatgcaggaagcgctatcacatttgcgcagcgctggtgagatcccggaagacgagcatatctcacgcctgtcgccactgatgtacggtcatatcaacatgctgggacattatacgttcacgctgccggaaaatattctgaagggagagttgaggccattaaatttcaattcaaacaatgaattattgccttaa

SEQ ID NO: 121761 - DNA, 348 bp, Enterobacter cloacae
atgaatgcgtactcgatatcgaagctggctgatgatgcttgcgtcagcgtgcatgtcgtgcgcgactacatgatacgcggcttgttgcaccctgctcggcgaaccgaaagtggctataacattttcgatgacaaaacactcggaaggctgcggtttctccgcgcagccttcgagtccggaattgggctcgacgaactggcgcgactttgcaaagcattggacgcagacgatagcgaaagcctggaccgatgcgtcgagcgcgtgcgatggaagatcgacgtgcgtcgaacagttttgactgtcgtcgaggcctctttgaatgaaatggcggccggtgcagctacttga

SEQ ID NO: 121762 - DNA, 639 bp, Enterobacter cloacae
atggacaagactatttattccaaaaagattgccgaaagcctttcatctggcaatcatcctaaagagttcgcaacgctctttgtcgcgctgctccgacagctagcgatggggggacctgtatcacgcgaaaagctcgccggcgcactcggatggtctggagcgagagttgcaacggtacttgagcaggcacctggtacggaatatgacgacgaggccaatatcattggactggggctgacactacgtgaaacctctcacgtttttgaggtggatggccgtcatttgtacacatggtgtgcgctggacaccttgatgtttcccgccttgaccggcaagattgcccgtgtcacttcccgctgcgccgccaccggtaggccgatcactctcaccgttgcaccagaagcagtgcttcatgtcgaaccggcagaagcaatggtttcactgcgaactccggatacttcgcccgacattcgttgttcgttttgctgtcatgtgcatttctttgcgtctccgtctattgcaaattcgtgggcttcgacccaccaagggattgaggtcgtgcctgtcgagagtgcgttcgaccttggtcatgatgtcgcgcttaagctgctagaggactgcgaggaaagcccagtatga

SEQ ID NO: 121763 - DNA, 654 bp, Enterobacter cloacae
atgttttgtgacatcagacttaaattacgccgtgtacgcgcgtgcttgacgatcgtactggcaagtaccgcaacgttaggcatgccaaaccaagcgttggcggcttatgatttttctaagctcggcgccgcgattgaaacattgtcgccagagaccgtcagtgattgggaaaagaaggccagggctggcgatgccatggctcagaacatcatgggtcttgcgtacaaatgcggtatgggcgtaaagcaaaaccacgcggcatcgatccagtggttccgcagggcggccgagcagggtgaagccgatgcacagttcaacctcgggcgcctctacggaagtgaagtcgacggtatgtataagaatgggcgtgcggctcctgccaacgatgcagaggctttcaagtggtaccgcctcgctgccgagcagggacacacgcaggctcaagtcaggctggcccagctgtttgcaaagggtcttaccgacatcgcgcccgaccaggtgcaggcataccagtggatgagtctggccgcagcgtcgggagaaccgacagcagcaaaagtcgttgcagactatgcagctcaaatgaagcccgaacagttacagcaagcccagctgctggccgaggaatggcaacgccggcaaggcacaaagtaa

SEQ ID NO: 121764 - DNA, 1710 bp, Enterobacter cloacae
atgcaagagttaaacgaagttggtttgagcgtggcgggaatgacttgcccaagttgtacaaggcacgttgaggacgcgctgctggcggtccccggcgtaacgcgagcggctgtcgattatccatcgaacaaggcgcaagtcacaggcaataggcttgacgtgtccgcgctcgtagcagcagtgggcgcccttggttacggtgctacgcctacagacgaatttgaaagcaaagagcgcagtgttgaacagccaggactccttggcaaagccgcccagtggctgagcggcgagcgcgcggtggagaaaccggcaggtcagctgcatgtggcgatcatcggtactggcggcgccgctgtggcagcagcgctgaaggcagctgaaaacggtgcccgtgtcaccctgatcgagcggggaactatcggcggcacctgcgtcaacgtgggctgcgtcccttctaagatcatgattcgggcagcgcatatcgctcatctgcgacgcgaaagtccttttgacgtgggactgtcggcaacgcccccagttgtcctgcgtgaccgtctgctggcgcaacagcaggcccgtgtggacgagctgcgtcatgctaaatatgaaagcatcctcgaaagcaatccgtcgatcaatctggtgcgaggcagcgcccgattcaaggatggccaaacgcttatcgtggaagcggcagaaggtgacactcgcgaagtggccttcgatcgctgtctcattgccactggtgcaagcgctgccatcccgccgttgcctggtcttgcaggaacgccatattggacgtccaccgaagccctggttagcgaagccattcctaaacggctggcagtaattggcgcctcggtcgtagcactggaactggcacaagcgtttgcgcgcttgggcagcgaggtgacggtcctggcccggcgcaccttgtttgccagtgacgaccctgccattggcgaggccgtgactgcagctttccgtgcggaaggcatcacggtgctgacacagacgcaggcgagtgccgtgacctattgcgaccgccaattcatcctgacgaccgcgcagggcgagttaaaggtggatcaattgcttgttgccaccggccgcacgccaaataccgcaagcctgaatctcgagcgcgcaggtgtgacgtttgactcgcaacatcgcatcctgatcgatcaaggcatgcgcacgagtgcttcgaacatttacgcagctggcgactgcactgaccagcctcagtacgtctacgttgcagccgcggctggtacccgggctggcattaatatgaccggcggcgacgtaaagctcgatctcgacgccatgccggcagtcgtgttcaccgatccgcaagttgccacggtaggctacagtgaagcagaggcccagcgcattggtctgcaaaccgaaagccgtacgctcacgctcgacaatgtgccgcgtgcactcgccaacttcgatacccgcggctttatcaagcttgttgctgaggcagggtccggacgcattctcggagtccaggctgtgacaccggaagcaggcgaaatcatccagactgccgcgattgccatccgggcccgcatgaccgtccaggatctggctaaccagcttttcccttacctcaccatggttgaaggtctcaaactggtggcacagactttttcgaaggatgtgacacagctatcgtgctgtgccggctaa

SEQ ID NO: 121765 - DNA, 276 bp, Enterobacter cloacae
atgaagaaactgtttgcctcccttgccctcgccgccgctgttgccccggtgtgggccgccacgcagacggtcaccttggccgttcctggcatgacctgcgcgacttgtcctatcaccattaaaaaggccttgagcaaggtcgacggtgttagcaagaccgaggtcgacttctcaaccaagcttgccgtcgtaacgtttgacgatgcgaagaccaacgtccaggcgcttagcaaggcgacgacggatgtaggctacccatctgagctgaagaagtaa

SEQ ID NO: 121766 - DNA, 351 bp, Enterobacter cloacae; identical to SEQ ID NO: 10325

SEQ ID NO: 121767 - DNA, 435 bp, Enterobacter cloacae
atggaaaataatttggaaaacctgaccattggcgttttcgccaggacggccggggtcaacgtggagacaatccgcttctatcagcgcaagggcctgttgccggaaccggacaagccttacggcagcatccgccgctatggggaggcggacgtggttcgggtgaaattcgtgaaatcggcacagcggctggggttcagtctggacgagattgccgagctgttgcggctcgacgatggcacccactgcgaggaggccagcagcctggccgaacacaagctcaaggacgtgcgcgagaagatggccgacttggcgcgcatggaaaccgtgctgtctgaactcgtgtgcgcctgccatgcacgaaaggggaatgtttcctgcccgttgatcgcgtcactacagggcgaagcaggcctggcaaggtcagctatgccttag

SEQ ID NO: 121768 - DNA, 147 bp, Enterobacter cloacae
atgtctgacaaaaaccattatacgacatgggaagaattgcttgaggagtacttcttcgcccgaaacctgcgcgctgcaacagaatggagctacgcaaaggttgtaaaggggtgtgtagagacattaaagttgtatcctttaacctga

SEQ ID NO: 121769 - DNA, 1779 bp, Enterobacter cloacae; identical to SEQ ID NO: 108017

SEQ ID NO: 121770 - DNA, 153 bp, Enterobacter cloacae; identical to SEQ ID NO: 108018

SEQ ID NO: 121771 - DNA, 846 bp, Enterobacter cloacae
ttgacgctggcacgcctgcgcgagtgggtcagggatttgcaggtccgctacggtgccagtgagagacaggtctgttttgcgctgcgggtcagccgtagctcgtttcgctatcgttctgtggccaccgacgacagcgcactgcggctgcgcatccgcgagatcaccgaaacccgggtgcattacggttaccgccgggtacacgtgatgctcaggcgggaaggctggcgcgataaccacaaaaggatttaccggctttacagcgaacaggggctgtcgctgcgcctcaaacggccacgccgcaataaatctgcacagcgccgccagccgcagcctcagggcctgtatccgaatcacgtctggggcatggattttgtctctgatgcgctgtttgacgggcgacgactgcgcctgctgacggttatcgacctgtatactcgcgaatgcctggggatctgcgtggggcagaatctgcgctcagcagaagtggcagaaatgctgaacagcatagcgctcagacgtcctttacctcagttgctgaaaaccgataatggttctgaatttgcagggaaaatgctggacaggtgggtatatgaacgagggatcaggatcgacttctcacgcccaggaacaccaacggataatgcgacggtggagtccttcaacggcaggctccggcaggagtgtctgaacgagagctggttcatgtctctggaggatgcacggtgcaaaatcgaggcctggcgcatacactataaccagagacgtccccattctgcgctgggctggatgacgccgtcagaatttgctgagaagtctgccggttgccaggatatacaaccaacatga

SEQ ID NO: 121772 - DNA, 267 bp, Enterobacter cloacae; identical to SEQ ID NO: 108019

SEQ ID NO: 121773 - DNA, 684 bp, Enterobacter cloacae
atggctggcatgattaaccacgaaaaagcctttgttaagttgttcagtcagacggcccggtatcatcaccggtttaaagtgttcgaagacttcatcagctgcagcgtcatcgcgctggaaaaccggctttgcttcagtgaagcccgggagcagaagtatttgcgtatagtcggtggatacgaaaaggaggacgtcacgcgcatggcgcagctgctggcccacgttgttaacgggctgggtgaagcacccggggacttcctgggccgcgtcttcatgcagctggagctgggtgacaagtaccgggggcagtttttcacgccctgggatgtggccagaatgatggcggccatgcagctgggcgacactgaaacgctgttccgggatagaccctttatcacgctgagtgaacctgcctgtggtgctggttgcatggtgctggcgtttgccgatgttctgcgaaaagcgggctggccaccacaccgttatctgtgggtttcagcaacagatatcgatccgcttgcggccggtatggcttacatgcagttatccctgagtgggatcgccggagaagtagtggtaggcaatactctggcgaatgaacgacgccggatactctatacccccgggcattatctcggtggctggcctgtccgtctgggttcacggcactttcaggctgcataa

SEQ ID NO: 121774 - DNA, 366 bp, Enterobacter cloacae
atgtacgcagacgtttatacgcttaaaacaccactggacacactcagctggctttgcctgcttgagagtgaactcctgagcatcagggcattccagcgtctcgatcttcatacagaccgggatgaaccgaatgaactgacgtatctggaagatgccattattaacgccggcacagcttatggctggtttgtctgttttctcagggacggtgatattccgccgctgcctgccactgccagacaacttctctgcacactggacagtctcggtaaagaaattaaccggcctttctgggagcaggctgtgacccgcgggcaggatgaggcttgtggtgacaaagctatcgcggtcctcgaaatgatgtaa

SEQ ID NO: 121775 - DNA, 210 bp, Enterobacter cloacae
atggagaaaatcaccacgtttatcgcctactggctggccgtcgcgctggcgtacctcggcgcaatatcgcccgaaaagatggcgctttacgtgggcggcggatgcgccatttttaccgcgctgacgaattactggtttaagcgcaaaacgtacctctatctgacgtcactcggactcgacaagggggctattcgtgaaatcaatcgttaa

SEQ ID NO: 121776 - DNA, 1686 bp, Enterobacter cloacae; identical to SEQ ID NO: 14371

SEQ ID NO: 121777 - DNA, 258 bp, Enterobacter cloacae; identical to SEQ ID NO: 14370

SEQ ID NO: 121778 - DNA, 129 bp, Enterobacter cloacae; identical to SEQ ID NO: 14369

SEQ ID NO: 121779 - DNA, 1965 bp, Enterobacter cloacae; identical to SEQ ID NO: 14368

SEQ ID NO: 121780 - DNA, 732 bp, Enterobacter cloacae; identical to SEQ ID NO: 75878

SEQ ID NO: 121781 - DNA, 531 bp, Enterobacter cloacae; identical to SEQ ID NO: 14377

SEQ ID NO: 121782 - DNA, 180 bp, Enterobacter cloacae; identical to SEQ ID NO: 14376

SEQ ID NO: 121783 - DNA, 378 bp, Enterobacter cloacae; identical to SEQ ID NO: 14375

SEQ ID NO: 121784 - DNA, 300 bp, Enterobacter cloacae; identical to SEQ ID NO: 14374

SEQ ID NO: 121785 - DNA, 264 bp, Enterobacter cloacae; identical to SEQ ID NO: 14373

SEQ ID NO: 121786 - DNA, 420 bp, Enterobacter cloacae; identical to SEQ ID NO: 14372

SEQ ID NO: 121787 - DNA, 2100 bp, Enterobacter cloacae
atgctggccgttatcatccgtgacgccagaaagattgggcagaaaaaacggctccgctcgctgaaggatctggataaatctgcattggcgctcgccagcgcatgttcgtacttgctgaaagaagaaacaccggacgaatcgattcgtgctgaggtgttcagctacatccctaggcaaaagctggctgaaatcatcacgcttgtccgtgaaattgcccggccctcagacgataattttcatgacgaaatggtggagcagtacgggcgcgttcgtcgtttcctgccccatctgctgaataccgttaaattttcatccgcacctgccggggttaccactctgaatgcctgtgactacctcagccgggagttcagctcacggcggcagttttttgacgacgcaccaacggaaatcatcagtcagtcatggaaacggctggtgattaacaaggaaaaacatatcacccgaaggggatacacgctctgctttctcagtaaactgcaggatagtctgagacggagggatgtctacgttaccggcagtaaccggtggggagatcctcgtgcaagattactacagggtgctgactggcaggcaaatcggattaaggtttatcgttctttggggcacccgacagacccgcaggaagcaataaaatctctgggccatcagcttgatagtcgttacagacaggttgctgcacgtcttggcgaaaatgaggctgtcgaactcgatgtttctggcccgaagccccggttgacaatttctcccctcgccagtcttgatgagccggacagtctgaaacgactgagcaaaatgatcagtgatctgctccctccggtggatttaacggagttgctgctcgaaattaacgcccataccggatttgctgatgagtttttccatgccagtgaagccagtgccagagttgatgatctgcccgtcagcatcagcgccgtgctgatggctgaagcctgcaatatcggtctggaaccactgatcagatcaaatgttcctgcactgacccgacaccggctgaactggacaaaagcgaactatctgcgggctgaaactatcaccagcgctaatgccagactggttgattttcaggcaacgctgccactggcacagatatggggtggaggagaagtggcatctgcagatggaatgcgctttgttacgccagtcagaacaatcaatgccggaccgaaccgcaaatactttggtaataacagagggatcacctggtacaactttgtgtccgatcagtattccggctttcatggcatcgttataccggggacgctgagggactctatctttgtgctggaaggccttctggaacaggagaccgggctgaatccaaccgaaattatgaccgatacggcaggtgccagcgatcttgtctttggccttttctggctgctgggataccagttttctccacgcctggctgatgccggtgcttcggttttctggcgaatggaccatgatgccgactatggcgtgctgaatgatattgccagagggcaatcagatccccgaaaaatagtccttcagtgggacgaaatgatccggaccgcaggctccctgaagctgggcaaagtacaggcctcagtgctggtccgttcattgctgaaaagtgaacgtccctccggactgactcaggcaatcattgaagtggggcgcatcaacaaaacgctgtatctgcttaattatattgatgatgaagattaccgccggcgcattctgacccagcttaatcggggagaaagccgtcatgcagttgccagagccatctgtcacggtcaaaaaggtgagataagaaaacgatataccgacggtcaggaagatcagttgggagctctggggctggtcactaacgccgtcgtgttatggaacactatttatatgcaggcagctctggatcatctccgggcgcagggtgaaacactgaatgatgaagatatcgcacgcctctccccgctttgccacggacatatcaatatgctcggccattattccttcacgctggcagaactggtgaccaaaggtcatctgagaccattaaaagaggcgtcagaggcagaaaacgttgcttaa

SEQ ID NO: 121788 - DNA, 309 bp, Enterobacter cloacae
atgaatgatcgtaaacgcgctactgccgcgttcattgatattgatgccctgttacaggacacctggctacaggtgatcagtctgcgtcacggcccgacattccaggacggggaagggcgtacgctttgggagcgctgcattgatgatgtcgggcgtgtgcagcgagaactgaaagcgagcgaactcgatgaagccagctgccagcatattcttacggcacagtgtgcgctgcttgatgaggcagtcaaaggtcgcggtgtggaggatgacgcctgtatacagtggtatgacattcccctatcaggctga

SEQ ID NO: 121789 - DNA, 1305 bp, Enterobacter cloacae
atggtctctccccagcacttccagcaacaggccgcctatgcggcctggtctgcggaatgtatcgcccgactgggtctctcccatccctggggggggattaatgccactttcgaaccggatgtactgaagttgggccgtctacaggcccgtcatctgcacctccggttccctgacgggacattaatcgatacggataatgctgacgacctgccaccggtgctggcgcttgagagtgaaacacaggacgtggtggtggttctggctcttccgctgctgcgcgcgaatggtggcaactgccttaagcccgatgaggtggccgcgcgtcctgttcgctatcgccagcgctggcgggatgtccgcaacctttttggcgatgacacccgtcagattgcagtgatgcggccagagctgacgttgcgatttgcccatcagaacaacagcgattacctgacctgtccggttgcccgcctgcaacaagattcgcaggggaactgggcacttgatgagacataccttccgccgctgctggcgttgctgggcagccgctggctgatgacccagctggagcaactgttgacgcaactgcgcgcccgtctgggccgcctgatggacatgcgccgggaaagtaatgagcgcatggcggattttgccgtagccgatgtttcattgttctggctgctcaatgccctgaacagtgctgagcccgtgctgggtcagtttcagcgccacccgcaaagcccgcctgagcgtctctatccggagctggcaaggcttgcaggcagcctgttgacattctcgctggagcatcaggtcagtgcgatcccggcatggcagcatgagcaactgaataacgtcttcccgccgctgtttgatttacttggcgatcttctggaagccagcctgccgtcgcgggtggtggcgattgagcttgagcatgatgaccggcttcacttctggcaggcccgtctgcatgatccacgtctgcgcgaaggcgctgattattacctctccgtgcgttcaccgatgccggtggcacaattgcaggagcagttcccgcgccagtgcaaggtcggcagtcccgatcatgtcaggagtatcgtcaattcatcgcgggtgggcgtccctctgatgccgctgcgccatgtgccggcagccattccactgcgtctggaaaatcagtatttcagccttgatgtctctcatcccctggccatcgaaatgttccagagcggcacctgtatgttttacgttccgggaatgctcgccgagcctgaacttgaactctttgcggtactgagaacatga

SEQ ID NO: 121790 - DNA, 123 bp, Enterobacter cloacae
atgacgatattactctgggttggtggtggtctggctgcatggtgcctctttggcttttgctggctcaggctgtttgccggtgatgaaactgaaaaagactatgaagaatgcccctacgattaa

SEQ ID NO: 121791 - DNA, 516 bp, Enterobacter cloacae
atggatacgtttattaatccagttatttataaatacgaacacattgaagtaagcggaataatgcgtaccggactttattttcatgatgagcatggccgggactggtacgaaactttaaccggctggaaaggtgctgtttctctggatgatgacgggattgtcgtggcttacgagcaggatgtttcgtatatggggatggaagaaggccgcaatgtctatgaggtcgaccccctgagtgtgccggtagatgtgttagggaattacaaatatgtggatggtattttttacgatatccgccctgatgcgacgacgcttgccgaacaaacccgaaaacagctcattgaagatgcggggctgataatttcagtcctgcagggcgcagtcgatgagtcgatggctactgatgctgaaaaggccagcctatcagcgtggaagaaataccgggttttactttacagagttgataccagtaagcccgaagaaattgaatggcctgagctaccaccgaagaattaa

SEQ ID NO: 121792 - DNA, 1842 bp, Enterobacter cloacae
atgacagtgaaatacaaaacggtcatcaccaaagccggtgcggaaaaactcgcggcggcgaccgtcccgaacgggaaaaaggtgaattttacggcgatggccgtgggtgacggtggcggcacgctgccggtgccagaccctaaccagacaaagcttgtcaaagaggtctggcgtcacacactgaacaaaatcagccaggacaggaaaaataaaaattatgtcgtggcagaactgcttatcccgcctgaaaccggcggtttctggatgcgcgagctcgggctctatgatgacaccggcacgctgattgcagtcggtaacatggccgaaagctacaagccagcgctggcagagggctcaggccgcgcgcagaccgttcgaatggtcatcatggtgagcgacatcgagtcagtcgagctgaccattgacacctcaacggtgatggctacgcaggactacgttgacgacaagctcgcggagcatgagcagtcccgccgccatcctgacgccaccctcactgcaaagggtttcactcagctaagcagtgcgaccgacagcacgtctgaggcgctcgcagcgacgccgaaagcggttaaggcggcgtatgaccttgccaaagggaaatacacggctcaggacgccaccacggcgcaaaagggcatcgtccagctcagtagcgagaccgacagcacgtctgaggcactggctgcgacaccgaaagccgttaaagccgcaaatgacaatgccgctgcagcaaataaaaatgccagtgagcgagtcagtaaatctggcgacagcatgaccggaacgttaaatcaggactcagtagcgcaggcaacctataacctgacggcactttccaacgctgttacaggtaataaaaattatctgcgtaaaatgcgcggtggcgggacggatactatctggcatgaaaccgttcagggtggcgagtatcgtctggcgacagggagcactgatgcacaggaagagctggcaataagtaccagcgccggtgtcagaacgcgagggaatttcacctcgcaaactggcgggttttattcaggaaacgccaaaaagttttcctttgtttcttcaaatacttctgacaaaaatgccaccttgcgcctttgggggaatgctgaccggccaacagtagttgaattgggggacgacaccggctatcacctttattctcagcgaagtaaagatggttcgttacaatttcagtataacggcgcagggctatttagcggttatttacgcgcaggcggggaagtgcaatcaagttcggccaatagttaccgcatagcatatggcgcttttgggacgttctggcgaaatgatggcggaagcctttatttgatgctgacaaacaaagatgacccgtgggggaattacaacgccctgagacctttccgggtaagtctcaataacggtgaagtaataatcagcaaactcaatttatctgacttcggatattttgatgcgcgttattatactaaagcacaatctgatgcgggctatatgcccaagactggcgcatacacaaaagccgagtctgacgggcgtttccagccgaaagggaattacacccctgcaggtcaggcgtatacaaaagcagagtcggatgcgcgttatggggtggtaaatggtattcgccgtggtggtcaacaaatcagaaacccgactgatgcgtggtttggcaactgggagtcacctgccggttgcgtagtgacgggtattcaaatggacggcagaagtgatggccgaaaactaggggtatatttccgtcaaatgcagtacctgaacaagcaaactggcgcatgggttaacattggggattaa

SEQ ID NO: 121793 - DNA, 531 bp, Enterobacter cloacae
atgaataatacccgactgttgccggtgggctcgtcgccgcttgaggtggcggcggcgcgcgcctgcgctgaaatcgaaaatactcccgtccccctgcgccgactctggagtcctgacgactgcccggcaaatctgctgccatggctggcgtgggcgttttccgttgaccgctgggatgagagctggccggaggctacaaaaagggacgtgatccgcgcggcgtggtacatccacgcacacaaggggacgattggcgcagtgcgccgcgtggtggagccgctcggctatctgattaacgtctctgagtggtggcaaacaaacgacccacccggcacgtttcgcctcgatatcggcgtgttagagacgggcatcaccgaggaaatgtactacgaaatggagcggcttattgccgatgcaaagccagccagccgccatttaatcggcctcaatattattcaggacattcccggctatctgtacaccggtgccctgagctatgacggtgacatcatcacggtttaccccggataa

SEQ ID NO: 121794 - DNA, 909 bp, Enterobacter cloacae
atggcaattgttgacctgagccagctcgccgcgcctgacgtcgtggaagaactggactatgaaaccatcctgagcgagcgaaaggctacgctcgtctcgctttatcccgaggaacaacaggaggccgttgcgcgcacgctgatgcttgaatcagagccgattgttaagctgctggaagaaaacgcctaccgggaagtaatctggcgacagcgcgtcaacgaggccgcgcgcgcggccatgctggcctacgccactggcgcagacctcgaccaaataggcgcaaattacaacgtcaagcgccttgttatcatgcctgcagacgacaccacgttaccgccaacgcctgccgtgatggagtcggacacagactatcgtctgcgcattcaacaggcatttgaggggctgagtaccgcaggctctgtcggctcatatcagtttcatggccgcagcgctgacgggcgtgtcgccgatatttcggtcatcagtcccgcgcctgcgtgtgtcacggtcacggtgctgtcacgcgaaaataacgggatagcttctgacgagctgctcgccatcgtgcgcaccgcgctgaacgatgaggacgtcaggccggtcgctgaccgcgtgaccgtgcagtcggcgaacattgtcgactataaaatcaccgcatcgctttacctttatcccggtcccgaaagtgagccggtactcagtgcggcaaaagcaaagctgcaggcgtatatcaccgcgcagcaccggctcgggcgtgatatccgcaaatctgcaatttatgccgcgctccacgtcgagggggtacagcgcgttgagctggccgcgccggtggccgacatcgtgctcgatgacacgcaggcgtcatggtgcaccgagtacagcgtgaccatcgggggcaacgatgaataa

SEQ ID NO: 121795 - DNA, 351 bp, Enterobacter cloacae
atgacggtgcgttatctgggaatgaacagccagaccggcctcagtatctctgaggttgagcatatccggcaaagcgtgcgcgacattctggtcacaccggttgggtcgcgcgtcatgcgtcgtgaatacggctcgcttctgtcgcaaatgattgaccagccgcagaccccggcgctgcgcctgcagattatggccgcgtgctattccgcgatccagaagtgggagccccgcgtaaatctctcgaccatcacctttgaacggtcggagaccgacggtgggctgtatgtcgacatcaccggcacccgctccaccggcggccagcctttttcactcaccattccactgagttaa

SEQ ID NO: 121796 - DNA, 642 bp, Enterobacter cloacae
atgaatacactgaacagtctacaagaaatcgcacgcgcgatccgcaaccttatccgcaccggcatcgtgaccgacgtcgaccacgacgaggggctttgtcgtatccagaccggcggtatggaaaccacctggctgaactggctaacctgccgcgccggtcgctcgcgcgtatggtgggctccatccgttggcgagcaggtgcttttgctggcgatcggcggcgagctcgatacggcatttgcgctgcccggtattttctctgatgaccatcccgcgccgtctgcctcccctgatgcacttcatgtttcctttcctgacggggcggttattgagtacgagcccgaaaacggcgcgctcactgtgtcaggcatcaaaaccgcagacgtcaccgcgtctgagtccatcacggccactgtgccactggtactggtgaaagcctcgacccgcatcacgctcgatacgccggaggtggtgtgcaccaacaagctgacgaccggcacgctcgaagtgaagaacggcgggaagatgagcgggaatatcgagcacaccggcgggacactgaaatcaaacggcgtgcaggtggataaccacgcgcacggcggcgtcgaacggggcggaagctggacggagggcatcaaatga

SEQ ID NO: 121797 - DNA, 732 bp, Enterobacter cloacae
atgaattggctgattcctttaaatcaaaaaagcacctccggtgcattcaatgtaaatttcttagtagaagaaaatggtatatacattagcgataaccaccgaactgctctttggtgctggatgcagcacttaaagccgaatcaggatattgctttgttccatattgacaggcactatgacacttttcctttgcatgggccttacgctgcacaatttccgggcgtttttaatttaaactctcttaaggattacctaggcctaacagtcaaatctaacaaccaaaactcgcctttaattcgatgggataattacctttcttacttcatttctgacagcgcactacaaaatcacatcgctgccatatactttgcaacccataaagacggcacatatcctaacaaccctttccagcactgcttcgaaaacgttgagccttacgaactcttggaagctttagaaagtgctattaacaaccatgaaaaaatcattatcaacattgatcttgattacttctttactgacaaggacgagaaatattttaggtttatcgacaccaagttcatccagaatctattcaaaattttgaacgaaggcatgaaaacaaaaaaaataacctgcatgactatatgcctaagccctgagtgttgtggtgatcaaaatggtaattggagcaattcagaaagcgtattacaaattgcaaaaacagagctagggttaaacttcatactttaa

SEQ ID NO: 121798 - DNA, 450 bp, Enterobacter cloacae
atgagtgaatttaagccctttgacgaccggctcaatggtctgattgctgccctgtcaccggcagcgcgccgcaagctggccggggagattgcaaaggagctgcgcaagtcgcaacagcaacgcatcaagctgcagaaagccccggacggctcaccgtatcaggcgcgaaaacgtcagccgctcagggcaaaaaacgggcggataaaacgggcgatgttccagaaactccgcacaagccggtacatgaaagccactggtcacgaaaacagcgcgatggttgaattcaccagcaaagtgcagcgtattgctcgggtgcataattacggcctaaaagaccggccaaaccgcaatagtcgggatgtgcagtacgaggcgcgcccactcctcggtattccctatgacgataccaagatgattgaaattgttataataaagaatctaagtacttaa

SEQ ID NO: 121799 - DNA, 468 bp, Enterobacter cloacae
atgaagaaagcacgcagcctgcgcgaagcgctgattaaagccgtcccgcagcttgaaacaaatcccgaaatgatgcgcatatttgccgatgaggggaatatcgatgcgcgtctcgcggccaccctgtcgcatgagaaaatttacaccctgaatgtgatcgtgtgtgactttgtgggcgaccctgacctgattttcgtgccggtggccgcatggctcagggaaaaccagccggatatctgcacgctcgatgacgggcgcaaaaagggctaccgtttccagatggatttaaacgacggggacagcgtcgatatcagcatcagcctgcagctcaccgagcgcaccctcatcaaagaggaaaacggcgcgctgcacgtaagctatgcccctgagccgccgctgccggagcccgtcgcccggccaaaggagctctatatcaacggcgaactggtgagcaaatgggatgagtga

SEQ ID NO: 121800 - DNA, 159 bp, Enterobacter cloacae
atgccgggaagcgacccggccactaatggcgacctgagcgccgatattcgcaggcttgagcacgcgctcgccgcgtgcgcgctgcaggttgaaaccgtcaaagactgtcaggataaactcgatgaagaaagcacgcagcctgcgcgaagcgctgattaa

SEQ ID NO: 121801 - DNA, 426 bp, Enterobacter cloacae
atgaaagtgatgttgtttttactggccgcgcttattgcggttgtgctctggcagcgtcatgaaaacggcaacctgacgcgctcgtttgaacgggcaaacagggtcgctacggaacaaaaaaccgcgatcggaatgctgaaaaatcagctttccgtttcgcagggtattgccaggcgaaatgaaaccgcgcaggtcagtttacgcggcgaactgctggccgccggtgcgatggccgtgcggcgtgaagaaaccattacgaggctgataaatgagaatgaaaccctacgccgctggtatagcgctgagctgcctgatgttgtgcgtcggctgcacacccgcaccgcctgcgcctccgccggtcattgtttacagcgcctgcccgaaggtgagctattgcccgatgccgggaagcgacccggccactaa

SEQ ID NO: 121802 - DNA, 510 bp, Enterobacter cloacae
gtgaaatcaatcgttaaaaaatgcagtgtggccgccgtgctggcgctggcagcactgatgcctgactttcgtctgcttaacacctcgcccggggggctggcgctgattgccgacctcgaaggttgtcgcctgacgccttaccagtgcagcgcgggagtgtggacgtcgggcatcggccacactgcaggcgtcgtgccgaaaggggaaatcaccgagcggcaggcggcggcgaacctcgtcgcggatgtgctgaacgtcgagaaacgtctggcggtctgcgcgccggtgaaaatgccgcagcacgtttacgacgcgctggtcagtttctcattcaacgtgggaaccggcgcggcctgccggtcgacgctggtctcgtatatcaaacgccagcaatggccgcaggcgtgcgaccagctcacccgctgggtttacgtgaatggcgaaattaacaaggggctggaaaaccgtcgcgcgcgcgagcgtgcctactgcctcagggggattgaatga

SEQ ID NO: 121803 - DNA, 744 bp, Enterobacter cloacae
gtgcgcgtgtcgagcgcgtgggcgggccagggctacggcggggtgcagatcccgcgcgtgggcgatgaggtggtggtggactttatcaacggcgacccggaccgtccgatcattaccgggcgcgtgtacaacgacgcgagcatgccgccgtgggcgctgccggctgctgcgacgcagatgggttttatgagccgcagtaaggatggccacaaagataatgccaatgccctacgattcgaggataaggctgggcaagagcagatctggattcatgctgaaaaaaacatggacaccgagatcgagaactgcgagacacatgacgtaggggtagaccgtaaaaaaattatcggccgggatgagcacgtaacggttaagcgtaaccgggacgtgaacgtgggggcgaattcaaccagcaacacgggtaatcagcacaaattcaatgtaggtaaaaaccaaaccgtattgactatggataaagagggaaatgctctgctggaagcgacaacctcgattaagttaaaggtgaatgataactacattcttatcacgccatcgacaattgaaattatcgtttccgaagggacactcaaggctgagagtattactgtggcatccttcaaagggacggagttgacgaagttaggcggcggaataaatgccgagatgaaagctaatgatactcttcatctcaatggtacaaacctgacagatattaaaggcgctgttgttaaaattaacagctaa

SEQ ID NO: 121804 - DNA, 1071 bp, Enterobacter cloacae
atgggacagcctgccgccagagcgaccatagatgtcagcgcacattcggggccaatacagtcgggaagcccggacgtcatcatcggtggttttcccgccgctcgaaagggtgatacgttatcctgctcgacgcacggcagcggtattattgtggggggctccggtactgtcttcgttaacggtatgccacttgcacgtcaaggagacaagacgaagtgtgatgttagcggctcaccggcacctgccataccgaaagcagcagcacctcaatattgggggggcacgctggcgaaaaatgccggcgaagatgggatgatgcacggcgaacattttgatgctcgtgttctgggtgcgtacgccagcctcgaagataaaaacctcaacggtgattttgataccgcttcagctggttttgcgttggcggatattacaattgggaatatgaaaagtaaggatctgctacgggcagaaatgcgtaataaactcgccgtcgccaatgcgacggggtctctgtatggtggcggcaacgatatttatggcttgaatgcgaatgccgctgcgacaggtgagcaatacggtggttcggttgctgcgggtaaagaaggaacgttgtatggtggagtatcaggggatataactattggtacagcagaagctaaagccgtattagaagtttataccggcaatgatgggaagtatggtttgactgctgacgccggtgcggaagcgaaaggagtgaaaggcgaagtttcgggtaaccttgatattctgggcatcgtttccggagaagcaaaaatcgacggtagctttgggtctgctggtctcgcgggaggtggaagcgctttctgggacactaaagattattccgttaacgtcagggtgactggtggggctgcagggcttgtagggcttaagggtgatgcaagtctgaaagtggcatttaagcctatactggatttctttgactatttgtatggcgaagaggatgagccagccgtcacctctgttccgacagaaagcggggatgggacaattattaccgggtgtgttactgttttgataggcgattaa

SEQ ID NO: 121805 - DNA, 447 bp, Enterobacter cloacae
atgaaatgggctggcttaacgatttttattttaatcactttgatctatatctggaatggaaaagatctgtatacaaaagaagaatggcgtggctttggaataaaattcatttcagtactgattggtgcatttgtattggtcattgttttggttggcttttctaagttcatcccgttgcttaccagagaaactgcacgatcattatcagtaataataccagcttcctttatggcagtgcttctgtcgaagttttttgtcgtgatgttgaataatattttcgatattattatgcgattccacaagcgctataacactgcagcaaactatacaaaattattatcactatctggtaagtatggggcaaaattacgcctggtagtaaagtgtctagcctcgttaggctgtatcttaatgttctatggtatctggtttggcagcactgtctga

SEQ ID NO: 121806 - DNA, 1074 bp, Enterobacter cloacae
atgaacactggtaataattatgcttttcccatcgtctcaaccgcaagcaatgaagagattaaggcgaactactggaaatgcctgtatacctctgctgataaaaaaatgcttcagtactgggtgattttgccaaatcgtgttaagccagctgaactgaccccgcagcaccttcctgaggtcggcttgactaacttgggtcgctatgccaccgatgatgcgcaaccctatatggaagtttgggccgcttatgaacgctgtcagtgggagatgaatccctctgattggctgtttaataaactggaactgatgggcgagaaagtgttgaatcagcgcttaattgcgcatccttccggtagtggcctttttgcagatgtgctaactctcaaaacgcactcgtccggcgacgaggtcatttcacgttataccgtacagaaagattacaatccgcaagaaggaggcggaaattatttcctgattaaagcggcctgtgccgctcgcgactaccctgcgctggcgaatgatatttactttactgtagtgaactgggatttactgcatcgtagtaacttggttctggctgaactgcttaagaccgtgaacctcagtgctaaaaacagcagtggatttaaagtaccggaatcctggcaggtgaatccccttacagaaacgcgcctggtggtcgagcactcgtttgatggcattaactacggtgtcattaatctttgctttttttcgcaggagatgttgtttaccgcgcaggatgtttttagcgtttcgattaaacggtttcacgatcgagaacctgccgttacgcttaagactgaagcacttgctactattccaaatgagtttaatccatccctcggaaaaacactgtggacatgccggggggaaatgttcagcgcagaggaagaaatgcgcgctgtttaccagtgctatatttttagcgtgggcaaagtctggtgctatgcagaactgattggcagacaccgtaactatcatgattaccacttcgaggcgaataaacgctgcctcgaaatcatcctgtcaacattccatatagaaaatgtctaa

SEQ ID NO: 121807 - DNA, 1119 bp, Enterobacter cloacae
atggtctgtcatatgaccccccctgttgctctatttaaagggtgtgtgatgcaagatcttcacagtaaagactcagtaaccaatcattatgccgatcgttatcaatgttatatgccaattgatgtccgtaatggattaagaagcaatagtatagatgcgtcgaattcatctctcccatgggatgtaacattacctttagtcacgactgaagatgtttcacgtgataaagcgcttggggcgtttgtgggattggctgttggggacgccgtcggcaccactcttgagtttaagaaaagagacagtgaacatgtagcagatatgattggtgggggaccttttcaattaaaacctggtgaatggacagatgatacgtccatggcattatgtctggcagagacttatctttcagaaaacagaatgcacaccgatgtgcttagaaaatatctcctgaaatggtatcttgacggagagaatagcagtaatggtcggtgcttcgatatcggcaatacgacgcggttcgcgcttgaacagtatatgcgtgtcggaccttcctggtatggtaatacagagaaacacactgctggtaatgctggggttattcgtcaagcaccggtatctatctttcgtcgaaaatcactgcgtgcgatttacttcgaatcacaggctcagagtcgagcaacgcatggcgcggtagaatcaattaacgcatgccaatttctcggattggtattgcactatttaatcaacggttatcaaaaagaagaagctttttcgcctcatgttttcccactgtgcgcgcgtgtaatgatcataaacgcgggtgagtataagcaaaaaactcgcgaccagattcgttcaagtggttatgttatcgatacgcttgaggctgcgatgtggtccgtatggaatacggataatttccgtgatgccattctgctggcagccaaccttgccgatgatgctgacagcgttgcggcgacggcgggacaaatagcgggggcgttgtatggttattccgctatcccgcaggactggaaagataaactcgtacaacacgaacgtattgccacaatggcgggtaaactattcgatagagcacctgaggataattttttatag

SEQ ID NO: 121808 - DNA, 744 bp, Enterobacter cloacae
atggcattatgtcttgcggaaacgcttcttgagaaaggcgatgctgatactatatgtttcaggaataagcttctggaatggtatcagcatggttataacagttcaaatggcgtctgttttgatataggtaatacaacgcgatttgctttagagcaatatttaacaattggcccaggatggagcggcaatactgctccagaaactgcgggtaatgcttccattatcagacaagcccctgtctctattttttttagaaagtcattaagcaaagcgttttatgaagctaaaaaacaatgtatcgcaacacacggtgccgcggaagcaatcaatagcacgcagtatttaagttatttgcttgtgcatatgattaacggtagcaataaagattttgttttttctccgcacgttatgccgcttcagccacgcgtaatgattatcaacgcgggtgaatataagcaaaaaactcgcgatcagattcgttcaagtggttatgttatcgatacgcttgaagccgcgatgtggtccgtatggaatacggataatttccgtgatgccattctgctggcagccaaccttgccgatgatgctgacagcgttgcggcgacggcgggacaagtagctggagcattatatggttattccggtattccgcaggagtggaaaaacaatcttgtacaacatgaacgtatcgccaaaatggctggtgaattgttcgatagagcccccgaagacactttcttataa

SEQ ID NO: 121809 - DNA, 969 bp, Enterobacter cloacae
atgagctacaaccagctgaccgaaaacgaacgataccagatttacattctaaaaaaagcaggccacagccaattggcgatagcggagaaaatggagcggagtccgtccacgatcagccgggagcttcgccgtaacagagggcttcgaggttatcggcctgggcaggcacagaagctgtcgagcgctaggaggcatgatgcctacaaggcacggaaggtgacggacgaggtgcgaggtgagatagaaaccttgcttcgtcaggagctgagtccgcagcaggttgccgattacctgagaaggcacacaggcgtatgtctgcaccacgagacgatttaccagttgatttacgcagacaaggccaacggtggcgatttgtataggcatcttcgggtagcgtcaaagccctatcgcaagcgctatggcagctatgatcggcgagggaagatcaagaacagagtgagtattgatgagcgccctgcggtcgttgaccggcgtagccgaattggtgactgggaaggcgatacgatcatcggcaagggtcgcaagggcgttctgctgacgatggttgagcgtaagacgctgtatacggtcattgttcgcctgacgggcaaaagagccgacctgctggcggctgcagcgattgagcatttggcgtcgctcaaagccagaatcaaaaccatcaccttggataatggtcttgaattttctgggcacgaggatatagcgaaaggtctggaggcggatatttattttgcccacccttatgcatcatgggaacgagggatcaatgagaataccaacggccttatccgccagtacttccccaagggaacagacttaagcaaggtgacggatgagcaggttcagtttgttatggatcgactgaacagcagacccagagcgaccagaggtggacgatcaccgaatgagttatttatagggcggcgagacgatttactcgccgcgtaa

SEQ ID NO: 121810 - DNA, 327 bp, Enterobacter cloacae; identical to SEQ ID NO: 91887

SEQ ID NO: 121811 - DNA, 375 bp, Enterobacter cloacae
atgaacctcgttaacgaagtaatctttcccttccgtacgcatcttgcctgcttctttcgcgccttgctcacccttgcaggtgataaagtcttaaaacgcgatagtctgcgcacgaatgaagcccttctcaaagtcggtgtggatcttaccggccgcgtgaggcgcagtcgcaccgacagggatgattcacgcgttcacttctttcacgcccgcggtgaagtaggtttgcaggctgagcagctcatagcccgcgcggatcacgcggttcagcccccgctcggccatgaactctttatggtcgccgtcgatgatttcagcgatatcggattcaaccgcggcgtaaaccgctacctctacagaacctttaccgcttga

SEQ ID NO: 121812 - DNA, 552 bp, Enterobacter cloacae
atgacatccactgtcgtaagtaaaatacccagcgcccgtcgcagcgccgctgggattactactaccgcaataacttggtgcgcgaagagcgggacgataacccgttcaaatggtaccgctggcagtacgacagacagtgccgagcgtctcctggttcaggacggcacgctggccggagaggagcagggggtctgggatgcagccgctaacccgctcgaaggttctgttgagaacattacgcacaaccgcctggcgcagctgaatgatattcgctggcgttataatacccatgcttgcactgtagagaaggataacggccaaacccgaggaaccgcaaaaaaccgcagacgcaggtcagcttccgctacgatccgctcggtcgccgcatcagtaaaacgcgacgccagaagctgggcggacagccaaccggcaagccatcaccacccggtgtgtctgggaatgactgcctactgggggaagcgcacggggatgtgctgttcacctacgtcgacgaaagtggtcaggacaactacgatttgctggcgcgtgtag

SEQ ID NO: 121813 - DNA, 477 bp, Enterobacter cloacae
atgattgattttaatgctgatattttatcaggaagagcactaggtaacgtttttttgggggataatatcagtaagtacataagcgagttatatgctggctataaggtaacttactttgattatttcttgcctgatgataataaaaggcttgcatatattgtagatgacacaatgacaatcgctacccttgaagatggaacgatcatttctattggttgtaacgtaaactataaggggaggtataataaaatattacaaacaggtcaaacgatgggggaaataatagggttgacttacaaacagcgtatatttaatggctgtattattataaatgacgactttggtttttcattcgagttgccagcgccatatgatgaaattgcagatagcattgcacatgttccactagatcttgttcttaatgaaatccgtgttgctgattactctgattggaacccacaaaaaataaaacgctga

SEQ ID NO: 121814 - DNA, 312 bp, Enterobacter cloacae; identical to SEQ ID NO: 97178

SEQ ID NO: 121815 - DNA, 648 bp, Enterobacter cloacae; identical to SEQ ID NO: 97177

SEQ ID NO: 121816 - DNA, 267 bp, Enterobacter cloacae
ttggccacgctggagcgtcttctgggcctgctgtcggcctttgaggtcgtggtatggatgacggatggctggccgctgtatgaaccccgcctgaagggaaagctgcacgttatcagcaagcgttacactcagcgcattgagcgacataacctgaatctgagacaacatctggcaaggctgggacggaagtcactgtcgttctcaaaatcggtggagctgcatgacaaggtcatcgggcattatctgaacataaaacactatcagtaa

SEQ ID NO: 121817 - DNA, 1434 bp, Enterobacter cloacae; identical to SEQ ID NO: 97176

SEQ ID NO: 121818 - DNA, 1215 bp, Enterobacter cloacae
atgcttatgtcggttttccacaactggctacttgagatcgcatgtgagaattacttcgtctacatcaaacgcctttccgccaacgataccggcgcaacaggtggtcaccaggtagggctttatatcccttcaggtatcgttgaaaaactctttccgtctatcaaccatacccgtgaactgaacccttcggtttttctcaccgcacatgtgtcatcgcatgattgccctgacagcgaagccagggcaatttattataacagccgtcattttggtaaaacccggaatgaaaaaaggattacccgctggggtagaggcagcccacttcaggatcctgaaaatacaggggctctgacgctcctggctttcaagcttgatgagcaagggggggactgtaaggaagtaaatatttgggtatgcgccagcactgatgaagaggacgtcattgagaccgctattggtgaagttatacccggagcgcttatatccggccccgcaggacagattctaggcggactatctctacagcaagcgccagtaaatcataaatatattctacctgaagactggcacctgcgctttccgtcgggaagtgaaattattcagtatgcagccagccattatgtgaaaaattcccttgatccggatgagcaacttcttgaccgccggcgcgtggagtacgacatatttctattggttgaggaactgcatgttctggatatcatccggaaaggatttggctctgtggatgaatttattgcgctggccaattctgtcagcaatcgccgtaaatccagagccgggaagtcgctggaactgcacctggagcatctattcattgagcacggcctgcgacactttgcgacgcaggccatcacagaaggtaataaaaaacccgatttccttttcccttccgcaggggcttaccacgatactgagtttcccgtagaaaatctgcgcatgctggcagtcaagactacctgtaaggatcgctggcgtcagatactgaatgaggccgataaaattcatcaggtgcatctgtttacactccaggagggagtttctctggctcaatatcgggagatgcgggagtcgggtgtcagattggtcgtgccatcatctctgcacaaaaaatacccggaggcggtgagagctgagctaatgacgctaggtgcgtttattgctgagctgacagggctttacgcagatattccatag

SEQ ID NO: 121819 - DNA, 399 bp, Enterobacter cloacae
atggcaagaaagttttatgataaagaaataaaagctattgttaaacttattgaaacctggagtaagcctgatttcacttgggattctttatgcgtggcttgcaaaaaaattttaggtaaagtacctacacggcaagcattaagccagcatagtgagattgtcgttgcgtataggaccagaaaaagatctggtatggttaaacgtcaaaatacgaagttacccggtagcctgagccttgcggcgaaaagaatagaacgacttgaaaatgataattcgacactaaaatatgaaaataataatttactgcttatgattcaaagaatgcacgaaaatgcttacaggcataatatattggcttctattcttgaagaagaactgccacagagagcaagaaaataa

SEQ ID NO: 121820 - DNA, 429 bp, Enterobacter cloacae
atggacaaacaaaacaactttccagtggaaacactggaagaacagcttattattatcattgataagtatatctcaaagagatatcaaccacacgataaaagtttctcataccagctatacttaatttttgtaggataccatttaaagtatttctatcctaaaaggatttattccaaatccaatcgtaatattgataacataatggctatgtttagctcggtatacaaaagtctgacaagcaatctactacaacgattaaataacaaagaacgtgttcttagagagctaaactcgcttgttaattacatagatagtaaccaggatagagcagaagatatctataatactataagagcacagtatgaagtgaagattatcgagaaagagctaacccatgaagttattagagtaaaaaatgttagattataa

SEQ ID NO: 121821 - DNA, 387 bp, Enterobacter cloacae
atgaaccgatttataaagtcctctttttttattattgtcttcctgctttctggctgttcaacatcagggaaccagaaccttaaaaacgaaacacctcaaagcctccagtcaaagatcattaaaaacaaaacaaccaagacagagttactcactaagttaggtgagcctgacaccagaacgactcttgacgatggcaacgagcaatggagatatttcatgtataacaatcagttcaatgcctcaactttcattcctgtagttgggctgctaactggcggttcccagactcagtctagaactctcgaaatcgacttcaatggagaaaccgtaagcaaatggacattctcaactgataataacaatacaaaatctggcattctccagtaa

SEQ ID NO: 121822 - DNA, 1221 bp, Enterobacter cloacae
gtgaagggtatgcggaagatcaagaggggtaaaagcttcgcaggtgttgttcaatatgcattgaagccgggagcacatcataaaagcgatccagtcgtaatcgggggcaatatgcttggagattcagcccttgaactgattgctgaatttgatagcagcaaacaacttcgccctgatgttcagaaggccgtttggcacaactcgcttcgcttacccaacggtgaatcactaacgaatgaacagtggtctagtatcgcagatgactatatgaaacgaatgggattcagtgatacccatctccgttgctatgtcttacatgacgacgaaggccagcatatacacattatcgccagcagaatcgacatagccagtgggaagctctacttaggtaggaacgaaaatcttataagcacgcggatcatcagtgaacttgaaatcactcataacctgacagtgaccatgacagcaccaaagcaaccgaagcgaagaaaggtttcccgcaatgaacagatgctttcagaacggactggccttccctcccccaaagaagctctccaacagatacttgataaaagtttggcagatacacctgatcttttaaccttcacaaaacgactggaagaagccgaagtatcttggacggctaacattgcttctaccggtaagatgaacggcttctcattctcttaccgagatatagctttcaaagcttcgcagttaggcaagagttactcctgggcaaatcttagtaaccgtcttaactataaccccggccacttagaagctctgcgaatcgacataccttcaaaggaagtttctcaagctcccatgccaatacctgttcctgctcctgctcctgctcctgctcctgctcctgctcctgctcctgctcctgctcctgctcctgctcctgctcctgctcctgctcctgcaacaattttggaaaccagggagcaaaaggaaagtatcagtgaaaaaattactgaactcgaactgcgactcagaaaagacagacgaaacgagatcgttgagaagattctccaaaagaatgcggttaaccagcaaaagcatctcaggcttatcggctggcttccatttcttagaaggcttgcagagcttctccgaagctatggtaagagcattcttcacaagccccaccctggattttcaaaaccctatgcaacacgacctctgcataaaggaataaaaattcatttatag

SEQ ID NO: 121823 - DNA, 438 bp, Enterobacter cloacae
atgaaagagagtatttatacagataacatagatctatccaaaatttcccgccgtggtagttttaataaaagtaaaattccttcagaagctgtaagaagctattgtgtcagtgtccgattgaatgttgaagaactgcaactccttaatataaagcgaggctcttatagaaaaggagagtggcttcgtatggcttcccttcaaaagttgcctcctgttataccaacgattaataccaaagcctggaaagctttaactgatatatcgcaaaagctaaatcgaattgcgacccatatagattgtaaaagcaaggacagtcagcttacccatactgaattgttcgctgtgaagcgacaagttgaagagcttcgtcacaacttgctaagaatagatttttggagtatccctcgtgaagggtatgcggaagatcaagaggggtaa

SEQ ID NO: 121824 - DNA, 402 bp, Enterobacter cloacae
atgtcaagaattttaaatgacagtcctttagataaattcttactaaatgcatcaataagcaaaaataaagatgatgctgtcgtgatgttaaccatgcaagatagaaaagtttatgtcggaaatgttattacaaccggcgagccaagtgagaccgaagggccggatcaggaaatcgagttcattccatggataagtggctttcgtcataaagatacactgaccgtcacttttacaacagattataaaatacttaaagaacgaattacattaattttaaaacaggaggagatattatcagcaacctccttctctttcaagcattatgaagaatttgaaaagcgaaaagctgaatttaaaaagaacaaattaaaagatattataaaaattctgttagatttataa

SEQ ID NO: 121825 - DNA, 861 bp, Enterobacter cloacae; identical to SEQ ID NO: 25304

SEQ ID NO: 121826 - DNA, 1326 bp, Enterobacter cloacae
atgtttcaaactctaagaaagctacaagaaagtcaatattcggtttttgaaaccaaggatggtaatttcaaagtgaacttttcttattccaagtggaagataagtgaaagtataacattgaacattgattctttaagagtggtcatcagtgcatatatacctatcaaaaccactttggcatatttcgctataaattatagtgccagttatactaagaaaatgttttatgcagtaaagcattacattaaggcctgtaatacgaatgatagcttgttttctaaagattgcataaagtattactataaagttgtgagctcattagattacacacatgcagagacattgaaatatttttttatgaagatgagtggtctttacccatctttgttttcggcagaagcaatcatatttttagaaaatattaaagttaaaaaaacaaatgctaacaagtcgataaagacacatgattataaaaaaggtccctttagtgactcgcaattaaaggtaattatcgattctgtagcgatagcttataaggaagaaaagataagtctgtcaaactatctgctaaccttccttgttgcatattccgggcggcgacctatgcaaatatctcaacttgaagctggtgatctcttagcttttaatggagagtactttatcaatatcccaagaattaaacaacgaaatggatatagaaaagagtttagaaaattacaaattccagaagagcttttcagccaattgacatatctcgttgaagctgtgaattcgctggtcaatgacacattaaaaatcgatttaagtgaaaaacaaaagagaaaactaccaatttttataaacacatatccattcaaaaaaggatgtgttgagctaaacatgattgaaagtggtggattaaaacttaacccctatgccataacactaaaaataaggaacactataaatcgttcaataaatgaatatcaagcctatctggggtgtataaattcgcgcagatttagatattcattaggcactaaggttgcacaattgggttatagtccttcactgatagcaaatgttttggaccattcttcaataaattctgttatgagttatatagaaaatacagcggaaaatggcaagaggattaatgaagctgtaaacgaactaatgaagccactggctaacaaatttattgagggaaaagagcttcagcaagagttagattctttgaagcatttgatagaagaatactgcggtggatctaaaattaactcttttgataatacagtaatatcgttagtaactaaatctatcgacgatatgatcaatagcatttaa

SEQ ID NO: 121827 - DNA, 1269 bp, Enterobacter cloacae
atgactttgaaatatagaataaaaagattgaagaataaggatggtatcagaagttgcattattattaatgagagcaatggattacccttagtttaccctaacttatatatgagtgttatttcacgaacaaatagctattcattttcaacaatggaagcaatagcaaatgctttgcttttatttgaaagatataatgctgacatgaatgtgggtgtttttgatatggaaaattctgatatcgaaaaacttgtctcgaacaaaggatatttattcgggttaatgaatgccctctcttacagaaacgacttagagaatgttacaagcattcttaaaaaacaacatgtctctaaaagaaccctttatttcaagataatgacaattgaaaattacgtcaaatggttttttgataacattgctatcaataatattgatttttctcgttatgaaacaatcagtcgagcatttgattttataaagccaagaatagagaacggaaagaattacaatattgaaagcgaaagcaaatcattgacaaatgaacaagttacaactttgactgatatggtaagtgttaaatctaagattaatccattttcggagcatgtaaggtttcgaaataatataataattgaaatgttgttagagacaggtattaggggaggggaactacttaatattaagttggttgattttgactatgtccacaaaagtctatgcatagtaagaaggccagatgatcaaaacgaaccacgattaaggcaaccattggttaaaactttagaaagaaaaataccattgagtatagaattgactgagttaatacagaattatattagtgatttcagaagtaagcagtgtcatgcaggggagcatgactatctgcttgttactcatagcagtaaaggtcaattaggtcatgcattgactatttcaggttatcagaaaattttcgaacaaattaggaagaatagtaatgtattgagcgatattgtggggcactcgctaagacatacctggaatgtgaaattctcagaaatgatgctcatgaattcgaactctcaggattatattacttatgagaaagtaagaaattatcttatggggtggaagaagaatagcacaacctcagatatctataaccaagcatttatagcacaagaaagccgaaaaataatggcagttattaacccactcaaaaacatagtagaggacaaatccaatgtttcaaactctaagaaagctacaagaaagtcaatattcggtttttga

SEQ ID NO: 121828 - DNA, 315 bp, Enterobacter cloacae
atgaatatcgaagaatttatgagtcaagaaaaccatatgtgcaatttgggcgatgaacttttttacaagatcttcgaacccggagcaatttatgatttaccaaataacgaatttaataaagaaatcatttactggctcagtcagtaccttataggaaacttgagagagcccttggactcgatctctgagcttgatattttcgagcagttttatgtttacgagacatggttatcgctaattaaatgccctaatgaaattagaaatttatcgaaaaggataattcgatatcagattgggttgaaaaccattctttga

SEQ ID NO: 121829 - DNA, 1134 bp, Enterobacter cloacae
atgaaggcaagattttcaatttacctcgctaaagatattaaaactggaactgatcaggtattgaatttagaaagggtaaagcctcctattcgtctggatatcacagatacagactcttatttgtatattaaagaagaaaccgagccacaaattcctgaatgggcatctatcttttttgcgattaaacccgatattcctaataatgcttttgggaaaaacagtagtaccggtgcggtattatcagttaagtacaaaggatatcattttttgatgccatttggcactggtcatcacttaataaatgacatgtatatcattcagggttttggtctaaaagttacattgaactcgattgggaaagatcgaattagaagtgtagataaaagtaaccataatgaaaccagtctattgactaggaatcaaagttctaaagaagtaagtatctataatttgaaaatagactcggaattggattttttgacaactttaacaggagtatgtactgaagagttattgggggataaggttacaggaagggatgccttagttctgacaccagattttgaattaaataaattttcgagtattcttcatacaattatagatttgtataataaaccattgccaaatgaatttgagtgggtaaataacattaaacaagcggatcaagaagaaatacaaatccttgatatgattttagaggaacgattaattcataaggatctagaaggtatttggttgggggaaccagaaatcgttgattgggaaaaacagattggatattgtttccatcgaggaagcagaagtccaatatacacgacattatttattagtaatttacttgagcatatggctaagcgagaactaaatatagaaaatctaaaaaggcaaaaaatattttccattaatgagcaatatgaaactatatctacttggtctgcatatcgctgtatttatgctgaaatcaatgatgggcggagtgattatgtattgagaaatggagtatggtataaagcaaatagggattttattgacagtatcaataatgaaatagcgaaaattgaagattatcaaaattctgctttacttccaatttataaatttgactatgaagctgattatctgattatctga

SEQ ID NO: 121830 - DNA, 603 bp, Enterobacter cloacae
atgaaaaaatttaatttcgctgctctgcttccgggatttttagcactcaataattctgtatgggcaagtgattcctccactggagcaagtgatttgcccggcatgactcttaatgagcatgatttagtcatagctccacttaacacggaagtacctttctacattgcaggacaccgtagtcatagctcccatcggagccatagttcccatagatcttcgtctggtggtggatactatggtggaagttcgactccttattatcctaaatcttatggctcatccacgtccaacagtggttctgaatctccttcctcatcaagcagagcattgtcttccggctcaacgaactcaacatcctcagcaaatactcgatctcaaattgggagtttatctgccgattcggagaagagaaaaagattgatcatgcgtgttcagtttgccctttttgataaggggtattacgacggtattattgatggtgtcatggggcctgcgacaagggcatcaatcaaaagttatcgtcagagtgcgggcctgcctttaccaaaaaatgaaactttagatgcacaattacttaatgcgttgggggttttagcccgatag

SEQ ID NO: 121831 - DNA, 1113 bp, Enterobacter cloacae
atgtctgaagtgctgagaaacgatattttccggttttcatcagacttgccggttcaacaaggtttctatcgcctgtgcaaatttaagcccgaaaatcctcaattctttctgccaaatttactggtcagtaaaactcaacccgatataccactacctgcatattttgcagacttcgttgtgagcactgatcttttcaattccatagaagatggtgatatagggattattaacaacggcaacatgcttagggtgattttgtcacggagagcgaaccataacactgttctggtaactgaaaggtgcaacaacagttgccttttttgttcgcaaccccctaagacaggaaacgatgactggcttcttaaccagtcagcacttgccatcgcctctttctcactgaatggtatagtcggagtgagtgggggagaacctctactgtatggcgaagatttcctgcactttcttgacttcgtaatcgaaaactcgcctgagacagctttgcatgtcttgaccaatgggcggaagttcgcagatgttagttttactcaacagatgaaagagcgaagcgaaaagctcaaaataactttcggtattccgctttattcttcaaggtcgtcagttcatgactatctggttggaagcgagggggcatttgatgagacagttagggggcttatcaatgccggtaactcagggatcaacattgagttaagaatcattccgacactggctaactatatggaattggacaaaatcatagagttcgctggtcgtgtgttctccaatatcaaccagatttctcttatggggctagaatctattggctgggcacgtaaaaactggtcatcaatttttattgagcatgatagctatagtgagaaaattctttctgccataggcacagcacaaaggtcaggcatccctctaacaatcttcaattacccattgtgtcatcttcctgaaagagcttggggatttgctactcagtcaatttctgactggaaaaattactatcccaaagaatgtgatgaatgtacccagaagtcttcctgtgctggttatttcagttcatcaaaaggccgttttcatcaaccaccgagaccaattttatga

SEQ ID NO: 121832 - DNA, 1389 bp, Enterobacter cloacae
atgagactgatgcctttcaacttcgacaggatgcctgacgaccgcgttttcatcagcaacctcgctggctttcatcattttttaggtgagaaggaatttctcgatctggtaaacggtcatgtcagtcaagaacagtcctcatcgcttgaaagtaaacttttcatttgcggagatgaatcttcctccgttaccccttatgcactaagttcggcttttgccaaacgactcattaatgaactcgcggtcaggccaatcttcatgattgtacctactcttcgttgcgatcatacttgcaaatattgtcaggtcagcagggcatcggtcaccgctgatggttatgatctcaaccctaaactgataccgcaaattgttagcaccataaagaaactgggtactcctccctacaagatagaagtacagggcggtgaaccacttctcaggttcgatcttgtccagtcaatctatcacgagtgcgagatttcattgggtagtgatactttcgaaatggtgattgctacaagtctgtcattacttgatgaaagcatcctctcatgggttaaagagcggaatataaccttctctgtctcgcttgatgggaatgaagccgttcataacaagaatcgtattcttactgactttcaggctcacaacaaagcagtaacaggtattcggaaaatcacagaagaacttggggaaaaccgggtagcaactgtcacgactgttactaaggaactgacaaaggagccggcttccatagtagatgctcatctgtctctgggacttacagacatgtttatcaggcctgttagtccttatgggtttgctcagaagcagagctttactttttcaatgccagagtattttgatttttataaagagttaatgcaggaagtgttgcttcagaatgaaaagagaatacctgtcattgagcactcggctgctatccatcttaagcgaattttcaatccgggtttcagtggttatgcagatctaaaatcgccaagcggagtcgtgctgaactgcatcctgtttaattatgacggtaaagtctacggtagtgatgaaagtcgtatgcttcagaaagtaaacccggaagcagattttagtgcaggagagtttgcctcactctcattcagtagcaacgaatactaccgttccgctctctcatcttcatttaacttcgccatgccaggttgtgacacatgtgcataccagcctttctgtggagcagatccttgccagaacattagtgttcatggcgaacctgttggtgacaagagtcggtcaactttctgccagtatcacaaaggcatgttccgcttcctgctgaatgaaatctctcaggatggaccgatggctgaaatgctcaaaaggtgggcttatgtctga

SEQ ID NO: 121833 - DNA, 156 bp, Enterobacter cloacae
gtgaaaggctttattcgtacacagactatcgtgtttgaagactttatcacctacaagggagagcaaggcgcgaaagaaacaggcaagatgcgtgcggaaggcaaagattacatcattaaagatggcgatgtgatgaacttcttgtttaacctttga

SEQ ID NO: 121834 - DNA, 1089 bp, Enterobacter cloacae
gtggagaaggataacggccagacccgctggcactaccgctacgacagcgagcatcgcctgacggaggtcatcagccagccgcggaatcgcaacaggccgcagacgcaggccagcttacgctatgacccgctcgggcgacgcatcagcaaaacgcgtcgccagatggtgggcggacagccaaccggtaacccagtcaccacctggtttgtatgggaagggttccggctgttgcaggaagtgcacggggatgtgccgctgacctacgtctacagcgatcaggacagctacgatccgctggcacgtatcgacggcgttgatgccccggaaatcttctggttccactgtcagccgaacggcacgccggaacggatgacggatagcgaaggacaggtgcgctgggaaggggtaaacagcgcctggggcaagctgttgcgggaaagcgagacgcaggtatcaggatattctcagaacctgcggatgcaggggcaatacctggaccgtgagacagggctgcactacaatctgttccggtattatgacccggactgcggaaggtttacgcagcaggacccgatagggctggcgggggggataaacctttaccagtatgcgccgaatgcgctggggtgggcagatccgtgggggttgactcctgacgatctcattcgttaccggccacatgattctctttctgctcaaggtggagctagaagctctgctatttctagggcatgggtgcaagaaaaagccttattgcaggatggtggggctggcacaagaaattggacagcgcaagagagggatttaattttgaagactcccaacaagagcctaacctctgtgatgtcccgggcaggctataccgggcatcatatcaattcggtagaaggcaatggtacacttggttccaaatggcaaggtgatccgaggaacattgtattcttgaaaaatcataaccatcccgacaagttcaatgagcatgtccatggtgatcaaggacatagagggaatactaagaactcgacgcgtgggcgcttaatcgatagagaaagaacactaaaatctagacaacgatgtaagcaattatag

SEQ ID NO: 121835 - DNA, 285 bp, Enterobacter cloacae
atgtacagtgcttgctttgctctcaaggagaacgatgaggcgaaaaaatggggggagaggatacttagtacacgtggatcggatatagagacagcgccgttaatcgacctcggcatggttttttatgagttgaatcaatttgatgaagcgtacaaatattttaatgattcttataactacgtcaaagaacgaacgtttcaagacagagctgaaaaataccttgagttctattttcctaagggtgcgcaagttcgtttttttcataaaaaacaaatcaaactttaa

SEQ ID NO: 121836 - DNA, 978 bp, Enterobacter cloacae
gtggttgattgtttaacctatgcaggtaatgttgagtctctggcaccagttgaaaaaaattcgcgatactcattctctctaactgatattactaatgcgaaagctgttgcggatattttcaattccttccagcctgatatcgtgatgcatttagctgctgaaagtcatgttgaccgttctatcgacggacccgcggccttcatccagactaacgtaataggtacattcattcttcttgaagcatcgcgtcagtattacgcatcacttgatgacgataggaagaaggtttaccgcttccatcacatctctactgatgaagtttttggcgatcttcacgatgctgacggattattcactgaagaaacaccttatgcgccaagtagcccttactcggcctctaaggcgggtagcgatcatttagttcgcgcctggaatcgtacctatggtttaccaacggtgattaccaactgttctaacaactatggcccctaccattttccagagaagttaattccgctcattattcttaatgctttgtcgggaaaaccgctcccggtctatgggaacggcgagcagatccgcgattggctgtatgttgatgatcacgcccgcgcactgtacaaagtggctacagagggcaagatcggtgatacatattgcattggtggtcataatgaacgtaaaaatattgatgtcgtaaaaactatttgcgcaattcttgataaaatcatcgataaaaaaccaaacggtattgtcaattttgcagagcttataacttttgttgccgatcgtcctggacatgatcttcgttatgccattgatgcaactaaaatgaaaaatgatctcggctgggagcctctagaaacctttgaaagcgggatcgaaaaaactattcaatggtatcttaataatgaaggttggtggcagcgtgttcttgatggctcttacgctggtgaacgtcttggcctgaacaaataa

SEQ ID NO: 121837 - DNA, 270 bp, Enterobacter cloacae
ttgattgaggctatcgctttaggcgtgccagttattgctacatacaacccttactggtatgtcgatattgagaaagagaagtgcggtatttatattaaagataattctttaattgaatggacgcgcgctctagaaaagttaaatagggatcccgaattggttgctcaaatgtctaaaaatgcattgaaaacattcgtagaaaaatgtgactttgtccgtacggaagagatgcttgcaatgcatatagataatatactcaaaaaaaagtga

SEQ ID NO: 121838 - DNA, 567 bp, Enterobacter cloacae
atggttaaggccgggcagaaggtttacacctccatggagatccgcccgaattttgccaacagtggcaagtgctatctggttggcctcgccgtcaccgatgacccggcaagcctcggcaccgaatacctcgaattctgtagccgcgccacgcagaacccgctcgccggtaaaaaagaccagccgggcgatctcttctctgtggcctcactcgctgagctggaatttgaagacgttcccgacaccatgctcaacagcctgaccgacaaggtaaaggccattttcagccgtaaacaggccagcgacgacgctcgtcttgcagatgtgcatgaggctgtgacgaccgtcaccgagctggtgcaaaacaacctcaccgccaccgaccagcgcgtcaccgagcttgagaccgaactggctcagcttaagcaggacgtgaccagcaaggccgaagaaagcgcgcaggcgtttaacgacctcaaaaactccctcgataacaccgaaagccagcgccagccgcgtcgcgagctttcaaaaggtggtacgggcgacgagctgctgaccaactgctga

SEQ ID NO: 121839 - DNA, 1068 bp, Enterobacter cloacae
atgcgtaaacaaacccgctttaaattcaatgcctacctgacccgcgtcgcggagctgaacgacatttccaccgatgacgtggcgaagaaatttaccgtcgagccgtcggtcacgcaaaccatgatggacaccgtgcaggaatcgtcctcattccttacgaaaatcaacatcgtgccggtcgacgagctgaaaggcgaaaaggtcggtgtgggcgttaacggcacaatcgcgagcaccgccgatactgacggcgatggcgagcgtgaaaccgctgattttaccgcgctggagtccaacaaatacgagtgcgcgcagattaactttgacttccatatccgctataaacagctcgacctgtgggcgcgattccaggacttccagacccgtatccgtaacgccattatcaagcgtcaggcgctcgatttcatcatggccggtttcaacggcattgagcgtgcggcgacgtccaaccgtaaaaaatatccgatgcttcaggatgtggcggtgggctggttgcagaagtatcgcaatgaagcgccagcgcgtgtgatgtcaaaaatcaccgacgaggacggcgcggtcatttccgatgtgatccgcgtgggtaaaaacggcgactatgcgaacctcgacgcgctggtcatggatgccaccggcaacctgattgacgagatttatcaggatgacccggagctggttgtcatcaccggtcgcaagctgatggcggataaatacttccctatcgtcaacaaagagcaggaaaacagcgagtcgctggccgctgacatcatcatcagccagaagcgaatcggcaacctgccagccgtgcgcgtgccttacttcccggcgaatgccctgatggtgacgcgtctcgataacctgtctatctacttcatggatgacgcgcatcgccgcagcatcatcgaaaacccgaagaaagaccgcatcgaaaactacgagtcaatgaataccgattacgtggtcgaggcatacgctgccggttgcctgattgaaaatatcaagctaggtgacttcaccgcacctgctgcaccggaaagcggagagtaa

SEQ ID NO: 121840 - DNA, 756 bp, Enterobacter cloacae
atgacgagtcccgcagcgcgtcacatgatgcgggtctcggcctctgaaacagcgcggcgggctgctgtcccgctgcgcaatgcaactgcctatgagcagatgctcgttaagctggccgcagacaaccgcacgctgaaacaaatcagatccaatgagcgaaaggcagacaaaaagcgcgagctgctgccgttctacctgccgtgggtcgctggcgtcctcgcaaacggcaagggcgcacaggatgacatcgtcatgacggtcatgctgtggcgtctcgatgctgacgatatcgccggggcgctggagattgcccgttacgccatgacctggggtctgaccatgccgaccggtcgacgtcctacgccttacctgctggccgaagaggtggcactggccgcgcagcgcctgcttgctgcaaaacagccggtcgaactggcgagcctgctcgacactattgcactgacagaacgcgctgacatgcccgatatcgtgcgcgcaaagctgcacaaaatcaccggctatgtcctgcgtgattcgaatcaactccccgaggcgctggcacacctgcaacgtgcgatccagttagagcgcactatcggtgtgaaaaaggatatcgagcagttagcgcgccagctcaggccaaaacccgaaccggcaccaaaaaccaaaacgactaaaccgcgcacgcgcaaacctgccgctaaaccggcggcacggcgcgggcgtccaccaaaggcggcaaaagccgcaggttaa

SEQ ID NO: 121841 - DNA, 567 bp, Enterobacter cloacae
atggttaaggccgggcagaaggtttacacctccatggagatccgcccgaactttgctaacagcggcaaatgttacctcgttggccttgccgtcaccgatgacccggcaagcctcggcactgaatacctcgaattctgcagccgcgccgcgcagaacccgcttgccggtaaaaaagaccagccggacgacgttttctctgtggcctcactggctgtgctggaatttgaagacgtccccgacaccatgctcaacagcctgaccgataaggttaaggccattttcagccgcaagcaggccagcgatgacatccgtttcgccgatgtgcatgaggcggtgaccaccgtcaccgaactggtgcagaccaacctcaccgccaccgaccagcgcgtcaccgagctggagaccgaactggcgcaactcaagcagtacgtgaccagcaaggcggaagaaagcgcgcaggcatttaacgacctcaaaagctccctcgataacaccgaaagccagcgccagccgcgccgcgagctttcaaaaggcggtacgggcgacgagctgctgaccaactgctga

SEQ ID NO: 121842 - DNA, 1068 bp, Enterobacter cloacae
atgcgtaaagatacccgcttcaaatttaatgcctacctgtcccgcgtcgcggagctgaacggtatttccaccgatgacgtggataagaaattcaccgtcgagccgtcggtcacgcaaaccctgatgacgaccctgcagatgtcatccgcgtttctgaccaaaatcaacatcgtgccggtcgacgagctgaaaggcgaaaaagtcggggttggcgttaacggtacgattgcgagcactgccgacaccgccggtgatgatgagcgtaagaccgctgatttcaccgcgctggagtcattcaaatacgagtgtgaccagattaacttcgatttccatatccgctataaacagctcgacctgtgggcgcgattccaggacttccagacccgtatccgtgacgccatcattaaacgtcagtcgctggatttcatcatggccggtttcaacggcatcgagcgcgcggcgacgtccaaccgtaaaaaatatccactgctgcaggacgtggcgatcggctggctgcagaagtaccgcaatgaagcgccagcgcgcgtgatgtccaaaatcaccgacgaggacggcaaggttatttccgacgtgatccgcgtgggcaaaaacggcgactatgcgaacctcgacgcgctggtcatggatgccaccggcaacctgattgacgagatttatcaggatgacccggagctggttgtcatcaccggccgtaagctgatggcggataagtatttccctatcgtcaacaaagagcaggaaaacaccgagtcgctggccgctgacatcatcatcagccagaagcgtatcggcaacctgccagccgtgcgcgtgccttacttccctgcaaatgccctgatggtgacgcgtctcgacaacctgtctatctacttcatggatgacgcgcaccgtcgcagcatcatcgagaacccgaaaaaagaccgcatcgaaaactacgagtcaatgaatgttgactatgtggtcgaggcttacgccgccggttgcctgattgaaaacatcaagctcggtgacttcactgcacctgcagcgccggaaagcggggagtaa

SEQ ID NO: 121843 - DNA, 756 bp, Enterobacter cloacae
atgacgagtcccgcagcgcgtcacatgatgcgggtctcggcctctgaaacagcgcggcgggctgctgtcccgctgcgcaatgcaactgcctatgagcagatgctcgttaagctggccgcagacaaccgcacgctaaaacaaatcagctccaaagagcgcaaagccgcgaaaaagcgcgagctgctgccgttctatctgccgtgggtcgctggcgtactcgaaaacggcaaaggcgcgcaggatgacatcgttatgacggtgatgctctggcgtctcgatgctgacgatatcgccggggcgctggaaatcgcccgttacgccatgacctacggcctcaccatgccggtcggtcgccgtccgacgccgtgcctgctggccgaagaagtggcactggccgcgcagcgcctgctcacggcaaaacagccggtcagtctggcgaacctgctcgacactatcgcgctgactgaacgcgcggatatgcccgatatcgtgcgtgcgaagctgcacaaaatcaccggctacgtgctgcgtgacgcggagcaactgcccgaggcactggcgcacctgcagcgtgcgatccagttagaaagcactatcggggtgaaaaaggatattgagcagctagagcgccagctcaggccaaaacccgaaccggcaccaaaaaccaaaacgactcaaccgcgcacgcgcaaaactgccgctaaaccggcggcacggcgcgggcgtccaccaaaagcggcaaaagccgctggttaa

SEQ ID NO: 121844 - DNA, 606 bp, Enterobacter cloacae; identical to SEQ ID NO: 53558

SEQ ID NO: 121845 - DNA, 777 bp, Enterobacter cloacae
gtgatcgccgaagtatcgactcaactatcagaggtagttggcgtcatcgagcgccatctcgaaccgacgttgctggccgtacatttgtacggctccgcagtggatggcggcctgaagccacacagtgatattgatttgctggttacggtgaccgtaaggcttgatgaaacaacgcggcgagctttgatcaacgaccttttggaaacttcggcttcccctggagagagcgagattctccgcgctgtagaagtcaccattgttgtgcacgacgacatcattccgtggcgttatccagctaagcgcgaactgcaatttggagaatggcagcgcaatgacattcttgcaggtatcttcgagccagccacgatcgacattgatctggctatcttgctgacaaaagcaagagaacatagcgttgccttggtaggtccagcggcggaggaactctttgatccggttcctgaacaggatctatttgaggcgctaaatgaaaccttaacgctatggaactcgccgcccgactgggctggcgatgagcgaaatgtagtgcttacgttgtcccgcatttggtacagcgcagtaaccggcaaaatcgcgccgaaggatgtcgctgccgactgggcaatggagcgcctgccggcccagtatcagcccgtcatacttgaagctaggcaggcttatcttggacaagaagatcgcttggcctcgcgcgcagatcagttggaagaatttgttcactacgtgaaaggcgagatcaccaaggtagtcggcaaataa

SEQ ID NO: 121846 - DNA, 825 bp, Enterobacter cloacae; identical to SEQ ID NO: 96871

SEQ ID NO: 121847 - DNA, 492 bp, Enterobacter cloacae
atggccgattcattccagaatgaggtgcccaaggcacgcataaatttaaagctggctctgcatacaggtggcgcgcaaaagaaaatcgaactgccgcttaaactcctcaccgtcggtgatttcagtaatggaaaagagaatcgcccattatcggaaagggagaaaattaacgtcaataaaaataacttcaacagcgtactttcggaatttaacccggaagtgaatctgacggttcctaacacaatggccggggatggctcggaagaaagcataaaactgaatttctccgatattaaggatttcgaacctgaacaggttgcccgccagatcccccagctccgcgccatgctggccatgcgtaatttattacgcgacctcaaatccaatctccttgataacgctactttcagaaaagaactcgagaaaattctcaaagacccggcgctgtctcaggaattacgcgacgaaatgagtgcactggccccgaaataa

SEQ ID NO: 121848 - DNA, 504 bp, Enterobacter cloacae
gtgccagtagaggccgctctgaataagttccggcgcgtcttcaaagtcctggcgcagatcttctttcgacacatccagaatttcggttttcacgttctggcggtagtcggtgctgtccaccagctgcttcaggccgcgccacagggactccaccttctggaactcctggtgatgcattacggcatccagctgacggctgatctggaaatccagctcagcgatatggtggtcaatcagcgttttgtcgagcttctccaccggctgaccggatttgcggatgcagtccataaacacctgcattgccgccgtcaggcgttcacccgccggagcgtcagaaagcgcggcgtcatccagaaacgcattgatatcacccaggctggaggccggggtcaggttgattttttcaaacagggaggcgtaaacgccctctttttccagtacggtggtctgcccctgcgcggaggcggtttcagtattcacagacatcagcatattcccggttaa

SEQ ID NO: 121849 - DNA, 654 bp, Enterobacter cloacae
atgagcaggaataatgatattaatgcagaagtagtatcagtgtcgccaaataaactaaaaatttctgtagacgaccttgaagagtttaagatagcagaagaaaaattaggtgtaggatcttatttaagggtttcagataatcaagatgttgctcttctggccatcatagataatttttctattgaggttaaggaaagccaaaagcaaaaatacatgatagaagcaagcccaataggtcttgttaaaaatggaaagttctatcgcgggggtgattcacttgcacttccacctaaaaaagttgaaccagctaagttagacgaaataatatctatatatacagacagcatagacataaaagatcgctttactttttcaagcctatcacttaatacaaaagtatctgtacctgtcaatggaaatagatttttcaataaacatattgctatcgtaggttcaacggggtcaggtaagtctcacactgttgccaaaatacttcaaaaagccatagatgaaaagcaagaaggttataatctgtactctcatagtatttgcattggatcgcagttaagtgcccatcgttgtagacatcaatatcttcaatgcattctatatcaattgagtcatccatttgtggtaacgaaaaaatttcaataa

SEQ ID NO: 121850 - DNA, 237 bp, Enterobacter cloacae
ttgaatgatgggttacttaaaaaaatattagaattggatttgtcagtatttaaagatttagagtctctaatgaaagaaaataacggtgttgcatataaggatataccgctatttaatgaaacaaatatatttggctttgagtttttgaaagttacagaccgtgttaactactcagagtttatgatcgatagaatattttttgtaaaaacaaaggcagaaataataatttctgtatga

SEQ ID NO: 121851 - DNA, 708 bp, Enterobacter cloacae
atgaaaggattatgtaccgttctcgcagctacgtccgttgtgctggcaaccgggtgccaggcgaaagagccaccgacacaggttgtttaccggttcgatgatcaccgttttctcgaattgaaaggctggggctgcgaaggtgaactctggtatacggatactcttcggggtattcataccaggcccgtcagtcaattttatcggattttcaccaaaaaatttgttcatccttctgaacgatatattgccatacccacctgggatgacccaggaacaatgatttcaaaagattatggtaaaacatggtctccccagtttttttcggtagggcctaatgagcccgatggtactaaccaaccatcctatgaggatattatttctttcaccgtcgtcaacgatcagggctttttactaaccaaacaccggctgtatatgtcatcaaagccatttgaagacccgcgcattctgcccggcgggccggggattgcctataccgtggatgacggaatgggaaataaagtaagcgatacgctggacccccgtttccctggctgggcctggggaatggtctatatgactaagcaggggcttaagcacagcacgcagcaatttaaagctaactggcaagatttacccgacagcgtacccgaagtgaaggggtacaccggctgggatcatatgcgctgtgatatggatgcggggcgataa

SEQ ID NO: 121852 - DNA, 669 bp, Enterobacter cloacae
atgtgcgagttcgtcgacgataaggcgtcggtattcccgttcgaggagctgcagcgctgcatggtcgatgcgatggaagaatgggagaacttcgagccgttcgccgaccgtccgtttaactggcgcccggtctggattggctacgacccgtcacacaccggcgacagcgccgggtgcgcggtactggctccgccgctggttgccggtggcaagttccgcatccttgagcgtcaccagtggaaaggtatggattttgccgcgcaggccgaggccatccgtgcgctgaccgagaaatacaccgtcgactatatcggcatcgatgcgaccggcatcggccagggtgtttaccagctcgtgcgctcgttcttcccggcagcgcgcgccatccgctacacgccggaaatgaaaaccgcaatggtgctgaaagcgaaagacaccatacgacgcgggtgtctggagtatgacgccggtgcgaccgacatcacgcagtcatttatggctatccgcaaaaccatgaccagcagtggccgcagtgccacctatgaagccagccgcagtgaggaagccagccacgcggatatcgcgtgggcgaccatgcacgccctgctaaacgagccgctttccgccggtagcggtatgcattcagcctcgattctggatattaactaa

SEQ ID NO: 121853 - DNA, 855 bp, Enterobacter cloacae
atgggaagtggatggcatgaatggccgctgatgatcttcaccgttttcgggcagtgcgtggccggcgcgttaatcgtgatgggcttcgtctggcttaaggaaaatgatgacaaggccagaatgcgcatcgtgcgcagcctgttttttctctggctggtaatgggtattgggtttatggcttcggtgctgcatcttggctccccgctgcgtgccttcaactcgcttaaccgcgtgggcgcgtcagcgctgagtaatgagatcgcggcgggttcgctcttctttgccgtgggcggtttctggtggctggtgtcggttatcggtaaaatgcccccagctttgggcaaaatctggctggttgtcagccagcttctgggtatcgtttttgtctgggcgatgacccgggtctatcagatagagactgtcccgacctggtatacgggttacaccacgctgagcttcttcctgacgatggtccttgctggtcctctgctggccgcactgctgctacgcgtcgcaaacgtgacattcaaaggtactcttgccgcgtctgtcagcgtactggcaattatcgtctgcgtggcggtcgtcgtgttgcaaagcaatacgctggggacgatacagagttccatccagcaggccagcgccctgctgccagattatggttcgcttcaggtatggcgcatcgcgttgctggcggcgggtttaggctgctggatctgcccgcttattcgtcgtcaggagccaaaaacactcggcctgtttgcaggtgtcgttctggtggcgctgggtgaactgattggccgtgggctattttatggtctgcatatgaccgcagggttagcaattgcaggttaa

SEQ ID NO: 121854 - DNA, 765 bp, Enterobacter cloacae; identical to SEQ ID NO: 6031

SEQ ID NO: 121855 - DNA, 318 bp, Enterobacter cloacae
gtggacgtcatagcgccagcgaatgccgttcagctgcgtcagccggttgtgcgtaaccttctcagcagatcattcgagcgggttaccggtagtatcccagcggtgcaaccaagagcactgaaaattaccggtaactatatcccggcgatgcaggcggccaagacggtcatattcgctgcgggttcgttagtgttagtagtttgcgccacggttgaatccgataatactgaactggacgatgccgaccgtgaagagtttatggaagagctgggtcaggaagggccaggcgcgaaagaaggaggcaagatgcgtgcataa

SEQ ID NO: 121856 - DNA, 207 bp, Enterobacter cloacae
atgacaagcattttacgttttttagggcttgctcctggtaaagacgaggaagaaatggttaggaaactaaagaatacctattcatcgttaaaagtggtcggtcgcgggactataacagtttctgctgatgaagttatcaataatcctgagttcaaagagttgtatatacgagccagtaacattgtagaacgcagtaaaaatcaatga

SEQ ID NO: 121857 - DNA, 165 bp, Enterobacter cloacae
atgtttgtttttttagtgatacctatattagtcagcggttttctattagtccacatccaccccatatataaatataaacttcatcgctatgaagggcagttcttatacctgaaaagtgcccaatatggtctttattcaatgatccttggggtagtaacattgtag

SEQ ID NO: 121858 - DNA, 705 bp, Enterobacter cloacae; identical to SEQ ID NO: 8686

SEQ ID NO: 121859 - DNA, 243 bp, Enterobacter cloacae
atggccggtcttaagggcgcgcaggagcgcttcgcgcgcaaagtagaacgttgcgccaatctggcgcgatttgaggatgtggcgaatgcggtgcgcgatgcctgccttatgccagttgagctgatactcaaacgactggtcaaagaaaatctcttccagcttttcaatcgcttcttcactgaagaaattacgtttcggctttttgcgatcccctttgttgcggctggcaatgttggggtttaa

SEQ ID NO: 121860 - DNA, 504 bp, Enterobacter cloacae
atgccgggcaaccgcccgcattatgggcgttggcctcaacacgattttccgccatttaaaaaactcaggccgcagtcggtaacctcgcgcatacagccgggcagtgacgtcatcgtctgcgcggaaatggacgaacagtggggatacgtcggggctaaatcgcgccagcgctggctgttttacgcgtatgacaggctccggaagacggttgttgcgcacgtattcggtgaacgcactatggcgacgctggggcgtcttatgagcctgctgtcaccctttgacgtggtgatatggatgacggatggctggccgctgtatgaatcccgcctgaagggaaagctgcacgtaatcagcaagcgatatacgcagcgaattgagcggcataacctgaatctgaggcagcacctggcacggctgggacggaagtcgctgtcgttctcaaaatcggtggagctgcatgataaagtcatcgggcattatctgaacataaaacactatcaataa

SEQ ID NO: 121861 - DNA, 231 bp, Enterobacter cloacae; identical to SEQ ID NO: 20732

SEQ ID NO: 121862 - DNA, 333 bp, Enterobacter cloacae
atgctcatctcagaacaatacaggtgtcccaatgaaaaaagaaatttcagcgcagagtttaaacgcgaatccgctcaactggtccttgatcagaactacaccgttgcagctgcggccagtgctatggacgtggggctttctaccatgacgcgatgggtaaagcagttacgggatgaacgacagggtaaaatacctaaagcctcccctataaccccggaacagattgaaatacgtgagctaaagaaaaagctacaacgcattgaaatggaaaacgacatattaaaaaaggctaccgcgcttttgatgtcagactccctgaacagttctcgttaa

SEQ ID NO: 121863 - DNA, 204 bp, Enterobacter cloacae
atgaaagcgtatgcgctacagggcgacaccctcgacgcgatttgtgtgcggtactacgggcgcaccgagggcgtggtcgaaaccgtcttagaagcgaatcccggcctgtctgagctcggcgtcatcctgccacacggcacggcaattgaactgcccgagaccgacagcgcggccagaaccgaaacggtgaatctatgggactga

SEQ ID NO: 121864 - DNA, 231 bp, Enterobacter cloacae
atgattcatatcggtgaggaaggtgcccagaaaacggacacatccaatttgcagggcaatgcccagacggttgtgatcacctctgctttttccgataaattccttgtctgcttcatcaaggtgaaaatatcgtgccagctgaagctcatccggttcaccggtgaatctgccatagctttcagtctgctcagtggtcagaaagtcaacgggcatatcggcctccctgcctga

SEQ ID NO: 121865 - DNA, 300 bp, Enterobacter cloacae; identical to SEQ ID NO: 121478

SEQ ID NO: 121866 - DNA, 1167 bp, Enterobacter cloacae
atggctgaggaagtaatcatatttgctcgttctcttccattccatcatcttggcggaatggaagttgtagcatgggatttagcggttcagctacaggttaaaggttttaaggttactgtagttaccacggattttgatgaaaatattcctgttttagaaaataacccacaaataataaagctaaaaaatatccctaaggctgcatattcggccggttggtggactgagactgaaaaaatcattgaaacatggggaactaaagataatgtcagtgcggtaattagcattagtgcaggtgcattcagtacacttaaacacaaaaaatctttcccaaatgcaaagtttattatgcaggcccatggcacatcaattggagaattagtttctaagataaaaacacggaaaattaaaaagattttatccagtgttaaaaacatatttggtttttatttagatgccaaacattactcttacttcgactgggttgttgctgttggagacgctgtaaaaaaagatctaacgtcctttccaacaacgcttatttgcagttacgataaaatagttaaaatcgaaaatggaattgatgagtctttgttctctgatgatatatcccagcgaaatactgtgcgcgagcagttaggcataagctctgaagcaaaagtattcatgtcagcatcacgcctacatgagcaaaagggggttgataaaaatatcgatctttttgctgaaataaaaaaagttaacgtagatgcgaaacttctgatttgtggtaatggaccttatgaaaaacagttgcgaaagaaagttgatgaacttaagttaaatcatgatgtgattttcttgggggctaagacgcgaactgaattggcaagaataatgcaaggtgccgatatttttctattccttaccaaaagagttgaaggattgccattgaatgtactggaggccatgagctcaggattacctcttataatatcggaacatcttacattcaattcgggtgataagatattcaagtgcaatccgagtcatattccttttaaagatgtgcagacttatattaatactctcagcagcaaggaaagaagatcgtttatccccgacaaaaatacattaagtcactctgtaagcgaatatacctcattattcttaagaaattctaaatga

SEQ ID NO: 121867 - DNA, 273 bp, Enterobacter cloacae; identical to SEQ ID NO: 121584

SEQ ID NO: 121868 - DNA, 882 bp, Enterobacter cloacae; identical to SEQ ID NO: 121598

SEQ ID NO: 121869 - DNA, 1215 bp, Enterobacter cloacae
atgacgctaacttctcctcgcaaagccctgcatctgcgcatgtgggcgctgtttatgttcttcttcatccccgggctgctgatggcttcctgggcaacgcgcaccccggcaatccgcgatacgctgtccgtctcgacggcggagatggggatcgtgctgtttggcctgtcgattggctcgatgagcggcatcctctgctcggcctggctggtgaagcgctttggcacgcgcgcggtgatccgcaccaccatgtgctgcgccgtggtgggaatgctcggtctgagcgtggcgctgtggttcgcctcgccgctgatgtttgcccttgggctgatggtatttggcggcagctttggtgcggcggaagtggccattaacgtcgagggggccgccgtcgaacaggcgatgaacaaaacggtgctgccgatgatgcatggtttttacagcctcggcacgctggcgggcgcgggcgtggggatggcgctgacggcgctgggcattgcggccaatgtgcacattttgctggcggcgctggtctgtattatcccgatcctcaccggcatcagggctattcccgcaggcacaggacaacacgccacggacgaacagaagtctgcggaaaaagggttgcccttttatcgtgatttccagctaatgctgattggcgtggtggtgctggcgatggcgtttgctgaaggctcggccaacgactggctaccgttgctgatggtggacgggcacggatttagccccacctccggctcgctgatttacgccgggtttacgctcggcatgaccgtcggacgctttaccgggggctggtttatcgaccgttacagccgcgtggctgtcgtccgtgccagcgccctgctgggtgggctgggcatcgcgatgattatctttgtggatgtggactggattgccggcgtgtcggtgatcctgtggggactgggcgcctcccttggcttcccgctgaccatttccgctgccagcgataccggccccgacgcgccgacgcgcgtgagcgtcgtggcgaccacgggctacctcgctttcctggtgggcccgccgctgcttggattcctcggtgagcactacgggttacgcagcgcgatgctggtggtattagggttagtcattattgccgccctggtggcgcgagcggtggcaaaaccggaagcagaaacaacgtcaatggagaagggatatgagcgttaa

SEQ ID NO: 121870 - DNA, 1089 bp, Enterobacter cloacae; identical to SEQ ID NO: 121834

SEQ ID NO: 121871 - DNA, 519 bp, Enterobacter cloacae
atgaatatcaataaagatgacgaactccttgtgatagttaagtatgaaggaagattttattggttcgttgcgttcaaggaaatgtgggtcttagacagagtaaaatgggtagaggattttgtgaaaagtggggtggaaataaacctacagaatacccataaggaaagatatgacataccagttgtaaatgaagaaaacgcgcagatattcattgatggtttaattaacgatggttattcatacgataaggatgacattgctgaggagttttataaaaggctttcgcaaaaaacaatttggtgggatatatatgaacttatgccggatttatttatagactttgataataaaagattatattcggaatatgttgagagtatgcattatcaagaatatgttcctgatggttggcaaggtgaacttgttgatttttgcagtaatggatcgttacctcaagatgaaatgttctggataaaaaatgaaactgatcatagaagcgttttgatcgctaaaggataa

SEQ ID NO: 121872 - DNA, 375 bp, Enterobacter cloacae; identical to SEQ ID NO: 121811

SEQ ID NO: 121873 - DNA, 777 bp, Enterobacter cloacae
atgtgtataagagacagggaaagggctctagcatcattaatcagtattgatgtagtgtccggactcgattatgcccggtttattactgacactgttgtttttattttgtctgtgccaatagcatttgctggattatctgaatggtcatcgcaaaagccagaagttgttcgagataagataaggtttatttataattggctggcactgcttgttataaacatgtcttttttcatttttttctatgcaaaagacatcgttattctactgtttatgcgtggtgcatttgatcagcactccgtaacggtaacaactgatattattcaaggaatgtgcataggcctttgggctcaggtgataggttatatattcattaaggcattgagcgcacatctcaataataagaaagtattggttgtgatgatggttgcattgctgagtaatgcggttgtcaacctggcgacgtataaaatgtggggtgcatttgggttagggctagggaattcgatatacagtttaatgatgtttatccttagcgcgtgttacttaagaattgcaaaagatctttttcctgtgttaattaaaatttctttgggattaattctttatacatctattatcttgactcttgggcattatattattcaacctgataatgttattttccgactcttgattaatggcgcaatatttgtgatgtttagtctgttatgggcaatgttattcccattgtaccgaaatggtattaaagggattttccaaaaaaagggactgagatag

SEQ ID NO: 121874 - DNA, 213 bp, Enterobacter cloacae
atgctcggcgaagggatgtcggaactgcgcgttgaccagctcggccagtgccgccccgtaggtttcgtcgcggatgtgccaggcttgcagccaggccagcttggcgtaggtcgtgccggggcacgattccgccatcttggtcaggcccaggttgatcgcgtcggcgaggatcgtggtcagcaacaggtttttgtccttggccaggtcgcctga

SEQ ID NO: 121875 - DNA, 330 bp, Enterobacter cloacae
atgaacagccagaccggcctcagtatctctgaggtcgagcatatcaggcaaagcgtgcgcgacattctcgtcacgccggttggctcgcgtgtcatgcgccgtgaatacggctcgcttctgtctgcactgattgaccagccgcagacaccggcactgcgattgcagattatggccgcgtgctattccgcgatccagaagtgggagccgcgcgtcagtctgacaaccatcacctttgagcggtcggagaccgacggcgggctgtatgtcgatatcaccggcacgcgctcggctaacggccagcccttttccctcaccattccactgagttaa

SEQ ID NO: 121876 - DNA, 468 bp, Enterobacter cloacae
atgaagaaagcaatcagcctgcgaaaagcgctaactgacgccgtcccgcagcttaaaaccaaccccgagatgatgcgcatttttgccgacgaggggaatatcgatgcacggctcgcggcctccctgtcccacgagaaaatttacaccctgaatgtgatcgtgtgcgattttgttggcgaccctgatttgattttcgtgccggtggcggcgtggctcagggaaaaccagccggatatctgcacgctcgatgaggggcataaaaagggctaccgcttccagatggatttaaacgacgaggatacggttgatatcagtatcagcctccagctcaccgagcgcaccatcatcagggaggaaaacggcgcgctgcatgtgagctatgccccggagccgccaccgcctgaacccgtcacgcgtccaaaagagctctatatcaacggtgaactggtgagcaagtgggatgagtga

SEQ ID NO: 121877 - DNA, 453 bp, Enterobacter cloacae
atgagtgactttaaaacctttgataaccagctcgcggggctgcttgctgccctgtcacccgcagggcgtcggaagcttgccggtgagattgcgaagcaactcagaacggcgcaacagcaacgtatcaaacagcaaaaagcccccgatggctcaccgtatcaggcgcgaaagcgccagcccctgagagccaaaaaaggtcgaattaaacgggcgatgtttcaaaaactgcgcactaaccggtacatgaaaaccagtggccgtgaaaacggtgctgtggtggaatttaccggaaaagtgcagcgtatcgcgcgcgtccatcagtacggcctcaaagacaggccaaaccctaatgctaaggttatgcagtacccggaacgacagctattaggattttgtaaggaagatttaagtgctattgagaatttcattttaaaaaaaatagatgaggtttaa

SEQ ID NO: 121878 - DNA, 642 bp, Enterobacter cloacae
atgaataatttaaattctctacaggaaatcgctcgggcgatccgcaacctcatccgcaccggcatcgtaaccgacgtcgaccacgacgaggggttgtgtcgtgtccagaccggcggcatgcaaaccacctggcttaactggctcacctgtcgcgccggtcgctctcgcgtgtggtgggctccgtccgttggcgagcaggtgttattgctggccatcggcggtgagctcgatacggcctttgtgctgccgggcattttctcagatgacaatcccgcgccgtcagcctcacccgatgcgcttcacgttaccttccctgatggcgcggtcattgagtacgaacccgaaaacagtgcgctcaccgtgtcaggtatcaaaaccgcagacgttactgcgtcggattccatcacggccaccgtgccggtggtgctggtaaaagcctcgacccgtatcacgctcgattcacccgaggtgttgtgtaccaacaagctgacgaccggcacgctcgaagtgcagaaaggcgggaagatgtccgggaacatcgagcacaccggcgggaaactgacctcaaacggcgtgcaggtggatgaccatgcacacggcaacgtacagagcggcggaagctggactaaggggacgcaatga

SEQ ID NO: 121879 - DNA, 468 bp, Enterobacter cloacae; identical to SEQ ID NO: 121799

SEQ ID NO: 121880 - DNA, 642 bp, Enterobacter cloacae; identical to SEQ ID NO: 121796

SEQ ID NO: 121881 - DNA, 855 bp, Enterobacter cloacae
atggcaaagaaaatctctaaatggtttcgcatcggcgtcgagggtgacacctgcgatggccgtgtcatcagcggcgatgatattcaggatatggccgacacgttcgacccgcgcgtctacggctgccgcattaacctcgaacatatccgggggctgatgcctgacagtcagtttaaacgttatggcgatgtgaccgagctcaaggcggagattatcagcgatggctcagcgctcgatggcaaaaaagggctgtttggcaaaatcgccccgctcgacgagctggtcagcatggttaaggccgggcagaaggtttacacctccatggagatccgcccgaactttgctaacagcggcaaatgttacctcgttggccttgccgtcaccgatgacccggcaagcctcggcactgaatacctcgaattctgcagccgcgccgcgcagaacccgcttgccggtaaaaaagaccagccggacgacgttttctctgtggcctcactggctgtgctggaatttgaagacgtccccgacaccatgctcaacagcctgaccgataaggttaaggccattttcagccgcaagcaggccagcgatgacatccgtttcgccgatgtgcatgaggcggtgaccaccgtcaccgaactggtgcagaccaacctcaccgccaccgaccagcgcgtcaccgagctggagaccgaactggcgcaactcaagcagtacgtgaccagcaaggcggaagaaagcgcgcaggcatttaacgacctcaaaagctccctcgataacaccgaaagccagcgccagccgcgccgcgagctttcaaaaggcggtacgggcgacgagctgctgaccaactgctga

SEQ ID NO: 121882 - DNA, 855 bp, Enterobacter cloacae
atggcaaagaaaatctctaaatggtttcgcatcggcgtcgagggtgacacctgcgatggccgcgtcatcagtgctgatgatattcaggatatggccgacacgttcgacccgcgcgtctacggctgccgcattaacctcgaacatatccgggggctgctgcctgacagtctgtttaaacgttatggcgatgtgaccgagctcaaggcggagattatcagcgatggctcagcgctcgatggcaaaaaggcgttgtttggcaaaatccagccccttgacgagctggtcagcatggttaaggccgggcagaaggtttacacctccatggagatccgcccgaattttgccaacagtggcaagtgctatctggttggcctcgccgtcaccgatgacccggcaagcctcggcaccgaatacctcgaattctgtagccgcgccacgcagaacccgctcgccggtaaaaaagaccagccgggcgatctcttctctgtggcctcactcgctgagctggaatttgaagacgttcccgacaccatgctcaacagcctgaccgacaaggtaaaggccattttcagccgtaaacaggccagcgacgacgctcgtcttgcagatgtgcatgaggctgtgacgaccgtcaccgagctggtgcaaaacaacctcaccgccaccgaccagcgcgtcaccgagcttgagaccgaactggctcagcttaagcagtacgtgaccagcaaggccgaagaaagcgcgcaggcgtttaacgacctcaaaaactccctcgataacaccgaaagccagcgccagccgcgtcgcgagctttcaaaaggtggtacgggcgacgagctgctgaccaactgctga

SEQ ID NO: 121883 - DNA, 540 bp, Enterobacter cloacae
atgccagagtattttgatttttataaagagttaatgcaggaagtgttgcttcagaatgaaaagagaatacctgtcattgagcactcggctgctatccatcttaagcgaattttcaatccgggtttcagtggttatgcagatctaaaatcgccaagcggagtcgtgctgaactgcatcctgtttaattatgacggtaaagtctacggtagtgatgaaagtcgtatgcttcagaaagtaaacccggaagcagattttagtgcaggagagtttgcctcactctcattcagtagcaacgaatactaccgttccgctctctcatcttcatttaacttcgccatgccaggttgtgacacatgtgcataccagcctttctgtggagcagatccttgccagaacattagtgttcatggcgaacctgttggtgacaagagtcggtcaactttctgccagtatcacaaaggcatgttccgcttcctgctgaatgaaatctctcaggatggaccgatggctgaaatgctcaaaaggtgggcttatgtctga

SEQ ID NO: 121884 - DNA, 897 bp, Enterobacter cloacae
atgcagcctaaaactaatgatgttccaataatccacattgaaattaaaaaaataaaaatacttaacccacgaaccaggaataaaggagtgcatgatgaaataaaagaaagtataaaaaaaagaggcttaagcaagccgattagtgtaagagcgattcatgaaaatgatttcaattatgccttgatttgcggtcaaggaagaatagaggccctcgttgcattaggtgaaacaacgattcccgcaattataagagatgtttcagaggaagatgcttatgttatgagtttagttgaaaatattgccaggaggagaccacgttctaatgagttacttcagattataaaagatatgaaaatcagagggctatccgattctgaaatcagcgagattactggctattcttcgaactgggtaaatagtataaacatgcttcttgataaaggagagcataaactactttctgctgttgaaagaggtaatttaccattgtatctcgcagttgaattcgcaagatgtgaaaccgaagaagcacaaaatcttcttactgatgcatacgataaaaagataataaaaagcagggatattataaaaataaaacatatactaaatcagcgagaaactggcaataaaggaacaaaatcaggcggttttttttatcataagcctgcaaaaaaaatgtctgcagaagaattaatctctctatatgagaatagcatcgctgaacataaaactgtatgtaaacactctaagtttgtaaaaactaatcttttaatagtaaacgaaatttttaatataataatgatgaataaaagctttcaaaacctacttgagcaagagaacctctcggaactaccatcgcaaatcataaatccattaaataaagaggtatcacaatga

SEQ ID NO: 121885 - DNA, 780 bp, Enterobacter cloacae
gtgccggggctggattctctggaagtggcgaccgcgctcgcggcaacctgtcagagcctgcgcgcgtttggttacattagcgcatggggctgcaagaccatttctgacgccatcaaataccgtgagaatttcagtcagcgcgagctgatggtcattcaccctgattttctcgcatgggacaccacggcgaacgaaaccgacattgcatgggcgaccgcccgcgcgctcggcctgcgcgccaaaatcgaccaggaaaccggctggcacaaaacgctctctaacgtcggcgtgaatggcgtcaccggcgtcagtacctcggtctcatgggatttgcaggagaagggaactgacgcgaacctgctgaatcaggccggggtgacaacgctcatccgtaacgacggctttaaattctggggcaaccgtacctgctcagatgacccgcttttcctgtttgaaaactacacccgcacggcacaggtgctggccgacacgatggctgaggcgcacgcgtgggcgattgataaacccgttaccgcaacgcttatccgcgacattgtcgccggtatcaatgcgaaattccgcgagctgaaaaacaacggctatatcgttgacggtacgtgctggtacgacccggagtcgaacagcgtggaaaccctgaaagccgggaagctgtatatcgattacgactacacccccgtccctccgctggaaaacctgaccctgcgccagcgcatcaccgatacctatctggcagacctgtcagactcggtcaacagctaa

SEQ ID NO: 121886 - DNA, 780 bp, Enterobacter cloacae
gtgccggggctggattctctggaagtggcgaccgcgctcgcggcgacctgtcagagcctgcgcgcatttggttatatcagcgcgtggggctgcaagaccatttccgaagccatcgcctaccgtgagaatttcagccagcgcgagctgatggtcattcaccctgattttctggcgtgggacaccacggcgaatcagaccgatattgcatgggcgaccgcccgcgcgctcggcctgcgtgccaaaatcgaccaggagacgggctggcacaaaacgctgtctaacgtcggcgtgaatggcgtcaccggcgtcagtgcctcggtctcgtgggacttgcaggagaaggccaccgacgcgaatctgttgaatcaggccggtgtcaccacgctgattcgtaacgacggctttaaattctggggcaaccgtacctgctccgacgatccgttattcctttttgaaaactacacccgcacggcgcaggtgctggccgacacgatggcggaggcgcacgcctgggcgattgataaacccgtcaccgcaacgcttatccgcgacatcgtcgccggtatcaatgcgaaattccgcgagctgaaaaacaacggctatatcgttgacggcttctgctggtacgacccggagtcaaacagcgtggaaacgctcaaggtggggaaactgtatatcgattacgactacacccccgtcccgccgctggaaaacctgaccctgcgccagcgcatcactgatacctatctggcgaacctgtcagagtcggtcaacagctaa

SEQ ID NO: 121887 - DNA, 357 bp, Enterobacter cloacae
gtgtggacgtcaggcatcggccacactgccggtgtcgtcccgaaaggggaaatcacagaacgtcaggcggcggcgaacctcgtcgcggatgtgatgaacgtcgagaagcgtctcgcagtctgcgtgccggtagaaatgccgcagcacatttacgacgcgctggtcagcttctcattcaatgtgggaaccggcgcggcctgccggtcgacgctggtctcatacctcaagcgtcaccaatggtggcaggcgtgcgaccagctcacccgctgggtttatgtgaatggctcaatcaataaagggctggaaaatcgccgcgcgcgtgagcgtgcttattgtatgaaaggagtttctcaatga

SEQ ID NO: 121888 - DNA, 564 bp, Enterobacter cloacae
gtgcgcatcgagcaggtcggcggcgctcacctttttgatgttgaaaaaatcatccttcgtggcgacttcactcagcggcacaatcttgatgccgtccggtttcccgttcggggcgtagaaaaacaggtttttgaaattcccgagccctttcgagtcgcgcatcgcggagcgcagcgcctcgacgtcggtgctgctctgcgccgcgtcggtgacgtacatgatgtaacccgcgtgcgcgccgttctggtaatacttgcgacgaaacagcgtggcggattcattcagccaggcggaattaagcgcgctcaggtattccggaatcccgtagagctcctgattgatatcgggctcaagcaggtgaaacaccgaaccgggcgcgaactggtgcgggcgcgtatagtccgacacgtaccagtaaacgccatcctcaacgccacgtcgggtgtatttggccggggaggtttccagtttaaagagctggccggtcacgctcatgcgcttctcaagatagccgttggcaaacaccagataatcgagcacaaggcggctgaaatcctgccgtga

SEQ ID NO: 121889 - DNA, 750 bp, Enterobacter cloacae
gtgcgcatcgagcaggtcagcggcgctcacttttttgatgttgaaaaaatcatcctttgtggcgacttcactcaacggcacaatcttgatgccatccggtttcccgttcggggcatagaaaaacaggtttttaaaattcccgagccctttcgagtcgcgcatcgcagagcgcagcgcctcgaggtcggtgctgctttgcgccgcgtcggtcacgtacatgatgtaacccgcgtgcgcgccgttctgataatacttgcgacgaaacagcgtggcggattcattcagccaggcggaattgagcgcgctcaggtattccggcatcccgtagagctcctgattgatatcgggctcaagcaggtgaaacaccgaaccgggggcgaactggtgcgggcgcgtgtagtccgacacgtaccagtaaacgccatcctcaacgccacgtcgggtgtatttggccggggaggtttccagtttaaagagctggccggtcacgctcatgcgcttttcgagatagccgttggcaaacaccagataatcgagcacaaggcggctgaagtcctgacgcgacagcaacgggtgcgggataaaggtactggtcagaatgttgcgctttacgtaaatcggggagctgtggtgtacggcggcgcgcaggctttttgccagtcccgagaagttgaccggcggctcgtaccatttgccgttattgatgcactcgacatagtcgaggatgtcgcggcgatccagaacgggtga

SEQ ID NO: 121890 - DNA, 255 bp, Enterobacter cloacae
atggtgctgaaagcaaaagacaccattcgccgcgggtgtctggaatacgacgccggtgcaaccgacatcacgcagtcatttatggctatccgcaaaaccatgaccagcagcggccgcagcgccacctatgaagccagccgcagcgaggaagccagccacgcggatatcgcgtgggcgaccatgcacgccctgctaaacgagccgctttccgccggtagcggtatgcaatcagcctccattctggatattaactaa

SEQ ID NO: 121891 - DNA, 756 bp, Enterobacter cloacae; identical to SEQ ID NO: 121840

SEQ ID NO: 121892 - DNA, 432 bp, Enterobacter cloacae
gtgcgccagtgcctcgggcagttgctccgcgtcacgcagcacgtagccggtgattttgtgcagcttcgcacgcacgatatcgggcatatccgcgcgttcagtcagcgcgatagtgtcgagcaggttcgccagactgaccggctgttttgccgtgagcaggcgctgcgcggccagtgccacttcttcggccagcaggcacggcgtcggacggcgaccgaccggcatggtgaggccgtaggtcatggcgtaacgggcgatttccagcgccccggcgatatcgtcagcatcgagacgccagagcatcaccgtcataacgatgtcatcctgcgcgcctttgccgttttcgagtacgccagcgacccacggcagatagaacggcagcagctcgcgctttttcgcggctttgcgctctttggagctgatttgttttag

SEQ ID NO: 121893 - DNA, 426 bp, Enterobacter cloacae; identical to SEQ ID NO: 121801

SEQ ID NO: 121894 - DNA, 354 bp, Enterobacter cloacae
gtgtggacgtcgggcatcggccacactgcaggcgtcgtgccgaaaggggaaatcaccgagcggcaggcggcggcgaacctcgtcgcggatgtgctgaacgtcgagaaacgtctggcggtctgcgcgccggtgaaaatgccgcagcacgtttacgacgcgctggtcagtttctcattcaacgtgggaaccggcgcggcctgccggtcgacgctggtctcgtatatcaaacgccagcaatggccgcaggcgtgcgaccagctcacccgctgggtttacgtgaatggcgaaattaacaaggggctggaaaaccgtcgcgcgcgcgagcgtgcctactgcctcagggggattgaatga

SEQ ID NO: 121895 - DNA, 705 bp, Enterobacter cloacae; identical to SEQ ID NO: 8686

SEQ ID NO: 121896 - DNA, 378 bp, Enterobacter cloacae
atggacgaacagtggggatacgtcggggctaaatcgcgccagcgctggctgttttacgcgtatgacaggctccggaagacggttgttgcgcacgtattcggtgaacgcactatggcgacgctggggcgtcttatgagcctgctgtcaccctttgacgtggtgatatggatgacggatggctggccgctgtatgaatcccgcctgaagggaaagctgcacgtaatcagcaagcgatatacgcagcgaattgagcggcataacctgaatctgaggcagcacctggcacggctgggacggaagtcgctgtcgttctcaaaatcggtggagctgcatgataaagtcatcgggcattatctgaacataaaacactatcaataa

SEQ ID NO: 121897 - DNA, 276 bp, Enterobacter cloacae
gtggcttccatttccatcagatgtccttcctgctccgctactgacggggtggtgcgtaacggcaaaagcactgccggacatcagcgctatctctgctctcactgccgtaaaacatggcaactgcagttcacttacaccgcttctcaacccggtacgcaccagaaaatcattgatatggccatgaatggcgttggatgccgggcaactgcccgcattatgggcgttggcctcaacacgattttccgccatttaaaaaactcaggccgcagtcggtaa

SEQ ID NO: 121898 - DNA, 135 bp, Enterobacter cloacae
gtggaaacgctcaaggtggggaaactgtatatcgattacgactacacccccgtcccgccgctggaaaacctgaccctgcgccagcgcatcactgatacctatctggcgaacctgtcagagtcggtcaacagctaa

SEQ ID NO: 121899 - DNA, 204 bp, Enterobacter cloacae
atgaaagcgtatgcgctgcagggcgacaccctcgacgcgatttgtgtgcggtactacgggcgcaccgagggcgtggtcgaaaccgtcttagaagcgaatcccggcctgtctgagctcggcgtcatcctgccacacggcacggcaattgaactgcccgagaccgacagcgcggccagaaccgaaacggtgaatctatgggactga

SEQ ID NO: 121900 - DNA, 333 bp, Enterobacter cloacae; identical to SEQ ID NO: 121862

SEQ ID NO: 121901 - DNA, 906 bp, Enterobacter cloacae
atgtccgtttcccgttttaccttctccattaagcctcaggaagcgatcctgattttgatcaccatgttctggggcggaacctttcttgccgttcagtacgcggtcacgatgagcgatccgtttttctttgtagggctgcgctttgcaaccgcggcgattgccgtggcgcttatttcgctgaaaaccctgcgcggattgaccctgagagagcttaaggcgggtgtcgccattggtgtggcgattgccatgggctacagcctgcaaacgtgggggctccagtctatctccagcagtaaatccgccttcatcaccgccatgtacgtaccgctggtgccgctgttgcagtggctgtgcctcggcagaatgccgggcctgatgtcgtgcattggcatcgtgctggcgttcatcggccttattttattagccgggccggaaaataatctgctggcgctggggccgggggagatcatcactctggtgggggccgtcgccattgcggcagaaattatcctgattagcgcctgggcaggaaaagtggacgtcaagcgggtgacggtggtgcagcttaccaccgcgtcgctggtggcgttcgcgacgatggtgccggcaggggagtccgtcccgccgatgtctaccgggcttatcgtcgtggcgctggggctgggcattttcagcgccattatccaggtcaccatgaactgggcgcagcgcagcgtatccccaactcgggcgacggtcatttataccggtgaaccggtatgggcgggtattttcgggcgactcgccggggagcgtctgcccctgctggcgctggtgggcgcggcgtttattgttctcggcgtgctggtgagtgagttaaagctcagaaagcgtcggaatgcggtgaacgatttaacggccgaataa

SEQ ID NO: 121902 - DNA, 270 bp, Enterobacter cloacae
atgccagcactcaaaaaacagcgtatcgatcttcgcctgtcggacgaagacaaaacaatgattgaagaagcggcagcgatgaccaaccaaacgatcacccagtttatggtgaacagtgcgtcagagcgtgctgccgaagtcatcgaacagcatcggcgtctcgtattaaacgaagcctcatggattgccgttatggatgccatcgacaatccgccagagccaaatgaacgcctgaagcgagcggcgaaacgtcttcgaaacatggagtga

SEQ ID NO: 121903 - DNA, 522 bp, Enterobacter cloacae
gtggcaaatctcacgatcgaaatgttatcagagggaaccgattacgatttcggcgatttcgattgtggtgaaccctcgctaaatgccttccttaccgagcacctgatacgtcagcacggcgggcgtattttacgcggctacctgcttaaagaacgcgaccatccgcgtgtcctgggctattacacactctcgggaagttgctttgaaaaagcgatgcttccttcaaagactcagcagcgccgcatcccatacagcaacgtccccagcgtgacgctggggcgtctggctgtccataaagaactccagggaaacgagtggggaacaacgcttgtcacacacgctatgcgcgttgtttatctggcctcgcaggctgttggcgtccacggaatttttgtggatgcgcttaacgaacgggccaaacgattttatctgaagctggggtttatcccgctggcaggtgaaaacagcagttcgctgttcttccccacgcaatctatagaacgactgtttgagcaggcgtga

SEQ ID NO: 121904 - DNA, 477 bp, Enterobacter cloacae
atgcgtactcataaacagaataagcctcgtaaactgtattgcagcgtcaacacgactacgcggcaccattctaataatccaggtgctgaatattgctgggaacgtaatcgtaaaagagtcggggatgaactactggccaagcgcgagtcaatacatggcggacagaagcatggccgagactacacaccattgttttattttctgatcaaaaagattggcaaatcgtggaatgaaatattcagcgaagtatgtggacgtcttgataccaccgagcctgtattctggttggtcgcgctacatgagcatcagcgaagggatttattctgcattggcgaaagcagtttttatccgggtctgtttgttgatgagaatggaattctgcaagaggtaaatacttcaatcacgataaaggatgttaaggtgacttgccgctgctgcacacacacacttatattggagaatctgtaccctggatag

SEQ ID NO: 121905 - DNA, 1008 bp, Enterobacter cloacae
atgtataaatgcctcaggttgccttttgacaaagtaaaaatcgacagaatgtgtgatgagaaaggtaacaatgcctcatacgtaagaatcacctacaatgagttctactattatttaagttactacgatctgagaccagtcacaccaagttttaattccattgaatgcattcccaaaaacagcgatctttatatcattgtatataaaatatcacctaatagctataggatatgctggctaggagattgcgattgcatcgagttcagaatgatggacactgaaagaaatcgtggtaaatctgcatctttagctgtattgcttggtctgattttatgtacactttctataggtgcgtattactcatctagcactgatatatttgtatgttatgtcccatttttattactaagtttgtttggttttatcctgacactccttaatttttgtcatacatactcagatgaattcattcaatttcgaggtttgatgcgaaaaaaccttatgcaagaaaaagatttattttcctctgtgacaaacttatcaaaaagttgccagcataaacaagattacgagctaaacctaagattacctaaggaactcaaccgaagaatagttacaatagactctgtataccgggagagaagaaaagtaactgtatacgagcccaatactggttcagatttgtcttatagtacaagttatacaaaatgcatggtgaatatggtttgtgatggagaaaaatttacatttgagtataaggaggcttctggtgatccagctccatttattgcaaagggcgataaagccaaactatattggtatggaccggaacacgaagtaattcctagtgatcgcgaagatattacctatggaacacgacttatctgtttacataatataacaacggataacttttatgaaagtcgcatgtgtaatgaaccgggtaatgttttcaaactatcgcagaagggaggacgggatatttataaccactactcgcaatgttga

SEQ ID NO: 121906 - DNA, 1302 bp, Enterobacter cloacae
atgaaacgacatgctttttttgcctctttacttgctttatcggcttctgtttttgcgaacaactatccggttctgacgaatgcacaaccggaaagcgtgggctttaatatcgataaactgaaaaaactggatagctggattcaggatcagatcaacgccgggtatccgggtatgaacgtcgtcgtgataaaagacaatcatatcgtctttcaaaaagcctggggttatgcaaaaaaatacgacgactcccatttgatgggtaatccgctacgcgcgacaacagagacaatgtacgatctggcttccaacacaaaaatgtacgccacgaatttcgcgcttcagaagttggtttacgaaggcaaaattaatgtcaacgatcgggtcacgaaatacatacccggattcacagatcaactcacagagaagattaaaggaaaagatgccctgcgaattattgatattttgcatcataccgccggcttcccggccgatccgcaatatccaaacaagcgtgttgcaggcagcctctactctcaggataaacagaccacgctggagatgattaagcgaacgccgcttgattattcgccaggtacaaaacatgtctacagcgacgtcgattacatgatcctcggatttatcatcgagtccgttaccgcaatgccgcttgatgtgtatgttgagaaacatatttaccagccgctcggcctgaagcacacggtgtttaaccctctgttaaaaggctttaagcaacagcaaattgccgccaccgaacttaacggtaacacccgggatggtgtaatcagttttccgaatattcgtaccactaccctctggggccaggttcatgatgaaaaggcatggtattccatggagggcgtttcaggtcacgcaggtctgttctcaaatacacatgatattgccgtgctgatgcagaccatgcttaacggggggcattatggcaacgttacgttatttgatcagagtacagtagatgagtttacccgtagctcggcggcagatgtcacctttggactgggctggagggttaacggtaattcctcaatgaccccaacctttggcgtactggcaagccctcaaacctatgggcatacgggctggacaggcaccctcaccgccattgatcccgtaaaacgtatggcgattgtcattctgggcaaccgaccacactcgcccgtcgctgatcctaaaatgaatccgaatgtttttgtcagcgggaccttaccggcggcaacatatggatggattgtcgatcagatctatggcgcactgaacgagtaa

SEQ ID NO: 121907 - DNA, 1422 bp, Enterobacter cloacae
atgtctaaacatattagcaccgatctactcgcgaaaattattgttctggcaggtggcaaaaacaacattctgcattgtggcaattgcatgacccgcttgcgtctgaaagtggcggatacaacgttaatagcacaccatgtgaaagaacaactctcagagagtatcagtggtgttgttataaacggcaacgaagtgcaggtcatttttggcgttggtaaagcgcagagagcggcagatagcatgaataatctgctagacaaaaaagatttgcatgcaatagccgatgaaaacaaaagtcagctcaagagtaagcagcaatcatctttgcaacaattcctggcaaactttgccactatctttactcccctgattccgggctttatcgcgtcaggtttgatgctcggtatcgccacgttgttagggacgttaatgcatattgcgccagaagctaaaggaacactccctgatgcgctaaatttcttgaaaatttttagtaaaggactcttcacctttcttgtgattttagtgggatacaatgcgcaaaaggcattcggcggtactggcgtaaacggtgcaatcatcgcggcactgtttattctgggttataacccgtcagccacagtaggctattattccggactacaggatttttttggtctcactatcgacccgcgcggaaatatcatcggcgtgctgctggcagcatgggccggagcgaagatcgagcgcgttataagaaacgttattcccgatgagctggacatgattttaacgtcgatgctgacactcattttcaccgctgtattgacatatattgtgatcatgcccattggtgtctggctgtttcaggggatgtcctggctgtttatacaccttaacagtaatccgttgggctgcgctgtactggcaggcgttttcctgattgctgtggtatttggcgttcatcagggatttattcctgtttatctcgcgttaatggactctcaggggtttaattctcttttccccatcctctcaatggctggagctggacaagtaggtgccgcgctggcgttatactggaaagcagacgtttcttccacgctgcgtacacaaattcggggagcaatcatccctggtatattgggtgtcggtgagccgcttatttatggcgttaccctaccacggatgaagccttttattacggcctgtataggcggcgcagcaggcgggttattcattggaactattgcatggttagggctcccggtcggcctgaacagcgcgttcgggccatctggcctggtagttttgccgcttatgacctcagcaaaaggtatatttccagctattgcagtttatggtgtaggtatagtgatttcctgggtatgcggttttattataacccttctttttggttgcaagaatgtggatttacattga

SEQ ID NO: 121908 - DNA, 912 bp, Enterobacter cloacae
atgaatttagatttgagcaagatggtgactgaaaacgctaatccagcatctatggaaattgaccgactaagcacagttgaaatgtgcagggtgatcaatgcggaggatcaaaaagtggccctcgcggtagaaaagtgtttacctgatattgcagccgctgtggagttaatcgctaaagccgtcgcaaagggcggtcgcttaatctatgttggcgcaggcacctccggacgattagggatccttgatgccagtgaatgtccgccaacctatggcgtaaaaagcgaactggtgcagggaattattgccggtggtcatactgcaatcctgaaagccgtagagggggctgaagataaccgccaggcggcaattcacgacctgaccgctattgacctctctgtggctgatactgtcgtgggtattgctgcaagtggacgtacgccatatgtcgtgtccgcgctagcgcacgcacgcaatgtaataggttgcaatgttatttccatagcatgtaaccccggcagtgaaattgctgaatacgccagtgttgccataacgcctgttgtaggctcagaagtgataacgggatcctcgcgtatgaaagccgggaccgcgcaaaagctgatcctcaacatgctttcaacctgtttaatgataaaaatgggaaaagtgtatggcaatttgatggttgatgttgtcgcttctaaccgaaagctctttgaacggcaaattaagatcgttaccgatgctactgcctgctcacggcgcgatgcagaaaatgcgttgaagcaatcacaccgaaactgtaaatcagccattgtaatgattttgagtcagtgttccgccgatgacgcccaagcgttgctgtcgaaaaacgggggttatatacgggcggccatttctaaggaagcgaaataa

SEQ ID NO: 121909 - DNA, 558 bp, Enterobacter cloacae
atgaaagcattactattattattttttatgtcgagctttgcatgcgccagagtcacacttgacttgggtgaaaacattgttgttctggccgctaaagattcgaagctatctctcttttcaaagagtctgactctaccagacggcgagcaaaagcttgttattaaattcgatagttccgtcaatccggaatccgtcaatcaaggtaaagggcgaatgacctcagcaccttatatatttacatttaactatagcggcagagaaaaactcatacttaccaccccgaaggtcatcgatgaaaaggaggttatagaccaggctcgcaatccacaatttatgctgagggccaatgatactaccatcccctttaccatggaaaaagttttcccagagagcattaacattttttctgatttcaggtcattcctcgctgaggataaaaatcaaatcgacggtataaaacaagacagcacagataaccttgatcaggttaaatcggcctatcttggcttacctgataaacagaaactctcattcatgaaatggttgttaaataattaa

SEQ ID NO: 121910 - DNA, 1086 bp, Enterobacter cloacae
atgagaaatggactgaaacatttatcctggttattaattacacttgcttcttcaggccatgcagccgtcatttatcaggctaacgatggctctaacattgacctttacgggcgccttggttttaacgtgtcagataaaaaaacaggtgacgtttcaggcgattttgatggtcgaattggtttctcggcacgccagatgattgatgacaaatttgccgtgattggttttacacaataccaggtgaatgcagccgaatacgcaaacaatatcaaagcggaggacccagacgatttgaccgcacgatatgtctgggcaggcgttgacttcgccgagtacggtaaaatcacagcaggacgcgtttcatccggcctaattatgtttacagacattggtgatgtatttgcctcgtccgacgttgctatggcccgccaggcaaattttatcgatcccaccgctgttcaggttttccgccaggatggcaccatacagtaccagaatacgttaggaaatcttgacgtatccagtgcgtggattattggcaataattcatctgaccttgattacggcataaatactgctctgcgttatacactcgatctcggctttgcgggcaagcttcagcctgttatcgccgtgcagcaatcgcaggccagccatgatgagacctctgcgcaatctgatgatgatgctgataaataccagatgtggggagtaggtactcgttattatttgggtgattttatgtttggtctactctattccgaagatactgttgagtatcttgatggccgtccggacagcactgataaagattacgaagcaacaattgtctggtcgctgacgcctgaatggtggctccggactggctatcgtcatttagaaaatcatgacggtgacggacttaagcttcgagatgcgacctttgaagttcagtacaaagccaccgcaaaaagctcagtttatgcctcgtattcctggcgcaatggtgaagccggcaccaacagggttactggcgacaacgtttcttttggtggtagcgacccggcagatgactatttccacctcggattacgctatgaattttaa

SEQ ID NO: 121911 - DNA, 852 bp, Enterobacter cloacae
atgagttgtttgaaaaaaataagaatggattataataattatactgatacagagaagaaaattgctctatacatcatcaatcatcttgatgctttcaaaggatgttcttcccactcaattgcgctagcattgtgtgtcgcccaatcatctatttcaaagtttgccaaaaaactcggtgctcacggcttcgccgatctaaaattgatgctgatagaagaatacagcagagaaaaaagtgcaaaagctgattatagccttcacagtactattcatagttctgaccctttaaatgtaatagctgataagttaattgcagaaaaagttcatgcattaagagaaacgacagtaaatatggattttgtaaaactggaaaagataataggaataatagataaggcgaggcatatacaaattgttggtctcggaggctctgcgctggctgcaaaagatctcgcttttaaattattaaaaattggctatcgtgtaacatgtgagattgacacacatgtgcaaatatctgttgctcaggctttgaataaagatgatatacaaatttccttgtcttactcaggtaagaaaaaggagatattgatcgccgcagaagcggcaaaagagaaaggcgcgaagatcatagctataacatcactggcaaataatcctttgcgggagagggctgattatattctggagacggtatcgaacgaagatgaatggcgcagctcatcgatctcttcccgaactgcccaaaattgtataacagatttgttatttgtcggactgctacagcgcaatgacaggcactcactcaacatgatagagcgcagccgtgaacttattaaccggcttgagtaa

SEQ ID NO: 121912 - DNA, 750 bp, Enterobacter cloacae
atgagtgaagtggcgaaacgcctcggaccggatatccatcagaaattcactgaaggccgtacgcaggagcagtggctgcgctacctgtacgccaaaatggtcgccaaagatccgctgctgccgtcctacgacgcgctgaaaaaaatgggtatttataagcgcaaagatcctaacggacatttcgtggcctataaaaaattccgtgacgatccggatgccaatccgctgaaaaccccgtcgggcaaaatcgagatctactccagcaagctggcggatattgcggcaacctgggaactgcaaaaagacgagaccatcaccccgctgccggtctatacctcaacctttgaaggctgggacgcgcccgagcgcagcaaattcccgctgcaactgttcggtttccactttaaagcccgtacccactccagctacggcaacgtggatgtgctccaggccgcctgtcgccaggaggtgtggcttaaccctgtggatgcggagcaacgtggaatcaaaaacggggatatggtgcgcgtcttcaacgaccgcggcgaagtgcgtattgccgcgaaagtcaccccgcgcatcatgcccggagtaagtgcgatgggccagggcgcctggcatgacgccaacatgaacggcgatcgtgtcgatcacggctcctgcatcaataccctgaccacgcaccgcccgtcaccgctggcgaaaggcaacccgcagcacacgaacctggtgcagatcgagaaggcataa

SEQ ID NO: 121913 - DNA, 219 bp, Enterobacter cloacae
atgaattattataatcaatacaaaataaatattattaattacgtggaaaacaaggtaatctccacgccgttatatgcctttaagattttttcatccataattcacgtgaatattgttcagaacattgagacaattttcaccgatcttctggattcgcccggtgcacgtgcatcgggcttttttatggcaaaaaaatgcccggacaagccgggcatatag

SEQ ID NO: 121914 - DNA, 984 bp, Enterobacter cloacae
gtggagagcatcaaagggtctgaggttaacgtacctgacgcagtttttgcatgggtgtttgatggacgtggcggcgcaaggccgcttgaagatcaggatcacatcgacagcgaacatccatgctggctgcacctcaactacacgcacccggacagcgccgagtggctcgcgtccacgccgctattgcccaacaacgttcgggatgcgctggcgggagaaagtctcagaccccgcgtcagccggatgggtgaggggacgttaattacgctgcgttgtataaacggcagtacggatgagcgtccggatcagctggtggctatgcgtgtttatatggatgaacggctgattgtttccacacgccagcgaaaagtgctggcgctggatgacgtcattaacgatctgaaagagggcacggggcctacggattgcggcagctggctggtggatgtgtgtgatgcgctgaccgatcatgccagcgagtttatagaagaacttcacgataaaatcatcgatctggaagataacctgctcgatcagcaaatccccccacgtggttttctggcgctgctgcgtaagcaactcatcgtgatgcgccgctatatgaccccgcagcgcgacgtttatgcgcggctggccagcgaacgtatgagctggatgaacgacgatcagcgccgcagaatgcaggatatcgctgaccggctcggacgtggtctggatgagattgactcatgtattgccagaacggcagtcatggcggatgagatagcccaggtaatgcaggagtcgttagccagaagaacgtacaccatgtcgctgatggcgatggtctttttaccgagtaccttcctgacggggttgtttggcgtaaacctcggagggatccccggcggtgaatatcactatggcttcaccacgttttgcgtcatgttagtggttttgattgggggtgttgcatggtggttgcatcgtagtaaatggctgtaa

SEQ ID NO: 121915 - DNA, 1131 bp, Enterobacter cloacae
atgctaagaaatattagtgtcagaacgttcattgtctatttccttttatgtgtatttttggtaagtgatggagttatagcgctattttcacgaaattcttcgctttttattgcagtcataattgtacaattcatcgccttatttttgctttgggcgtacatgacaaaatatcttgtgacgccgatcaatacggtgaaaaaaagtattgaagaagtgacgtcaggcaaacttggcgtgtcgatacctgaatttggcaacaattgtgcgggacgactgatcccggggattaatagtctctccagcaacattgcaacgctggtccgtgagatccgcgcctcctcgcaaaccgcgatgaccctgtcagatcaactctcttcacgcagcgcgcagctttccgtcaaaacagaacagcagtcagcttcgctggtgcaaacggcagccagcatggaagagatggctgcaagtacaaaaaataatgccgacaatacccgtttagccagcgaacaggcgaatctcgcgacgttgcaggcgcgtaaaggcggggagttaatggggcaggtcgcgaacaatatgcagtcgattaccgactgcgcccagcaaatgacagagattatctcgctgattgacggtatcgcttttcagaccaatattctggcgcttaacgccgccgttgaagcggcaagagcgggagaccatggtaaagggttttctgtggtcgcgggtgaagtgagaagcctggcgcatcgtagcgccgaagcggcaaaaaatattaagtcattgattgaagtcaccagccataacgtgacgcagggcgttaacgtggtctctgaagccgaaaaaaacatgcatgacattgttaccggttcgggcaatgtgagcagactgatggatgaaatctccgcctcaacatcagaacaggaaaaaggtatttcacaaattacgcaggcattgtcagagcttgaacgcgtaacgcagagcaacgtgtcgatggttgaagaactcaatggatcgtcagatgtgctgcgcaatcaggtgattgagctccagacacgaacacgtaatttccgtctggaaaatgagttccagactgacaatgcgttaagaagccgcgaatgggcggtgaattcctga

SEQ ID NO: 121916 - DNA, 456 bp, Enterobacter cloacae
atgccacagggacacaacacgccatcgctgtatgaaatgctgagcggcaatttctcaggtggcctgagcctcaaccaggtcagcgaacagaatcaggtgattttatcagtactcgataacatgcagcgcatcctcaactgccgcgccggtacgctggctcacctgccggactacggcctgccggatatgacaaaaatcctccagggaatgcccggtaccgcccatcagctgattaccacactgtcggccatattgctgaaatatgagccgcgcctgagccggattaacgtggtgatgcaggaacagattcagcccggtgaactccgctacgccattgatgcggagctgaagggggtcgggctggtgcgctacggcacggaatttatgcccgagggcagggtattaatccgtcatctgaaacaacagcaatacctcgatgcacgagccgccatctag

SEQ ID NO: 121917 - DNA, 276 bp, Enterobacter cloacae
atggataactggtcagcgctttttgacggacagacccgatattttctggatatcaatgacagttcagtgaagccggatgttctgcgcttttacggcagggaagccctgagcgaaccattccgctgggacatcgagttcacaacgtttcaggcgaacattcccccggaacaggtgctgatgaaatatgcctccttccggatgcggagcggcaaaagtgtgcacggcatggtgacccacctggaatggctttccacctcaaaggaccagtctcactaa

SEQ ID NO: 121918 - DNA, 525 bp, Enterobacter cloacae
atggcaacagtaacccgctggcgggcgcttacgcttattgcctgtggtctgctcgcaggctgcgctctgacacagactgtcacggacggtacggtcagcatcacgaaatccatcttctacaagaaaattaaaacgctgcatctggattttaccccacgcacggccattaacgccgatggcgcacagacgccgctggcgacgatggtgcgggtttatcagctcagggatcgtaaagcagttgatgccgccgattaccagacgctgcttcgcaatgccgatacggtccttaaagacgacgtactggcgtcaaaatcggtgctggtgatgcctaaagtcagcgtgactctcaatatgcccatggatgaagatgctcagttcgtggctgtggtgggactgtttaaccgcccggatcagaaggataaccgctggcacctggtactgacccgtgacgatctcgacccggacaaaccccgcacgattgaactgggtgatggctggctcagcctcgtgccggtgaaggagtga

SEQ ID NO: 121919 - DNA, 1236 bp, Enterobacter cloacae
atgaatacagaaaaacagtttttcaaggcgttcgacgaagccagttgggaatttacatatggccatctggataatatggactataacgtcttacaggtaggtctgacagccacgctgtatattaacgaaggctggcgtccggaaaatcgggaagcaatggcgaacgcgattgaacgttatgttgatgaattcggcgataaattaaaatggggttttctgggggatgtaaacaagccagaaccttttgttctagccgacaatttctcaagaaaacaacgcctttcagatcttgaggatgatacggcagatgtccagtggggctcagaatattataaggattatgtcagcgattatcagataaatatatactcaccggcaggatggtttgaacatatccaccgtcgtatatcatgcataaccttctttttaccagtgtcggaattaaaaaataatggacaggagcattttgaaacgctggtattagacttttgtcaacttattcaaccaatgcatggtctggcgggactgggcacacaacaactgtatgatgataacccgtatcagtatctggagtgcgaaattgctcagaacttcactggaatagatattaccagattattaacagataaaggattgcgtaatggtacacgttcagtcaactggtacaccattctgtcgaacgaatgggtggaaaaagccggggggctggcatatctggaacagctgtttacggatagcgatatcaaagtcctgccttatagtggtggcgtggcaatccgggccggagagtggccggaacttggctgggtggaaaaggatccgatgccggagctttatgtcagagtgaatgaggttttaaaatctgtccgtacaccatcatttggctcattccatctgggttcaaatgccggtgaaatcaggctaaatgaaacgttaacggcagaatggcagaagcgttttgatgtggagtcacctgacgctcagccaatagccctggctctgagccctgagcgaattactgctaaaagtggggatatttgcccccattccgggcgttgggtaactctggccggagggcatcaggaatttgtcgatattctagctggagtcgttatgccggaagcgacaaaataccagagcaatatatatgcgcctgaaatacgaattcctgcaacatggaatcttctgagccgggatgatggtgaaagcgtatttaaaaaactagaggaaaattaa

SEQ ID NO: 121920 - DNA, 1101 bp, Enterobacter cloacae
atgacagttagtccccctcagccgataatgagtgccaataacccgacatggcccagttcatgccccttgtcaaaatatgaagccatcaaagaaaattatattaataaaatgtatggcttaagcactgctgatatacgatttgaagtgcttcgttatttgttgtcactaaaagaacttgagcgattactgacgcctgagatgcgacgaacaaccagtccgttaaaagaaacaggtggatgggaggatatgttcaagataaagcgtggactgttcagagctccggatgtcgtaaaactgagagatataacccacacagggattagtgcattccagcagggtaatatagatgatattattgagattaaatttaatgaaacaaaggatgctttaagccatgaacaagaaactgcatatattgttattgcaggagatcctgggaaactgcattttttagaaagccatacctgccagattgacgaccgacgtaaacggcgctggttgcgggaagcgaaaaaagaaccactctatgtaccactgtctttgggaatggaaaaacgtcaacaacgggtacgccttgaagtggaggaatatcagcatctgataggggaaattgatcgcgagcttgaaaaagtcaacgttcaactccgcccggtattagccggggagttatgtgaacgtgttgaacccaaatacgatacgccctataaactggaagctccgatgtcttatgaggcaaagcggcgaatggaacgcgcacgggctcaggtagaaatgtcgctggccgggccgatgtggggtattggtgctgtgggggtgacacttgcggcaggtggaatggtgatgcccgctgtaccggtcgtcgccggggaagttgccgccggagcatcctcatcaggttcgttaagcgtgggggcaaatgttattgagttttctgcaatcagcaaaactgtggctcagtctacgaccgcagcaggttcagtcattgcttttgacctggcggcaaaaggtacaccgggttatctgaacagcacgatggtgactaaaagttttctgagcgacccgacgagacaaagacaagaatatatttactgggatgactga

SEQ ID NO: 121921 - DNA, 318 bp, Enterobacter cloacae
atggataactggctggcgctttttgacggacagacgcgttattttctggatattaatgacagtaccatgacggcggatgttttgcgctttcgcggcagggaagccctgagcgagcccttccggtgggacattgagttcacctccgggcaagcaaacattcccccggaacaggtgctgatgaaatatgcctccttccggatgcggagcggcaaaaatgttcacggtatggtgacccgcctggaatggctgtccacatcaaaagaccagtctcactaccggctcacgctcagttcccggctggcgctgctgggagagtga

SEQ ID NO: 121922 - DNA, 525 bp, Enterobacter cloacae
atggcaacagtaacccgctggcgggcgctgacgcttattgcctgtggtctgctcacaggctgcggtctgacacaaaccgtcacggacggtacggtcagcatcacgaaatccatcttctacaagaaaattaaaacgctgcatctggattttaccccgcgcaaggccataaacgccgatggcgcacagacgccgctggcgacgatggtgcgggtctaccagcttaaagaccgtaagaatattgatacagcagactaccagacgctgctgcgtaaggccgatacggtcctgaaagaggacgagctggcgtcaaaagagctgctggtaatgcccgggggcagcgtgacgctcaatatgcccatggatgaagacgctgagttcgtggcggtggtggggctgtttaaccgtcccgacatgcaggacaaccgctggcggctggtactgacccgtgacgacctcgacccggacaaaccccgtacgattgaactgggtgatggctggctcagcctcgttccggtaaaggagtga

SEQ ID NO: 121923 - DNA, 1083 bp, Enterobacter cloacae
atggcgcgagaatcacagccagcacgtaccgggctgacgttagctcttgataaagacatctggcgggtcaatttctatcgtttctgccagttgctggagcaggaaaatccgggcgcgccaaaactgggcaccaccagccatccgggcaacgacccggtacgtttcagaccctggccgggaatgggtttcccggtcagcaccctgaaagcggttgagaccgacgaagaccacccgacattgcccccaacggtccgcacgacttttctggggatgtatggcgtggactcccctctgccgacgtcttatctggatgacattgcgcagcgccgggaaggctatgaggcggtcacctcgtttctggatatcttcagccaccgcatcaccacgcagtattaccggatctggcgaaaatacgcgtatccggccactttcgaggcgggggggcgcgatgccacatcgcaatgtctgctgggtctggtgggactcggtataccgggcacggctgatcaggtggcaacaccggtttcccgtttcctggccttgctgggtaccatgcgattgcccacccgcaatgctgaaggcatccgggctctggtgagactgctggcaccgaatacccgggtatttatcaccgaaccggatccggtaaaggtccatatcgataatcgcagtgggttgggtaccggaaaccgcgtccatctttcacagcgggccacgctgggtaaaacgggcagagaagcctgtagcagagtgctggtgacactggccacggaagatcccggcgaagccgaaggctggttacccggtggcatcctccataccgatttgctggtcctgatgcgcgtctatcttggttaccgcagcaatgcccgactgcgcctcactgtacccgtgtggttgttgcctgagccgcgccttggcaaaggcaggcgtattcagctcgggcgtaccggcctgctcggactgaaggacggcagactcagcgataaccgggaaacactgactgtcagtctgggctgctatgaagggctccggtgttctgcgttccctcccgctgaagacggacattaccgcttcgactaa

SEQ ID NO: 121924 - DNA, 1770 bp, Enterobacter cloacae
atggatgatttaaccctgcgctattttgaagccgaaatgcgctatctgcgcgaggcaggaaaagaatttgcccaggcacatccggaccgggcggcaatgcttaatctcgataagcctggcgcccgggacccgtatgtggaacgcctgtttgaaggctttgccttcctgatgggccgtctgcgagaaaagctggatgatgatctaccggaactgactgaaggactggtgagtctgctgtggccgcactatatgcggactatcccgtcgctggccatcgttgagttttcgcctgactggcgtggtctgcgtcaggccgaaatgctggctgaaggcttttccgttgtgtcacgtcctgtcgggccgcataaaaccgcctgtcagtaccggacgacccgcgatgttccgctacaaccgctccaccttgcagatgcccgcctgcatactgaaaccgatggccgctctgctatccgtctgcgcttcgaatgccctgaaaaagtggactggagtaaagccgggatcgacaaggtcgccatattccttaacgcagagagtcctgtgagttctgcgctgcatctggcaatgacccggcgtgtacatgccatgtatgcgcgtcatgccgggacgcatactgaacgtcatcagtttgatggctggtgcaaacccatgggcttcgatgacaatgacggcctgtggaaaaaagccgatacggccttcagtggttaccagctgctgctggagtatttcagcttccgtccaaagtttatgtttgtggagctgcgcggtctcgacactatcgggctcactgcggccagcacctggtttgaaatcgacattgtactcagtgaagcctggtcatccgatctgccctttgagacggaagacttccggctgcactgtgcgccggttatcaacctttttaccctggaagccgacccgctggcgctaaatccgctggagaacgaatacctgctcaggccattgcgtcttcaggatggtcacaccgagatttacagcgtcgataatattcacggcgcggtgaagaatggcaaacacccttatgtgccgttcaccagctttcgccaccggggcggcatgatgcgccacgatgcccctgaacgttattaccatacccgcgtgaaacgcggtccctctggcctgtatgacacctggttaattctcggtggcagctcgtttgaactggagcagttgtccgaaaaaccggagtcactctcgatgcgaataaccgggaccaacggtcagcttccgcgtaaggcactggaaagtaccctgctggatagggtggtcaaatccggcaaggtgcccgtcagggtcctcaacctcacagcaccgacgatgccgctgtatcccccggcaaacgaccgttttcactggcgagtgatgagccacctcggctcaaacttcctcagcatgatggacaatcctgaggtcctgcggggcacgctggcgctgtacgactggaccgacgatgaaatgaaccgccgtcggcttgaagcaatcgtcgccgtgaagcacactctgatccgccgttttgagaagggctttatgctccggggtgtggatattgaggtcacgctgaacatggacaattttgcaggcgagggcgatgtgaatctcttcggcgagatgctgcaccggttcttcgcgctctatgccgatattcacctctttaaccagctcacgctggtactgcaaccgacagggaaacgactgagatggcgcgagaatcacagccagcacgtaccgggctga

SEQ ID NO: 121925 - DNA, 1608 bp, Enterobacter cloacae
atgagttcaccggaagccctgttatcggcatgcaccactaaccacgaagcgcagttgcgccttactgaaagcgcctccggcaccctgtccctctgggagaactggttaaaaccgatccgccctggggaggaaacgggtgacgatccggcctgtgacgatgatttccaactgatgcgtgaagaaatcaacaaactttcgggcaccgatccggagttgctctgcacgctgacggaaaaaatactgtgtgaatgcgccaaagatatccgtgttgttacctggtatacccaggcccgtctgagccgtgacggcgagaaaggcctggcggaagggatactgctgctggtcgcgatgttgtcccgctatggcagacactgtcatccgctgcgcccgaatgcccggaaagccgcgctggagtggctcaacagtacaaaagtacttgatacgctctcgcgctggccggaagtcgatcgggaagatgccggcctgacggccggagcggtcactctgctgaataaggtggtctcagactggcctgaaaatgaaaaacccgcattcgctggcctttgtagcgcgctggaaaaccgtctggcgcgttctggcggggtgacagcgctaatcccccagaacagcagcactcaggataccgggcatgacgctgtcttttctccgtcgccactgctgacggacgtgaagtcggggcgcgatttgctggatcaggcaaaggtactctcccgctggctcggagaacaaccccaggggtggctggcctctcaccggctgatgaaaaccgttcgctgggataccgtcgatcaaattccaccgctggacagcagtggacgtacccggctgattccgcctaaaccagagtaccgggcgcagctgaagcgtctgtacctgcaaaaaagctgggctgagctggtggagcaggccggccagatgtactgcgaaggggtgaatcatttctggctcgatctccagtggtacctctggcagggactcagccatgcgggacagccctgggagaacctggcggagtcagtcctgctggatcttcggttcctcctcaggcgtctgcccgggcttgaaagcctggcctggaatgacggtaccccgtttgccgatgaggtgacaacgggatggattgcggaaaaggtgaatgaggaagggctgtcattcggtagcgagccggtcacgacggcaaccggatacggggacgaggtgctgtcacttgaggccgaggcgatggagaagggtgacagtgaggggcccgaagcggctctgacgtggctccagacccgccccggactggactctccgcgaaatcgctggctgatacgcctgctgatggcccgtgttgcggaacaatacgggcgtaacgacatggcgcttcatctgctggctgaactgacatccggtgcggcgcagttgacgatgggggactgggagccggacctgttattcgaagttcagggccgccgtttgaaactactgcgcatgaaagccggtcgcagcgagtccgataaaatccggctgatgcctgagatggatgccctgctggcggggctgattaccatcgatcctgcccgtgccatggtgctgtgtggctga

SEQ ID NO: 121926 - DNA, 1209 bp, Enterobacter cloacae
atgcccgtctggctggacgccattcccgaaaaagcgccgaaagttatgcgccccaatccccggcgctggttgctgtttctggcacttatgctggtgactggtatcacgttaacgttctggcaatggacctccggtagaaacggattcattttctggtttaccgcgctggggctgccattttgtttatggggattgctcttttccctgcggcggtttgcgtacaaagcggaacaggtcggggctgaatcccgtaatgctgagcgggaagcgctgattcagcaggaaatccgccgtggtcagcgttgcggctgggtgctgggttatcatattcagcaccctgcaggaaataagcccggagcattactgcagacggcgagccatactatgcccatagtgcagttctcaacgccgcgaggcagtaaagtcgctgtcagatatgcagccctgacaggatttcaggttgacctggaggcagaaatcattgccaccacctcaacacttgccgcccgggtgcaggatattaccgcaacactcccgacggatattccctgctgcctgatgctggactgtgatgacgatatcaggcaatgcgttgagtcacatctcaaaaatgaacttgctgccaaaacagggagaagtttcaggctcctgtctggcaaaggtctgtcggcgtttgatgcctggctggaccagcgctgggaaaacccgggcattcttgccgctgtgacattctcggtaccagcgtatcccagtcagggtgacgccgatgccatcacactggtggtgctctgcaaccgaaaggctgctgcttatcctcacgcagtgtgcctgcaccgcccggaaaaaggcaaagagcccgcgctggtaaaaacgctgaaccgggcactgctttggtccgacacagaccctgaatcactgaaggctgcatggcatacaggaccagctcttgccagcgggagcgggtggaacaaagcttgtgaagataacggagtgacattcagcctgtcagatgacaatcgcagtattgattacgctatgggatataccgggcgagccgctccctggcttgtcattattcttgcttctgccgcatgtcacgataatggcccacaggtcatcgcagcccaatcagcagcagacgaagaagatgtctgggtagccgtcgttaataaaaaagacgttcgtaaggaaaatcaagggaatggctaa

SEQ ID NO: 121927 - DNA, 474 bp, Enterobacter cloacae
atgggggggggtattttttccaatcatgattactctgctgatctcaatcgggatgatcgaacttacattgaggatggtacttcaaaagtgtctccatctggaaaatatcttattgttaatagtgtttctggtggaactgtgaagttcgacgatggcactacaaagtataccgatagagcttattgtagcgtcgttgacatgagcaatgggtgtattgttagtgactgggatggagaagtatgcgggtatacctggatggaagggaaagatgtattggccaattctgaagatgccggtactgatgtttttgattttaattcaatgcgaccttcaatcaataaaattaaaaataaactatcgtcaatggatatcaggcgtacaagtaatatgcttcgttgtgataagccctctaaaataaacataaataaatatcagcaattggtgagggaggataaaaatataaaagcgttgtaa

SEQ ID NO: 121928 - DNA, 927 bp, Enterobacter cloacae
atgaataaatgtatatatctttttttactctctttaagtgggcattccatagttagttttgccgatgagccagtaaattatggatacgataaagtaaataatgtaatttatgcacaaaaaaacggtaaaaaaggattgttaaatttcacagaagattacacaggaaatccttcttattcgtttgattttttttcagattctccagcaattattgctgacagtagatcactgcatgattctactgtctatgcaactttgaggtatagtaacaataaattctttatcaattgcctgtacacaaatatcaaaagcaaaaaaaatgggattatagttaaggaaggtttttgtggtttagataacacaccagcagaaaaatacatggattttatagatgaaaaaataggaaaaatagaagataatatggatgcctatgacacgagtttaatcttaaatgaaaaaataaaatatctgccaattgtaatttataataggacagataaattgatatataagttgtataataataaaaaggcattgtttgatgacaactactctattgtggtcgcaaataagcataataaatgtgagacttttgttaatagtccttgggtcatctttaacaaggcattttcaaaaattgaaattatgaatgaaaaaaaatcaaatggaaagcttgaattaattaaagcaactccaagtgaatcagggggtaatgaatgctcatcatatccggtgataaatattgtgtcgccaaggtcttatttttacgattcatcatatagggtaaagaaatcctatcttattaaaggtgatgaagttagtttattatctatcagtgctgatgggaaatggtgtaaggcaaggtatattaataataaaaataaatctatggatagtaatatgctatgttcagatttaagtatttag

SEQ ID NO: 121929 - DNA, 2688 bp, Enterobacter cloacae
atggcagcagttatacctaaacagagttttcccgtcccttcagatgctaaagggcagccgttcacttctgcagaagaactgttatcgaagcttgaacgggaaagttcagggctgtacctggtaggaagccagggaatgtggcatggcggtattcatattaccgatgccaccatcccctggtgtgcccttgggacggagagtgcggaagaaaaagcctaccgtaacggggagccttatcaaggggagcaatttatccgttgcatggctgatggtgagatagtcgcatggcgcgtgtgtaatgactatgaaaatgccgctatagagtggcgaggtgaaaacctgttttactcaacctcgtttgtactggtaaaacattacatccagccgggtgagacaaaagacagcggactgacatttttcaccctatatatgaacctggccccttttgctgcatataaacagttggatgatcttcatggcagaatagtgtcgagccagctgcgctattataaaagcaaggatgatctgcaggggcggcgggcagctggaaatctgagagcaggcacaattgtcatgctaagcaacaatattgtaacccgcagcagcgacagacgtcagttcacggaagtttctatttctactgagacgaaaaatgcagccggagaaatactcaccgcgggtactaaggtctggacggtttctgaccggggttctctgaaagcatctgtgtcggcccccgttccgtcatggtggacaaaatgtacgccaccttacactaatcagccggaaggtgcgattaactgcacttcgcgtaccgtcctgaattattatctgagtagtgaagatgtattgcaatacaccagtgcaggcactttgccggcagatattccgctctcttatgaatccggtaataccacacaacaacttacctgccccggcaaaaaacccgaagacgcatccagaacattcattctggtcactcttgggcgcgatctgggtaagatgaaaaagggcgatcgggtatgggtggtatctggcgatgacaaccttgcgccagttgctccggcagcctcaggcagtgcgcctgtctttaatgatgtgcatgttccggccacgccagtgcctgtcagtgccggagacagtctcgggcatatgggcttttgtcagctaccggaagaaaatggtaagcactcacgttatcaggtgcatattgagtgcctgagtatggatgatatggagaaattcattaccaatcccggtaatgtggggaacgattcaccggtttacctggcctggcagaaagatgcagctttatctgacaagggggataccggaatgacagcaagtaatcgtaaaacaaagatatcgggaattctgtcacttgcaaaagtccctggtgttgatgctgtcgggaatgctctgtctagtaacaaggatgcggcctggtttcagatacgccctgaaggcggctggctggctgccggtagtgtgcagaaactgtcacagtatgcgttaggtgaactgggttttgtcacgctaaataaggcaccggaaagctttgacctgcttgacggcataaaacagccgaataatgtggtgaagggaatacttgaacaattatataaagtggcccaggaagaaacccggcctgcccatgcgctgaataaatataattacgagcgcctgctgaaacagatagacagtaaccaggacgggcactattcagagcaggaatatcttcaggcggtacataatgcgtcctaccgggaacgtctgtaccgtattatcgcgaagcacggaagtgaatggtattacggcaaggatgactcgctgtggaaaacctacctggatacacttaccaaggatgcgccagcctggaaaatgtatctggaaaccttcattgataagatgacgtggatgaaaacggtgactgagaagggagtgtcactggggccggaattgtggcatatgcatccggtggtgtttttggaagcgatgaagggaaagtcaaaactaattaatgtggatgcttttattgctctttatgaaaaagaacatgttacttttgcttcaggtacgccagttttatctcaaggttcaaaggataatttgaaaaaaatactggagagcattaatgatttttatccaaaacatttggagtataaaccaaatttatatggtatttcgtatatgcttgccactactaggcatgagacatatcacttcccgactggtgagttttttagtgaacaaccagaggtaggtggtcttagttactttaataaatatgatcctgttcttgctgcaacacaagcattaaaaaacagagcattagctaatggaaatacacaagagggggatggttataaatatcgggggcgaggatgtgtgcatcttacttggaaaaataattatcaaaaagcaaaggataagtttggaatagattatgtaggtcagccagatctcgcgggtgattttaaacatgctgtaccaattatgatttggggtatggaggatggcttgtttacaggaaagaaactttcctcgtatataaacaatagcggagtagattacgagggtgccagaaaaatcattaacggcagtgatcaaaaggttctaatagcttcatatgctataaagtttcaaaccattttagaaaaaacgtcttctcttcctaaggatttttaa

SEQ ID NO: 121930 - DNA, 2442 bp, Enterobacter cloacae
atgaacagttccctgatcaaccaggcaaccgatgcggtacaacagctgctgggccagtcacgttaccgggttgatgtgcatggatgcggcgatttcctggatgttctgcgttacaacgcggttgagtcactcagccagccatggcggtatgatgtgactgtcacctgttcttctgcggatattgcctgcgacacgttactgctgaaaccggcgtcatttacttttcagaccccgatgtttgacggggcaccggcgctgccggtccggacggtttatggggtggtggcgtcatttcgccggatttccacgtcaaatgacgagacccgttacgcactgaagatcgttccccgcatcgcgcttttgggttttacaaagggcagtcagatttacctcaaccagtcggtaacggaagtggttgaacaggtactgtgtaaacacggcctggaaggacctgactttgagttccggctctcaagggagtacccggcccgggagctcatcacccagtggcgggaaactgaccttgaatttattcagcgcctgctggctgaagtcggtatttactggcgttatgaaatggacagccgtcttgaacaggatgtggtaatttttcaggacagccagcagcagtatgaatttggcctcacgctgccattgcgcagccaggccgggatgagtgactgcggccaggagagcatctggggtattcagaccgcatacaatgtggtgagcgggagtgtggtcacccgtgactacaactaccgcgaagcgctgatgcctcaggacagcgccgaaagtattttcagcaaggaagggatcaccaccggggaaacgtaccattacgcggaacccttcctgtcagcaggtgatactgaaagtacagagaccggggcatacttcgctcgtctgcgtcacgaacgcattctgaacgcgcaatatcgcgtcagcgggcattcttccagtccgcttctggtcccaggtcaggtactggaaacggacggcacgttacccgatgccgtcaaggaaggcatcgtcatcaccacggtgcgcactcgcggttcacgcaaaagtagctttacgctgaggtttgagggtatcccctacagcgaaaccgtctgctggcgtccggcactgctcagtcgtccggtgatatccggttcgttgcctgcccgggtggaaagcacacagaaaggtgacacctattcctggctcgacccggacgggcgataccgggtaaaactggactttgaccgcagcaacactgaacacggttatgcctatttgtggctgcggctggctaaaccgtatgccggtgatacgtacggattccactccccgcttatcgacggaactgaagtggccgtcgtttttgacggcggagacccggatcgtccctacatcgcttatgccctgcatgattcagaacatccggaccatgtcaccagtgacaatcatacgcggaacgtgtggcataccccggcgaacaataagctgcggatggaggataagcgccaggaagagcatatcaagctcgcgacagaatatggcaaaacgcagctgaatatgggtcatctggtcaacggccagcgagaaaaacgcggtgccggttttgaattgcgtacggacgaatttggtgcagtacgtgcggcaaagggtctgttcctgacggcggatgcccaagccaaagcccaggggccggtgctggaaatggctcctgccatcaaccaaattaacctggccaacagccagatgcaggcgctgagcagtgctgctgaagccgccggagcgctggtctgtgatatcagtacccagattagtcttgtgacggacaaaatcaaagatctccagtctgcggtcctgctgggtagcgctccgcagggggtggcactgtcctcaggtgaacaccttcagctcagtagcacccgcaacaccatgatcaatgcaggtcagcatcttgatatcggtgcgatgaaaaatctgtccgtaacggcagaaaaagccctcggtctgtttgtacataaagaaggggctaaactggttgcgaatcagggagatattgaaattcaggctcagcacaacacgatggccctgttttctgaaaagcaactgaccgtgacgagcagcgaagatgaaatcattatcagtaccccggaaacgctgacgttgaacggcggcgggtcgtatttgaggctgaaccagaacgggatagagcatggctccgaagggatgatgataatgaaagtggcgacctatctggttcctggcattcctgcgagtcttccctacgacactcccgattttcctttaacctctttgaatccagacagtaataacgagccaggaacggataattcggactcatcgaaaaatgataatcaatatcgacataatcagcctgaaaacgattctgtcaaaggttctgcaaaacgggcatgtgattaa

SEQ ID NO: 121931 - DNA, 2649 bp, Enterobacter cloacae
atggaaaatccagccatcctgttacgccgtcttaacccttactgtgcccgcgcgatggagggggccgcctccctgtgccagacccgcgcccatgcggaaatcctgcctgagcactggctgctgaaactgctggaacagggtgagggcgacctgacggtgctggcgcggcgctacgaatgggatatggatacgatatggcaggatatgctgggttttctggacagcctgccacggtcagtgcgcagccgtccgcagctttcggagggcgtgcagtcactgatgcaggatgcctggctgcacgcctcgctggcggaggaagagcatatccgcagcattcacctcctgatggctctggtggaaaaaccgaaactgctgcgctgcgacggcctgtggccgctgctgacgctggcgcagagccagcttgagcgcctgcgtggacttctggatgcgcagtcggatgaacgcccggaggtgcagcaggaagcggagcttactcagggtgatgaggtggagtttgtcggccgtccggtgaacgcggatataaaaggagagctgaacccggcgttgcagaatgcgctggacaggttcaccctcgacgtcaccgcccgcgcccgtgagggcagaatcgacccggtctatggccgcgacaatgaaatccgccagatggtggatattctttcccggcgccgcaagaacaacccgattctggtcggcgaaccgggggtgggcaagaccgcgctcgtggagggactggcgctgcgcattcatgagggcaatgtgccggacgcgctgaagccggtctcggtgcgcacccttgacctcggcctgttacaggccggggcgggtgtgaagggggaattcgagcagcgtctgaaaaacatcatcgatgcggtgcagcagtctcccctaccggttctgctcttcattgacgaggcgcacaccattatcggcgccggcaaccaggcgggcggcgccgatgcggccaacctgctgaaaccggcgctcgcccgcggtgagctcagaaccatcgccgccaccacctggagtgagtacaaacagtactttgagcgcgacgccgcgctggagcgtcgtttccagatggtgaaggtggacgaaccggacgacgacaccgcctgcctgatgctgcgcggactcaagtcacgctacgcggagcaccatggcgtgcatattaccgatgaagcggttaaagccgccgtcaccctctccagacgctatctgaccggacgccagcttccggacaaggcggtggatttgctggataccgcctctgcccgtattcgcatgagcctggatacggtgccggaaccgctgacccgcatgaaggcgcagctcacggcactggctatggagaaacaggcgctgctggaggatatcgcggtgggtaataccgcccacggcgaacgtctggccgccatcggagaggaagaagtcgccatcattttgcagctcgacgaacgggaaacccagtacggtcaggagctgaaaatcacggaagaactgcttgcctgccgcacggatatctcccgtcagggggagattgctgaccttcagatgcagcttactgccgtgcagcagaatacaccgctgctggggctggatgtggacgcgcgtaccgtcgccaccgttatcgccgactggacgggcgtaccgctctcttccctgatgaaggacgagcagacggaactgctgagccttgagcacagtctggcgaaacgcgttgtcggtcaggacagtgctctcaatgccattgcgcagcgcctgcgcgccagcaaaaccggtctggcgccggagaacggcccgcagggcgtgttcctgcttgtggggccgagcggcaccggcaagaccgaaaccgccttggcgctggccgatgaactgttcggcggcgagaagtcccttatcaccatcaatctctcggaataccaggagccacataccgtctcgcagctcaagggctcacctccgggctacgtgggttacggtcagggcggcattctgaccgaagccgtccgtaagcgcccgtacagcgtggtgctgctggatgaagtggaaaaggcgcaccgggacgtgatgaacctgttctaccaggtgtttgaccggggcttcatgcgcgacggcgaggggcgggaaatcgacttccgcaacacggtgattctgatgacctccaatctcggcagcgacctcatcatgcagatgctggaggaacagccggaggcgacagagccggacctgcatgaactgctgcgtcctgtcctgcgggaccacttccagcccgcgctgctggcgcgcttccagacggtgatttaccgtccgctggcgcaggcagcgatgcgcaccatcgtggaaatgaagctggcgcaggtcagtaaacgcctcaaccgtcactacggtatgaagaccgatatccacgaaagcctgtacgacgcgctgaccgatgcctgcctgctgccggacaccggggcccgcaatgttgacagcctgctgaaccagcagattctgccggtgctgagccagcagctgctgatgcatatggcggcggggcagaagccgcagcatcttacattgggttgggatgaggaggaggggattgtgctggcatttgacgaacaagcagaaggagaagcctcatga

SEQ ID NO: 121932 - DNA, 1344 bp, Enterobacter cloacae
atgaaaatttatcgtccgctgtggaacgagggggcgttgctgtcccctcagcagttccagcaacagtccgaatgggaaacgtttcgcagcacaggcgtggcggcgctctcctcgccgtttgcgtggggcgttgagcaggtggaatttgatgaaaggctgctgggtacgggtctgattcagattacccaactgcgggtctggctgccggatggcacgctagtggatacgtcagtcagcgatctgcctccggagccgcgcgaactggatttatcgcagcattcagacgcggtcacggtggtaattgccctgccgttaatgcagtccgggttaaataacgtgctccaggaagcggcagtggccgatcggccgctccgttaccgtgaagagtgggtgcatgttcaggatgcgtttggcagcgaagaggaatctgtcgccgttgcccgctttaatctggggatccgttttgagcatgaggataacgcgtcgtggcagtgctgtccggttgcacggctgatccgggacgggcaggggagctggcgtcatgatccggcattcattccgcctatggccctgttttctgccagcccggcgatgcgggaaaggctggtgttactgaaccgccagcttcgctcccgccgccaacggttgatgtccatgcgtcgggaaagtaatgagcgcctggcggattttgctgtggcggatgtttctcttttttggcttctcaatgcgcttaactctcatgccagtgtgttggtggagtttgaacgttttccggctcgccatccggaacaggtgtgggcggagcttgcgcggcttgcgggcagtatgctgacgttttctctggacagcgatctggacgcaatccctggctatgaccacgcccggcctgaaatgacgtttccaccgttgtttgaactgatcgccggtttactggaagccagcctgccgtcccgtgtgatagcgctggagatgtcccgtcctgacgcccagacctggaaagcctcgctacacgacatccggctgcgtgaagaagccgatctctggctctctgtccggtctgacgttccggcctggcaagtggcggagaaattcccggcattatgcaaggcgggttccccggatgatgtgaatgcgatttccaccgttgcgctgcaggggatcccactcattgccgtgaatcgcgtgcctgctgcgttaccggtgcggatggagaaccagtacttcgcgctggacatggaaagtgctgcggcacgggacatgctggagcaggggatctgtatgttctatgtgcctgccctgctgggacagcttgaacttgaactgtttgcggtactgcgatcatga

SEQ ID NO: 121933 - DNA, 492 bp, Enterobacter cloacae; identical to SEQ ID NO: 114599

SEQ ID NO: 121934 - DNA, 672 bp, Enterobacter cloacae
atgtccacacctcatcctcagcacttcgagcacgtacttactgaagaacgtttaaatgtcctggcgaaagcgttgcttgaagagtgttactcaactgaagatgacctacaatctacatacgattctgggtactcacgaggttgtacgcgttttgacagacaaaaaaataaattaaagctgcttgcactagagcataactggctgaccatctctgatggtagtaatcggttagttatggcaattgaaggtctcccgttccgttttgcccgcgacgaacacaggacacctcgtaaaccagctacgttgttggtatctgatacggaagctattcaacgtgagaagtttatgctcgaaagccagatggaaatggattttgatggcgtttcttatagtgagcagatcagaaaaccaacagtttggcgattttttgttgaggtaagtgagagtctcgaagatgggcgtgactacaatatttactttgttggctttaatgagttaaaagatgcagtttgcgtttgggagtatgccaacaaggttgcaattgcagccagtactgacgataccaaacatgaggccgttgagctttcccctgctgaggcaaaagtacctcagaaaaaagtggataaacaagccaacgacaaacttgatgaagattcaccagatgaacaatga

SEQ ID NO: 121935 - DNA, 1128 bp, Enterobacter cloacae
atgaaaaacgttaagttcgacaacgaatttataagctacaacatcaaattagctcgcttaatcagcgggctaactttatctgacgtagcagaaagtgtcggtaaatcaaaacagttcattcatcagcttgaaacaggcataaaacaaccaacggatgaactgctcgaaacgataggaacattgctgcgtgtgcggccacaatttttctatgcccctcactcgtctgttttagacgatgagagcgtacactttagaagtaacagaacagctaaacaggcctctagattgagagctaaggctagcatagaccttttcatgaggctaataactctcttagaggattatctcacattcccagacgttgattttccctctttaagcaagactgttgaaacagcaggcgatgttgaacaagcggctgaatatacacgaaactactggcagcttggctttggcccaatatctagtatgactcgtttagttgaacgttcaggagctgtcgtaacatttttccaaggggtatcctcggatgttgatgctctctcaagtgtaattaaaagaccaataattgtcagaaacgatgccaaagacagccctggacgcctaaggtttgatattgctcacgaattaggtcatttagttatgcacgaaggtatccagactggctgtaagctaacagaatctcaagctaaccggtttgccagtgccttgttgcttcctaaagctgctttcattaaggagttcaaagttggactcagaatggattggcggatgttatctgagctaaaaggccgctggggggtaagtaaagccgcgttgctatatcgagccagacagttagacctgcttaccgaggcgaagtacacatcacacatcattactcttcgtaagtatgaggccaaaaaggagaaagatgattatcttattccgatggaacgttctgagttaattgttaacgccctacagaattatctatcggcatataacaaaacagtggacgaccttcttgacgaactttatgtcgatgacgtcgtacttaatcagattttggattttgacattaactcacttaggtctgttgagtcgccacactcaaatgttattccgttctcaaggtacaaaatctaa

SEQ ID NO: 121936 - DNA, 687 bp, Enterobacter cloacae
atggccggacaattagatgaagcagcaaaacaaattttgggtactcttttagcagattttactgatagaggattaactgctcaggacttaaaaaaaggttatgaaggacctaatatcaatgcattagctactgcggtatgtaacgttgctgattttacatccgtagattttgaagttgcctttggcgatcttgaaaaaagcaaactaatcagaaccgggcctatgaaaatgtttgataatgatcacaatagctctgtggtcattattggctcttacagtttacgtgaattcgtttatttaacggaggctggatacaaagagtccagaaaagtaccaaatcgtccacaacgtgttcagcgcatagtcaataatttgacgatcaccggcggccatttcagcaatacgcagctagggcagggagaggttgtttctcagactctaaacatcacaagcagttccgactctgaaatagttgcaaggctgatttctatccttgaagaacaggggcaagtagtaaacaacgatcagcgctctgacattgaagcagctgtcgcagcagctaatgaaggtgatggtagagaagccaaatctttgctggctaaggtttgtggcccagtatgggaatcagtacagccggttatgtggccgatcgttggagagttagtgaaaagaagccttggtctttaa

SEQ ID NO: 121937 - DNA, 996 bp, Enterobacter cloacae
gtgagcaaggccctttcagtgaacgcggcggcgtctggccgtcagcagattttcgattttctctacaggtggggcatgctgctgaccgtcgtcgcgctggtggcggtgtttggcctggcgtcggacagcttcctcgatccgaacaacatcatcaacattctgcgctcgattgccatcgtgacggtgattgccatcggcgtctcgatttcgctgaccgtcggcgggttcgatctctcggtggggtcaaccgcgtcgctggcgaacgcgctggtgatttcgcttttcgtctggcacggcttcggcaccaccgagtcgattctgcttacccttgcgctctgcacgctggtcggcctgtttaacgcctttctgatcgtcatcctgcgcattccggacatgctcgcgacccttgccagcctgtttgtcatccagggcgtggcgatgacctacagctacggcgggtcgattaccgagaacatggtgctgccgagcggcgacatggcggaagggaccattccggcggcgttcagcctgctggggcaggtgccgaccattgtgatcgtcatgctggtggtgacgattctggcgcagcttggcctgtcgctgaccacccacggacgccggatgtacgccattggcggcaacccggaagccgcgcgcctttccggcattcgcaccacgcgctacaaggtggcggcctacgtgatcgcctcgctgctggcgggactgggtggaattttgctggcttcgcgtatcggttcatcgcaggtgaatgcggggggcggctacctgatggatgcggtggcggcggcgtggatcgggttctcgctggccgggtccggcaagccgaacgcgctgggcacgctggtgggggcggtgatcctcggcgtgctgtcgaacgggctggtgatgctctccgtgccgtattacgccatggacattataaaagggctggtgctcgcggtggcactggcgattacttacatacaaaaacgctga

SEQ ID NO: 121938 - DNA, 747 bp, Enterobacter cloacae
atggatatcccacgtatttttactgttagcgaaagcgaacaccgcattcataacccctttacgccagagaagtacgcgacgctgggccgggtgttacgcatgaagccaggcactcgcattctcgatctcggcagcggctcgggagagatgctttgtacctgggcacgtgattacggtattaccggtaccggcgtcgacgtgagcccgctcttcaccgcacaggccacgcggcgcgcagaggaactcggcgtcagcgaacgcgtccatttcattcataacgacgcggccggctacgtcgcgaatgaaaaatgtgacgtggcggcctgcgttggcgcaacctggattgcggggggcgtagccgggacgatggatctgctggcaaaaagcctcaagcctgggggaataatgctcatcggcgaaccgtactggcgtcaggtacccgcgacggcagagatagctcaggcctgcggcatctcgtcgattgcagactttctcactctgcccggtctggttgcttctttcgatcaacagggctatgacctggttgaaatggtgctggcagaccaggaaggctgggacaggtacgaagccgcaaaatggatgaccatgcggcgctggctggaggaaaacccagacgatgacttcgcgcaggaggttcgggcggagctgacgatagcgcctgaacgtcatgtgacgtacacgcgggagtactttggctggggggtgtttgcgttaatggcgcgataa

SEQ ID NO: 121939 - DNA, 699 bp, Enterobacter cloacae
atgaatataaaattagtaatgttattgatggttgcaggttttaatagtggtcatgcaatagctaaagatatgttttctggtcagtggagcggagaacaaaaaaatgagtcaacactcactttacgattaactcaagctggtcaaaatgtgaatggtagttattgttatgttacgcaaaacggtaaccgcattgactgtcccccagatgacgagagtaatctaaagggtgttattgctgaaaatacagcaaatgtggaatttaactcttcatttggtggtgaaaagggacgtgcgaaactggaagtggttggtgataaaatgatttggactttaattacaccgccacagaaaggtgaatattctgctccgcggaattatgagctaacaagagagttaaagtcatcggcgtccgaaaaaagaatttttgataccgataaattcaatattactctagtaaataaatgtggttcttttgaaagcgactgcaatgatatgttttatcttggaattagaaaaagtgataatagtacaatatctttagatggtaagactttaaacgatgcgacaggaaaagtaattggttctttatttaagaatggcgaaattacctatacagttacctataacccattaaaattggtagtcaacaaaggtggtcatattttagttgatcagccaggtcaatgggttaataagtag

SEQ ID NO: 121940 - DNA, 804 bp, Enterobacter cloacae
atggaagtgtacgatcttcgaagccaaaggcttcgtccaaaggaattcgaaaagattgtctctcctgtctatgcacggagcgacgtagggcgtgagtttgttgtggtgcgaggcgtttcaaatccatttcacagcattgatggtttaacgttacgacatcgtttcgaatttaatcctaatgccgtttttgatcccctctatgcgcaaaatcttaataaaatagagcggttaattgactcaggggaggtggtcttaatagatcaccgtcaacggacaaaagccctatatccctttttcatctctgagtcaggggagttgttttgtgttgatgagacgatctacaactcagcttttgtgaattacgtcctcgaacgttaccgaaataatgtcgctctatttggaaaaccagccccaacgcgtgattcattcgttccctctaccaataattacggaccgggttactggaaaactgttgaagatgattatcatggcacaaaaaatgttgtgattatggcgattaatcgactgacgagcatgggggatgagggacgagtatttgggtcggacggtaaagattacatgaatacgtcgcgcgataaaattcagcgctggacagcgctacccggagatctggacggtgaatcgcgcgtgtttatatctgcgaaatcggtcatcagacgatacggagaacaacgatccatttatcagaaataccttgagagcgatgatgcctgggcagtaagtggtaaatcatggcaatggatacctggagtcagagaagaggattatgaatttaaaaagtaa

SEQ ID NO: 121941 - DNA, 564 bp, Enterobacter cloacae
atgagtaatcccgctggcgaaggcgatctgctgcgcagcggctggcaggcccgcagcaggcaggagaaagtgggggcgcgcgacaaaatgcagccctcactgctggatcgcctgacggataacgatccggaaaaaaaacgcgagtccgccaacagcaatctgattacccacgccgcgctgcgtcgtaacgtcctgcgggatttacagtggttgtttaacaccattaaccacgatgcctccagcgatctgagcgggctgacgcaggtgagccgttccgtcgttaactttggcgtggcgccgctggcggggaaaagaatgtccgatattgaatggcacgacattcagcgcaagctcaccgaagcgattattaactttgaaccgcggatcctgccgcaggggcttcaggttcgctgcgtgtccgatacctcctcgttagatctgcacaacgttctgtctatcgaaatcaaaggtcgcctgtggtgcgtgccgtatccgctggaatttctctttcgcaccgacgtcgatcttgagaacggccattttgaactgaaggatgcggggtaa

SEQ ID NO: 121942 - DNA, 672 bp, Enterobacter cloacae
atgtgtggacgctttgcacaagcacaaacccgtgaagactatctggcatatcttgccgatgaaggcgatcgcgacattgcatatgacccggaaccaattggccggtacaacgtggcgccaggcaccaaagtgctgctgttgagcgaacgcgatgagctgttacatctcgatccggtgttctggggctacgcacccgggtggtgggataaagcaccgctgataaacgcccgcgtcgagactgcggccaccagcagaatgttcaagcctctctggcagcatggccgggcgatctgttttgcggatggatggtttgaatggaagaaggaaggtgacaagaagcagccctacttcatacaccgcgccgacggccagccaatattcatggcagcgatcggcagcacaccatttgaacgcggcgatgaagcagagggcttcctgatcgtgacatctgctgctgacaaaggactggtcgatattcatgaccgccggccactggttctgtcgcctgaagcggcgcgcgaatggatgcgtcaggatgtaggtgggaaagaagctgaggagataatagccgacgggacagtgcccgccgacaagtttatctggcatgccgttacgcgcgccgtgggtaatgtgaagaatcagggaccagaacttatagagcccgtcacttaa

SEQ ID NO: 121943 - DNA, 1269 bp, Enterobacter cloacae
atgtttgcccttgtcgatgtgaactcattttatgccagttgcgagacggtattcagaccagacctgcgcgggcggcctgttgtcgttctgtcgaataatgacggctgcgtaatagcacgtagcgccgaggcaaaggcagccgggatagcgatgggtgagccgttcttcaagcaaaaggacctattccggcgcgctggtgttgtttgcttcagcagcaactacgagctctatgcagacatgtccagccgggtaatgactacgctggaagaaatgagcccacgcgtggaaatttacagcatagacgaagcattctgcgatctgaccggcgtaagaaactgccgggacctgactgagttcgggaaagagatccgcgcgactattttacagcggacacatctcacagtcggagtcggcatagcccagaccaagacgctggcgaagctggctaaccatgctgcgaaaaaatggcagcggcagacgggcggggtggttgacctctcaaacgtcgaccggcagcgaaggctactggcgcttgttcctgtggaggatgtctggggcgttggccggcgcatcagcaagaagctgaacgctatgggcatcaaaacggcgctggatctctcagaacagagcacgtggattatccgtaagcactttaatgtggtgctggagcgaacggtccgggaactgcgcggcgagccatgcctggatctggaggagttcgcgccggttaagcaggaaattgtatgcagccgatcgtttggcgaacgtattactgactatgagcaaatgcggcaggctatttgcagctacgcggcccgtggtgctgaaaagcttcgcggcgagcaccagtattgccgttttatatccgccttcgttaagacctctccatttgcccttaatgagccgtattacggaaacagcgcatcggtaaggctgctcacgccaacgcaggacagcagagacatcatcaacgccgcggtaaagtgtctggacaaaatctggaaggacggtcaccggtaccagaaagcgggtgtcatgctgggcgacttcttcagtcagggcgtggcccaactaaacctgttcgatgacagtgctccccgagctggtagtgagaagttaatggaagtactggatcacctgaatgcaaaggacggaaagggcacgctctattttgccgggcagggcatacagcaacagtggcagatgaagcgtgaaatgctttctccgcgctacaccacccggttttcagatcttccagtggttaagtga

SEQ ID NO: 121944 - DNA, 918 bp, Enterobacter cloacae
atgaaaatttctctggtcgttcccgtcttcaacgaagaagacgcgatacctattttttataaaacggttcgggaatttgaagggcttcagcaacatgaagtagagatagtcttcatcaatgacggcagtaaagacgcgacagaatcaattatcaacgcgcttgctgttgccgatccacttgttgttccactgtcattcactcgtaactttgggaaagaaccagctttgtttgccggtcttgaccatgcgacaggtgaagcgattatcccgattgacgtagacttgcaggatcctatcgaagtcattcctcacctgatcgagaagtggcaggccggggcagatatggttcttgccaagcgctctgaccgctccactgatggcaggctgaagcgcaagacagctgagtggttctataagctgcacaacaagatcagcaatccaaagattgaagaaaacgttggtgacttccgtcttatgtctcgcgaggtggtggaaaacattaagctcatgccagagcgcaacctgtttatgaagggcgttctgagctgggtgggcggccgcactgatgtagtcgagtacgcccgtgccgagcgtgttgcaggcagcacgaagtttaacggctggaagttgtggaacttggcacttgaagggatcacaagcttctctacattccctctgcgtatgtggacctatatcggactttttgttgccggagtagcattcctgtatggaacgtggatgatcattgacacacttgtttttgggaatgccgttcgcggttatccgtcattacttgtatcaattctgttcttaggcggcatacaattaattggcattggtgttttaggagaatatatcggaaggatttatgttgaagttaaaaatagacctaggtatgttcttaaagggaaattataa

SEQ ID NO: 121945 - DNA, 1305 bp, Enterobacter cloacae
atgcgtatatataaactgagccctattatatgtttttatatgattttgatagtgtttttatcgaaagatatctttttggttaacacttcagactttggaagagccgttgatttatttcttaacggagttaataacttctctaaagatagtgggttagtatttgatctaaaagaaaactttaagtctataggccactttaaatatatcagctcctacagttatttactgtatttatatgcctatataacttcattatatacaaatatacttgacatgcgattgctgggtgccattttaaaaatggcatttataattgctctgtattttgtatttaaaaaattatcaggaaggaaggggaagagtgctgactttatttttattgcactatcattgttgctcgtatcatcgtccaatctatccatgttcaactctttctatcaggaacaagtcttattaatttgcattcctttaataataatatatatggagagaagagatactaaaggaatagtattgatgtatacatttttagccatactgacgacttccaagagccagtttgcgttaacacctcttatatttattttacatcaagtgatttttgataggcataaactaaagctaaaaatatcgctatctctcttatgcttactattaggtgttttatgcattaccttttctaaaggagcggtaagcttaaacaaatatcactctaactactatgggatatatcaactaatgaaaaataataaagttgagctccctgaaaatgtagaccttgagtgtgtgggagttgatgcgtggggtaataaatatgacatagcaaaaggcgctctgtctagcgacattggtgaattttgttataaaaaaaacattaacacatcattttctgatacgattaaatcgttccttggcaatccatcgctaatattgacactgccttatgatttaggcatgaaagagcaatatacagaaaactacattcatgttttcaaatccttccatttaattgaaaacaaccatggcccattagctatgattacaagtatcaaggattatttattcaaggatataaggtttagcgttttatttatttcaatggttttatctatatttttaaagaatgaatattatcgtcaagtgattttctttatatcatcattcggcgcttctcagttattcttagctttcttaggtgagggttaccgagatctaagcaaacatctgttcggcatgaatatctgcttcgacttattagtatttacagtactttgtatgctgtcacgggtaaaaaataacatttag

SEQ ID NO: 121946 - DNA, 498 bp, Enterobacter cloacae
atgccaattatcgattatcccgactggctgccactggcgcagaaagccagcaaaaacatgacactcgataccgggttccagaccgatcagccagcggtcggcccggcaatcttcgagaatcaaaccgacgacctgaaagtgacctggtcactgacgtggatcttcaccttggcgcaggagcgcgctttccagcaatggctacgcagcccgaactatctcaaccgaggcctgaactggttccggatgaatatcaatcttggcggcagtggcctgcaactccaggagcttcatttcacccagatgccggtgcaaaccagtatcgacggcggggtggtgacatggacaggaaccgttattgccaaccacctgtacaacgcagatgacgagtttgacgacgtaattgttgagttgccgccgccatggccttcagtgcttgatatcgtggtgactggctatccggacggacgcgatccagaaagtcttccgagggttccctga

SEQ ID NO: 121947 - DNA, 2931 bp, Enterobacter cloacae
atggcaggtgagaagaacgccggtagcatcgtttatgaaatcagtgccgacgttgagccgctgttacaaggcggcaaacaggccattgatgctctggataaactggaggctgcggcacagcaatcaggcaaggggatggataacctcgacgagagcacctcacaaaccggatcggcgtttacagaactggctggatatgccaactccatggacaaccagctgcgcaagctgaacaccaacgtgagtggcattgcccgtgcaatggaagaggccagaagcggcaccggtggtgcgagcagtgaattcagccgtgcagaatcaatcatcgaggcgctgggtaaccagttggctgttctggatgaagcgcaggagaacggcgcgcgcagtgcggctgttcttgctgcacagctccgcgccgggtcgaaagcgacagacgaagagaagcagaagatcggcgagttgaccgggcggctcttcgacatgaaaggtgctgctgatacttcgatgggcagcaacaaaggctggaagtccagcatgcagcaggctggttaccaggtgcaggactttatcgtacaagtccagggtgggcagtctgcattagtagcattctcccagcagggatcgcaactcgctggcgcgtttggtccaggcggcgcggtagttggcgcagtgatcgcgttgagctctgtcatcgctggcgtgctgattacatcgcttaatggtggaaagaacgccatggacgcgctgaaagatgcagccgaagcgatggacaaggttatcaacgtctctatcaatggcgtggccgcgctgtcagacaaatatgcgtacctggcgaagaccaacgctgaggtcgcgacgctgatgcgtaaccaggcgctcctggagtacaacgaggcgatcaataaaataccgaaagccatcagtgacgcatcaagttctctactgtctttcagtgataaagcattgtcggcgttctctggcggctatgcatcggtagatggatttaatgaccgtcttgctactctggaaattaccaccgataactatgccgaggcagttaagcaggcatacggcgcaggtcaggcgttccaggctactgcgaacagcatcggcaataccgttggagccgtagcggacaagttcggcatcaccgagcagaaagcatttgagctgagcaagcagctttcagatattgccaaaaacccatcgccagaggctttacagcgtttggctacagagttgcagaacacgcagagttctactgaaaaggggcaaactgcgctcacagcgttcgttggtaagttggtagagctttcgcgtgaggcggtaatcgccaaaggcaacgtcgcggcgctcaagcaagagacagacaacctcaccagcggacagaagaacctgatcaagcagtcagaacgcaatctggcactgtctaagctccagggggaggcccgcgcgcggttgcaggctcaatacgctgccgaagatgccggatttgcgaaggatgatccgcatgccaagcagatggaggatgacgctgctgccacttacaaaaatacagaggcgcagaaggccctcaaatccgaacagaagaaaggagcgtctcaggcggagtctatcgctcagaagctggctaatctcaagcagcaatcggagcttgccgctgactcaacaaataaacttagtcgcgagcaggcgatccttaatgcgcagcagtctctcggaaaaggagccacaaaagaacagctcgcgctggcggggcagtacgcggcggcaaaatgggatacggccaacgcgctcaaagcacaggccgcagccgagaagctcctgccagaagcgcgtgaaaacgcaagctataagcaggatgttcaggatctgaataccgctctggctgctaagaaaatcagtcaggagcagttcaatcagacatctgagagactcgaggccacacaccaggcaaacctcgcaaaaatccgcgcgcagcaggcggtgacgccacagcaagatgctgtaggaggcgttgatccggttcagcaactagcgaatgaaaacgcccgaaaactcgcgcttattcaggcatacgagcaacaggggcttatcactcaccagaacgcactggctctacgcgccgcagccgacactgaatacgagcagcaacgccttgcggcacagtggactctattctctcagcaaagcgcagccaaccagatgcttgcggcatctcttgatgctcttggcaataatgcatccagcgctttcgctggaattatcactggcacgcaaagtggtgaggaagctgttcgttcactcgctaactctgttgttaaccaactgatcaactcctttgtgcaaatgggcgtcgagtgggctaagtctgcaatcatgggttcaacaacccagcaggctgcaattgcagcgacaacgtcagctcaggttgctggcattggtgtgcaatccgctgccagtaccacagccgccgctgcttcgactgccgcatggactccggcggctatcatgtcctccgtggcttcattcggtggcgctgttgctattggccttggcgcgatggctggcatcctggcactgtcaggcaaacgcaagaacggaggccctgtatcggctggtgggatgtatcaggtcggcgaaggtggcatgcctgagatttaccaggccagtaccggtaagcagtacatgataccgggcgacaacggcaaggtaattagcaacaaggatatgcagagcgggagtggtgtaataatcaacaatatcgtgcagaattacacctctgctactgttgattctcagggagctgtgaactcagatggtagtattaccctcactacgattatcgcggatttgaataatggaggcccgataagtcagggtataaccagcaacttcaacgtgaaaagaaccccgaacggtcagggataa

SEQ ID NO: 121948 - DNA, 561 bp, Enterobacter cloacae
atgacagctcaaaatgtcgaggatttagttaataaaattaaaggacgaaatgagttattagggatgcgattatatcgtgtgttctattacgacgctgaacctttcacaggtactaaaacacatcctatatccaacgctgttacaaactttggcgctacacaaatggccattgattgtaatacattgttagatgagcttaaggtcaagcctttttttgctgtgcgcctaggagaactcaattttagagggtggaaggtttcagatgctgctcttcaggcaggtgcagggggcacagcgacaattaatgctcataatgtttctcccaatcttcagcagaagggcgttgatatgaggattgcactagatatctcatctatgaccttaaaaaaccaagctgacgttttttgcttggtaacaggtgactcagattttgcacccattatcaaatttgctagatctgaaggaaagcaagtattcacatatactctcggtcatagagtaaaaccatctttgcctattcattctgacctccatatttctgaaacgtacgccaatttgtaa

SEQ ID NO: 121949 - DNA, 672 bp, Enterobacter cloacae
atgactgctttaaccgatattggcgaactatctattagcgaaagccgcgcaggcggtaaagattacctgctacggccttcattcgaggctatgacgaggatcggcaccccggaagagatcgtgcaggcatacgccaccatccacggcaatgatgtcgctcggctcattgaggtttgcgctggcacgctggggcgctttcctgaatggctgtctccttctttcaaccgcgccgctgagaaacttttatcaacgtgcatgctggtgctgcaatcgtgctgcgatgacgacctgacgccaatgataggcgagtggaaggggtggcggaactgcgtcgtataccggccgggcaaattgccaaagaacgacattatcgtgctgacgcagcacctcatgcagcacggaatcgtcggaaaagccaaggttcgccagttgcagcgccatgaaacaggcgagcgcactaaagagtttaaagcattcgactacatcagcgcagctcgcagccacttcggaatgaaccgcactgaagcctctcagttaacaatgaccgaatttcagatgctgctggcggcgaaatacccggaccagaaaggttttacaagagaagagtacgacagcatcgccgacgaatacctggctaaacaggccgctcgcagggcaaatgttagtggctaa

SEQ ID NO: 121950 - DNA, 402 bp, Enterobacter cloacae
atggcactcgtaaaggtattggtagcaaacctctttgccggtgccagccttcaaaagctggaggctggacaggtttatgatgtcgatgactcgatcgctgaaaagtggattgagcagggcaaggtagagaaatccaccgagaagaagggtgaaaagctcgtctttgaagtggcgacaccttctgcgcctgtggcatccagtgcatccgattttcagtcaaaactcaatgatgcccttgagcagctgaagcaggcgcagtcagacgctgatgcgcaagacaaagagcatgctgacgcccttgagcagctaaagcaggtgcatgcggctgagctggaatcggcgaacaaacgcgctgaagaggcagaagccgcactggcggaagcaaccaagaaggcgaaataa

SEQ ID NO: 121951 - DNA, 1077 bp, Enterobacter cloacae
atgtttgtattctccactaagcaggcgaccgaaaccgggaacctcgaagccaacatggctcagttcaatgagcttacgttcgctcgtaattccagcgctcaggccgtggcagactttattgctcgtacccgtgtccgcggtgaagcggcaaatgccccggtactggacgcagtaaacgcagtcgacgatatccgtcgtctttacaaggcctatgaccagacggtgtttaagcaattcgaaccgaacactgaattcacgctgctgaacgacctgatgccgctgtctcgctctgttcgcctggaggagtctgtgtacgaatacgctcgcaccggcggccgtggctgggcgcacacttccatgtccggtcagattggtgctgcgctggatgcgaagtcctacaccttcgatggcaccatggtaccgatccacgacagcggctttaagtttaactggcgtgatccggtattcaataaaggctctgcgctctcatccttggcggatgctcaggccggatctgttgatgatgtgcgtcgacagtatgtggactacatctgggaaggcttccgtgacgcagacggtaactacatcaaattcgatgacaagacctggaagggtttacgtcacgatgagcgtgtggcccaggtgacactgactgttaacttcgcaaccagcaccgacccgaaagccatgcgtgccgcggcgatcgccctgcgtgacgtccttaagctgcaaaacatgcagtacggccagcagacgtggtacgtctccagcgaaatcatgtccaactgggaacagtatttcgatgtgaactcgctccgcactgtgctggaagagatctccaaactgtcaggcatcgcggcaatcaaagaagatgctgagctgaccggaaacgaaatcgtaatcgtaccgcttcaggctggcgtgattgctcctatcgtcggtcaggcattcggtactgttgccgatccgcgtctgcactataactcagattacgtatggcgcacctggggtgctgctggcctgatggtcaagcaggacatcaacggtcactactctgttattcacgcttcaagctaa

SEQ ID NO: 121952 - DNA, 441 bp, Enterobacter cloacae
atggctaaagacggaaaacacgtaattcacgcgggcggtatcttcgcaaacccacaacttcaccgagaaggtgccgcagccgctgatacgcctcctggtacgattggtttcttcgacaacacaacgaaggaattcaccgcgtctgtggatggcaatgaagccgcgatcctctacgtagccaactatgactacctgcgttgcaaaaccgtagacgacgtcatcaaggctggcgactgggttgttgctttccacccaaccccgggcgttttcttcaacgttcccgctgtagcaggcacttatacgaaagggcagccgctctctgttgccaacggtcgtgttaaggctgttggtactgatgaatcggtccgctgctacgtagaagaagaccgctcatacatcattgcaacggcaggtgacctcctgcgcgtggtcattaaataa

SEQ ID NO: 121953 - DNA, 474 bp, Enterobacter cloacae
atgtctaaatatgatgaactaagcaaagctctgtcaactcttcaggctcagcaacatcaatactggagtaagttagaggcggtttattccacaattgctaatcagtatgcaagttatctcggcgtttccgatattactgtgaagcttaatggagaaatttcctctccaatcgtaacgggttcccgcgacgccactaagaatattgttataaatactcctgcgcctctgcttaaaagaaaagataagagtttgatattcgatatctctattctactttgtccggaagggtcttacgatgttgtgcttccgttcttgcttcaagcaaatataaagagaaatggtgatgaatatcatttagaggccccagagctggaaataaaagttatttgttatgaggttgatggacgtgttgattttacaagcttctttgaccgtattcagttaattttgatgaaaaaattagctagtagttaa

SEQ ID NO: 121954 - DNA, 1449 bp, Enterobacter cloacae
gtgaacgaaagcgaaaaaaaacaactcgccacgaatgccagcatcgaccgcgagcggatgcgttacgtcaacgcactgttcaatggcaccagtaataccaagcgtaagcgcctgtatcaggagtttgggtacccgcaggatctctgcttcgatgacttttaccgggcgtaccgccgcaatgccatagctggcgccgcagtggcgcgcatggttgatggctgctgggaggattacccggacgtttacgaaggcgaccagactaaggatgccacacagcagacaccatgggataagagggtcaataagctgcttaaacgctgctggaagcagattaagggcgctgacaaacgtaacctagtgggccgttactcagcgctgctcatccaggttaaagacagtaagccctggtgggaacctgtcgataaggcgatggtaggcagactccaagaaagggcgctcgtcaggctaatcccggtctgggaggctcagctcgaccctgtcagttataacgaggaccagaacagcgaggactacggtgctgttagcatgtactcatttaccgagataccggttcagcagcaacgcagtggccagcccgggcgaatcatcaacgttcatcctgatcgcgtcatcatcctggcggaaggttcagatgatggaagactggattccggcgagtctctgctggaagagggcttcaacaagctgatggatcttgagaaggtatcaggcggcgcggcggaggggttcctgaagaatgccagtcggcagctcaattttaacttcagcgccaagacaagttttgcgcagctggcaagagcactgggcgttagcgaggcgcaactctctgaagggatggatgaccaggttcgtcgcctgaatgacagcacagatagcgccgtcatcatgcaggagggcgataccagcgtgctttccgtggcagttgccgacccggagccaacatggcggactgcgctcaatgagttctgctccacagtgccgatcccggtgaaggtgctggtgggcatgcagacaggagaaagggccagcacggaagatgcgaaggactgggcaaaaacccgtatgagccgacgcaatggcttcctgaccgaagtaatcactgaggtggttacctgcttctggacgcttggtttcattcctccagccagcagagaagaagttacagtgggatggtccgatctactggcgccgagccaggcagagaagattgccaacatggacaagctcgcggacgtggccgtgaagtcgacgaacgcgtttggccgctcagcaatcaccgaaaacgagatacgcgcggcgggcgaactgcaagccctgcctgaacttgatgatgaggtgccgccagatggcaaccagccaaagcctgatccactggccgacccagaatcagaagccgaaaagtccggtaataccacggtcgaaagttga

SEQ ID NO: 121955 - DNA, 651 bp, Enterobacter cloacae
atgagcaagccggactgggaggccatcgagacggcgtaccgggccggagtgatgtccctccgagaaatagcatcacaacacggtatcagtgaaggcgctatccgtaaacgtgccaagcgtgacgactggtcgcgtgacctgaatgctaagattcagcaaaaggctgatgatctggtacgcaaacgggaggtacgcaaacaggtacgcaacgaaagcactttgaccgaacgcgtactgatagaggcgactgccgaggtgattgccacggtacgcatggagcacaggggagacattcgccgggctcgagaactgaccaacacgctattcgatgaacttggtgcgcagtgcgcagatgtaagcgcgctcgagcagttgggcgacatcatgtttgaccccgacgataaagggcgggaccggcttaatgaaatttatcagaaagtgatcagcctgccttcccgcgttaaatccatgaaagacctgagcgacagcctgaagacgctgatcggcctcgaacgtgaggcgtacagcatcgagaataaggctgaaacgaaagaggttacgcataacgtcatgctggtaccaaccagtgacagcgtggatgactgggaagcggcagcgaagaaacaacaggacggggtgctcggtggatga

SEQ ID NO: 121956 - DNA, 219 bp, Enterobacter cloacae
atgtccgacatctaccaaatcacgctaaccacccaaacaggcgaaaccttcaccggcaagatgtcacgacgtcagcctgagctggttaacggctttgtgccgctggcgacggaaacgggccagtggctgtatttcgctcctgctgatgtgaagcgagtggagttcacgccggtgccggaagagcagaccgaacagccagaagaacaaacaacggagtaa

SEQ ID NO: 121957 - DNA, 135 bp, Enterobacter cloacae
atgttctcagaaatagttctttctttagccattacttacgcgccatcaatcaaccagattgtcagaacactttgcctggcaatcagcctggcgcttttaaaacgctacggcattatcaagcccacccgcagatag

SEQ ID NO: 121958 - DNA, 378 bp, Enterobacter cloacae
atgagtcgaattgttggagttacctgtgcggtaatcatcgtggtaatcagcgctatgggttgggctatcaaccactaccgcgacaatgccatcacctacaaagaccagcgcgataaggcgacggtcagggcagacaaatcagaggcgatcaccagcaacgtgatcaccacgatgaacatcatccgtgacatctcacaggctacccagaatgcaaagaacgaactggctcaaaagggcgaaacgcgcattgtctacatcaggcaggcgcttgaaggcgatctgtgcgctaaccagcctgttccttctgccgctactgacagcctgcgggaatacgcagacagtttacgttccggccccagtggtgccgataagcgctga

SEQ ID NO: 121959 - DNA, 540 bp, Enterobacter cloacae
atggcatcgaccagagcaaaactcagcgcagccatgctatccctgatcgccgctggagcatcagcgccagtgctgtttgaccagttcattagtgagaaggaaggcaatgcacttgtggccgtcatggatcccggtggcgtctggtcgctatgccatggtgtgacagttatcgacggcaaacgtgtcgtaaagggtatgaccgctaccgaggcgcaatgcaagaaggtcaacgccatcgagcgtgataaagcgcttgcctgggtcgaccggaatatcaaagtgcctctgacagagcctcagaaggtgggtatcgcatctttctgtccgtacaacatcggccccggaaagtgctacccgtcgacgttctaccagcgcattaacgccggagatcggaaaggtgcctgtgaggctatacgctggtggattaaagacggtggacgggattgtcgcctgaccaaaggcaagaaaaatggttgctacggtcaggtagagcggcgtgaccaggaaagcgcactggcgtgctgggggatagaccaatga

SEQ ID NO: 121960 - DNA, 366 bp, Enterobacter cloacae
atgtgggccgtttttatttcaggctccgggaaccatcatcgacacgcctacttgttaaatcgtcccgagggcctgaccccttacgcacagctcccgccattacgcgaggagaaagagatgatccgatatatgcctgacaaaatcgcatccgcagtctcgtattgcgtgtctggcagtcttatttgtggaggcggcattttgcaatggttgcacgacctcgactggaacaaggttgcagtgattggcggttttcttatcggtatagccacttacctgaccaacctttacttcaaaagacgccagaccaaggcatacgagaaggccctgaagaagggctacatcaccgcaccaccacaggataattaa

SEQ ID NO: 121961 - DNA, 135 bp, Enterobacter cloacae
atgggcagacgtagacgtggtaggtacagaatcaacaagaatccggacttagcggatcgaattattcacatgattatcgatatcgctattttcgtcttcttggtaaaacttgggatatctcttttgttcaaataa

SEQ ID NO: 121962 - DNA, 642 bp, Enterobacter cloacae
atgcgtaaaccatcccgccgtaagtgcaaagtatgcggtgaatacttcgtgcctaaattccacgacatccggatccgctggtgctgccctgagcacggcgcaatcctcgcaatggaagaacgtgaaaaggagaaggtgaaagccgcggcgaagcgcatcaaggagcagaaggaagccgagaaggccgggcgcaaacgccgcaaggaacggctggcagaactcaggcctgccgggtactacaaggcacaggctcagcaggcattcaacgcctacatccgcgcgcgtgatgctgggttgccatgcatcagctgcggcgagaccaacccgcccgatctgcatggcggccagtgggactgcggccacttcaaaacggtcggcgctaaccctgaattgcgctttgaagagcgtaacgcccataagcagtgcaaatcctgtaatgccggggccgggaagtacaccgccaaagaggcgacggtcgcgcagcaatacgaagttggtttggtcgctcgttacgggcaggattacgtcgactggctcaatggcccccacgaaatgaccaactaccgccgggaagacttcatccggatccgcgatgagtaccgcgtcaagctcaaagcgctgaaacagcgggaggcagcatga

SEQ ID NO: 121963 - DNA, 651 bp, Enterobacter cloacae
gtgattattgatgaacattttaaggatagagtctcgagtcatctatctcagaaaataatcgaagacgcattaaatggaaggggatttttcgcccgaaatgtgttggagtccattcggcttcttgagggaatgaaggttgccccatcaactttagcaatgcgtcatcaagagcgtgaattaaagggtgcgttggccggatttcatcatatacatgtttcagaggataatttcactcgagctttcaatgcgtacaggcaaaaaggagaagcgcctgagaaaaatccatccgagccggctttacaaggccggggtaatcgcaatgctattcagatgtttttggagcaaaatggagttagtgctaaagatgcttcgtttgaagaacttatcataagattccaggatcttattgatcagatgggagaagaaaatgcaaaagagcaaatttctcgtattgctgctgagctatcttggaaaccatttaagggtaatgatgtaatttctggagactggctagtctattgggtgagacaggacggtgtaagattttatatcgatagttttgaacacatccccgcaaccgatacggaacttcagaattccaccgcaacctcattacatgccattcttcaaagcatggataccagcatttga

SEQ ID NO: 121964 - DNA, 348 bp, Enterobacter cloacae
atggccattaaggcaaaggatatagaaattctacaccagtatgcccagggagtaatggaacgctccgaacatcacgctaaatatgttggtgtagttgcccttacgctaattggcggcgtcatttggaaagcgatgcctgggtctatagaaattagaacccataaaggcagccttgcaaatatggtgtggtggaaaagcgaagataccaacaaaaaatacgcaatttcatacaaccacgatactcttgaaatcgaaataaggggtgactcagcaaaaggcgaggttttgtttagcttaagcaacagcactaaacctgaggatgtattaaaaatgctgtcgcagctttaa

SEQ ID NO: 121965 - DNA, 324 bp, Enterobacter cloacae
atgagcaacatcgacaaacaggcgctgcgtaagcgctactccgcaaaaccgacaccaaaatgcgatatctgcgacgccagaatgacaatacagcggatgtctggcagtcgcgtaacttacggctgctcaggtgcgatttacgatgaaaccggatgccactacgccgaaggccgaagcctggctgatgaccattatgaacaatcacgcgtgacagtcaccgatgaaagtgaccctgatgtgctggcgctgctggatgagccggaagccaaggaaaagaggattgaacttctcacgtcggaacttaatgctttatgggggttgtga

SEQ ID NO: 121966 - DNA, 441 bp, Enterobacter cloacae
atgaaaccaacatacgaagaacttgaagccagatgcgcggctctggctgcggagaatgcggggctgaagtcagcgattgaaaagcatgctgacagttacatcatgtgcggatattgccgaactgagcgcgatggcaagaacgacgatgtttgtgaagtgcttgattcaatcccagctaccgacgctttcctggctgaaatgcggtccaaggcgcgaaacgaaggtatcaactatgccgctggtcgtctcgccgctgctttcaatcacggttttgtcgataagccgctggctgaagtctgtgacgtggtgcacatgattctggacaccaaagaagaattggcagggtccatgattccagccgttgacggtttatctggcgagtacgcagaagcgtttctcaaagattccgccgcccagcttcgcaaaggagtgcagtcatga

SEQ ID NO: 121967 - DNA, 297 bp, Enterobacter cloacae
atgaaaatttacatcgcaggaccaatgacgggttacgaaaactacaaccgtccgatgtttaacgcagtagcacagcagatgttatcaggtggtcatgtggcattaaatccggccacgctcccggatggtttatctcagcgtgagtatatggacatctgcatggcgatgcttcgctgcgccgacgccattcacatgctgcatgggtggaaagagtcggaaggtgccgtcgctgagcatgccatggctaaaaagctgggaattaaaatttcttaccaatttgaaggagctgccgcatga

SEQ ID NO: 121968 - DNA, 345 bp, Enterobacter cloacae
atgaccataacaatccgtgggcagattcttgcagccctgcgtaataacccgggcctgaatagtgctcgtattgccaagatgatcggcatgaccaccaaaaagatgtcaggcacggtcagctcgctccttgctgacggcctgatcacttgtgagggcaagcacggccagcggctttatcggctgaccagttacggcatgaaatacgcaccggaaaccataccggccatgccaaaggggaattcgaagctggtgcagcgtaccgagacgaacgttatctgccaggagtgccgcaacagcgcggcgatgaagcgagtattgatggtttgggggagggtaggggtatga

SEQ ID NO: 121969 - DNA, 690 bp, Enterobacter cloacae
atgaaatctcttgcagagcagatgcgtaaccacgaccgcgagcagatgagtcgcatggctcataacctgccagagcagtatcaggaacgcgccccggtcgagcaggtggcgcaggtattcaacaagctgttcaacgagctgcgcgccgcgttcccggccagcatggcgaacttccgcacccaggaagacctgaacgaattccgccgtcagtggctgctggcgtttcaggagaacgggatccactcaatggcgcaagtcgatgccggtatgcgcattgcccgccgccaggagcgcccattcctgccgtcgccgggccagttcgtcacctggtgcaaacagagtggcggggcgcttggcatcaccgttgatcaggtgatcgccgaatactgggactggcgtaaccgttcgttcgaattcacctccagtgagcatttcccctggtcgcagccggtcatgtaccacatctgcgttgaactgcgccatcgcagcacagagcgccagttaacacatggtgagctggcgcgcgaagcgggcgatcttctggacatgtgggagaagcgcgtcaccgagggtaagccagtaccgccggtacgccgggccattgcagccccggctgccgagcacgggccgacgcctatccagttactccaggcgaagtacaaccgcaacaagtcgaacgggatggtgtga

SEQ ID NO: 121970 - DNA, 540 bp, Enterobacter cloacae
atgcattcacttgcgtatcaacacaataccggaatacacccgggagcgatgataaaccgcgctcaacctaaggcgccagaccacgaaaagatccgcgatgcggtccgggcatggtcttcggcgctggacaatcaggacgtcgtttcggcgctgatcatcaacgaataccgggagcagggcgggaccgccatcagctttcctgacgacatcagccgtgcgcgccagaagctgttccgcttcctggataaccgtttcgactccgaacagtaccgcgagaacgtgcgccagctgacacccgcaatcatggcggtcctgccggttgagtatcgcactcgcctgatcggtgccgattgcaaaatgtctcgtctggctgaagccgagaaagaactcgctgaggctaagcaggcagtgcttctggacgctccagagcatcagaagctgaaagaggtgagcgagggtatagcgtcgctgttccgcctcatgccggagcaggtaggcccactcatgacgatggtcacgtcgatgctgggggttatgtga

SEQ ID NO: 121971 - DNA, 234 bp, Enterobacter cloacae
atgaacccaaccattaaaaccgctatcaccatcgtcgggtctcaaaaagcccttggtgaagcgtgcgcagtgtcgcagcaggcggtttacaagtggctacacaacaaagcgaaggtttctccggagcatgtgaacagcatcgtaaaagcaactggtggcgagattcaggcataccagattcgccctgacttgccgacgctgttcccgtcaccggccgacaacaacgccgcttaa

SEQ ID NO: 121972 - DNA, 771 bp, Enterobacter cloacae
atggttgtatttagtcaacaaccattttcgtttgatggaataaaaccatggttgtacattgcgtgtatgaaaacgacactcgctgaaagattgaaggaagccaggacattacgaggccttacgcaaaaggccctcggggatctggtcggggtaagccaggcagctatccagaagattgaaacaggaaaagccaaccagacaacaaaactggttgagcttgctaatgcgttaaaggtaaagcctgaatggttgagttctggtgaaggcgctatgcttctcactgggcaggatgaagctatcccaccgtctgatcagtggggtaccgttgagccttgggataattcaaccccattacctgatgacgaggtagaagtgccatttctaaaggatattgagctggcctgtggcgatgggacattcccacgcgaagactataacggctacaaaatacgcttttctaaagctactttgcggcgtgtaaatgcacacagagaaagcgttctgtgcttccctgcccatgggaatagcatggagccagtcatccctgaagggactacggtggctatcaacatcaacgacaaaaaaatcgtggacggtaaggtctatgccattagccaggatggatggaaccgcttaaaaatactttatcgaattggcccgaacaggctgagcattcgtagtttcaatcacatcgaacatcctgatgaagaagcggatcttgatagcgtacaggtcattggaagaatgttttggacatcgacaatctggtaa

SEQ ID NO: 121973 - DNA, 147 bp, Enterobacter cloacae
atgtttgggacctacagcttcaccgcattagacgagcaatgtgagagtagttcagatgctgtgaaagcgaaaatggacgcagaaatgaaagagcaatgcgctatggcgaaagaagctacccagtacctaaagacactccgccgataa

SEQ ID NO: 121974 - DNA, 156 bp, Enterobacter cloacae
atggcaaaactcgcagttaagacggttcaggaatttgttaatgcctgccactgccaaaacgaagatgacgttcttctggcattaagcttctggctgaatgtgggcatggaagcgggtgagcttgtccagcatgggcataaggttgtcctgcaatga

SEQ ID NO: 121975 - DNA, 204 bp, Enterobacter cloacae
atgatgcaccactacggatacgttgaagttaaccgcggcgcagttcggcctggcatgttggttaagcacaaagatggcatgtggacggcatcagccaataagcgcggaaagctctacctccaccgaggttgtgagcgcaccttcaccagagagcttctggttgaggtatatcttgatggccgcggcggcgggttgagtcattaa

SEQ ID NO: 121976 - DNA, 315 bp, Enterobacter cloacae
atgctgataaataaaaaatgctcttccccaatgtactcaactaaagaaatgggtaagcgctcgaagcggaatcattggtttgtgagagaaaagggaagtgaccagccgcatgatcagtcatggtatgactggtggaagtcacgctcgcttggcttaggcaagaatggtcatattgcgtggcgttctacgtgtatcgcaagaaacgcacctgacccattcaatccgccggattcattcgaggtcgacttccaggcacctgacggcaagctgtatcatctggagtttaagcttgcacctcacggcccaaacaaataa

SEQ ID NO: 121977 - DNA, 285 bp, Enterobacter cloacae
atgaacgcatacctcacttacgaccgcatcgaagatcggctgtgggttgaacagcagctcaccgacgagaaggaaaagtggatcgacgaccgggcgcagcaaatcatcgacatgatgccaaaagagccgtccggcctcttccatttctcggtcccgattgactccagcccatacgaaggacttcgcagcgataaagctggcgaggcctacaacgatttcatttcggcagttgcttacgcccaggcggaatacgactgggaacaccgtaccggctgcccgttttaa

SEQ ID NO: 121978 - DNA, 429 bp, Enterobacter cloacae
atgaaacgcacacctttctatcgcaggcccgggcgaaccgggcaattctccggactccgtgaacgcgttatctggatgattcagacgcgcggccgcccggtaaccggtagtgaaatcgccgagaagttcggcgtaacgctcatcgagttcaaccgggtcgccaacggcattacccgaggctccggacagatagcgcagattgttgagtcggggaaatggctcaacaaggacggaatctgcgaccggtcattcgacctggtaacaaagccaaaggtcgtaacgccacagggtaaatcgcggctattcacccggcgcgccatagagcaatcgcaggaaggccgacggcaggagtgcatagctcgtgccgcacgccgtagccggctgattgcccagggcctctacatcgacgaaatggagtccattctatga

SEQ ID NO: 121979 - DNA, 153 bp, Enterobacter cloacae
atgactcacgctcacgacgacatcagggttggcacactgtgccttcccttcattggtgacggctggctaatgccatggggcgaagtggtcagcaatccattaaaggcgcagcggctcgctgaggaatatcgggatagacaggaggcggcatga

SEQ ID NO: 121980 - DNA, 1068 bp, Enterobacter cloacae
atgacgccagtagcttattacaacgaaatcgacccgttcgctgcgcagtggctgcgtaacctgatcgccggcggtcatattgccccgggcgaagttgatgaaaggagtattgaagatgtcacacctgacgatctgcgaggattcacgcagtgccacttcttcgccggaattggcgtctggtctcattccctgcggctcgccggatggcctgacgataaaccagtctggaccggttcctgcccgtgccagcctttcagcgcggcaggcaaaggagatgggtttgctgacgagcggcacctttggccccacttcttccacctcatcagcgagcgcagacctcagcatgtctttggcgaacaggttgcagcaggtaacgcaaatgtgtggttcgaccttgttcaatcagacctggaaggaatgggatacgccttcgggcttgtgccgtttacgtcagcgagcatcggcgcgccgcacatcagagaacgagcttattgggtggccgagtccattagcgagcaatgtcaaaaattgttatcaggactggctaaaggtaatggcgcggaaggaggcaggacgtcagccaaaccttcaagattttgcggtgctggctgcatggcctactccaaccacggaatcagcgatgagggagaaacgctacgcacagggcggaatgccgttctcgatggcagcatcgctaatcggctggcccacaccgacaacgggcaacactcgatctccatcagtagatgcggccatgaatatgtatcgacaggacggcagcaaaatccagcagcgcttgcaggacttagcagggattgcgggccccttgaggttaacggtttttggcgagatgcggactggctcttatgtcgagatggcaaatggcgtccagttgaacccggcacattcccgctggttgatggggctgccgcgcgcctgggacgagtcgagcccggggtggcaagagtggcaagcagcaaccgcatcggccgactcaaaggctacggtaacgccataaacgcacaggctgcggctgaattcatccggggttacttggaggggttatga

SEQ ID NO: 121981 - DNA, 219 bp, Enterobacter cloacae
atgaaaccagcaaatgaaaacgccatccgcgccgcctgccgccgctgcaccgaggaaatccagcaggcaatgcgcaagaagccaaagccaaactggaacgaaacggtgcctcccatcatcaacaagcatcacaagaaaattgaagctctgggagttagcctcctggagttcgtcgtcaaaactggccgccttaacgggcggtttggagccgaacaatga

SEQ ID NO: 121982 - DNA, 231 bp, Enterobacter cloacae
atgaccaaatacgcgaagcttgatagcgaagtgttaagcgctatcggcgctcagccaacctcgttttcgaagttatttagcccttccgtcagacaggagtgcctcgtcattgctgaagcagaaggaaagcacccgatggacgtattccgcatccttgaccgccgactccagtctctcaggaagcttggcgttattcagcacgtcaaaggcaaagggtggatacagccatga

SEQ ID NO: 121983 - DNA, 222 bp, Enterobacter cloacae
atggacatcatcgataccgcagcagagattgaagagcttcagcgtaacgctgccctttccgcccaccgactcaaccgtaacgccgtatcagctgagcattgcgcggaatgcggcgaaccaatccccgagccgcggcgcgctgccgttcccggctgccagacatgcgcggattgccaaggggttatcgagctgaagaaaaagcagagggggattattaattag

SEQ ID NO: 121984 - DNA, 273 bp, Enterobacter cloacae
atggctaagcttctcaatttgcaggaatgggctgctgaggtctacacgactccaccatccctatctactctgcgtcgatggacgcgggaggggcgaatttatcccgcgcctgagctgcacggaaaggaatataaggttcagcctgacgctatctacgtggatccgcgcaagaagaatctgcgcgctaaaccgaaacacaccaaactgccgtccggcggcaccttactggagagactgactcatggcgaaaaggccagtacgttacgacgctaa

SEQ ID NO: 121985 - DNA, 219 bp, Enterobacter cloacae
atgggctatcacggctatcggttccgcattctgccggataaaaatggctttgcgatggttgcctggcccgtgagctatggtcagacgggggtaatgagctttgtcgttaaccaggatgacaaggtgcatcaggcaaatctcggcaacgattcggcacaaaaagcgcaggcgctcgctgcataccacccggataaaacctggcagcctgtcaccccctga

SEQ ID NO: 121986 - DNA, 1557 bp, Enterobacter cloacae
atggaaaacggccagtacaatacagattcaaaaactgcttttgtttaccatacagatccgctaaaacggtctctgcatggtggtttacccatcaatctgtactggtttaatgctctgtatggtgaaaaaaaaggatacagcatgacgcgctatcaacatctggccaacctcctggcggaacgtatcgaacaagggctgtatcgcagcggcgaacgtctgccgtcggtacgcacgctgagccaggagcacggcgtaagcatcagcaccatacagcaggcctaccagatcctcgaaaatctccagttgatcacgcctcagccgcgctccggctattttgtctcgaaacgcaaagcccagccgcccgtcccggcgatgacgcgcccggtgcagcgccccgtggacgtcacccagtgggatgaagtgatgatgctgctggacgcccgcgccgacaaagagatgatctcctttggcggcggctcgccggacattaaccagccgagcctgaagccgctgtggcgcgagatgagccgcattgcacagcataacccgggcgaaatgctgagctatgacgtgctcgacgggcggctggagctacgcgagcaaatcgcccgtctgatgctggatggcggctccaccgtggcagcaaacgaaattgtcatcaccaacggctgccacggcgcgctgtcgatcgccctgctctcggtatgcaagccgggtgacatcgtggcggtagaatcgccatcgtttcatggcaccatgcagatgctgcgcggctttgacatcaaggccattgaaattcccaccgatcctgaaaccgggatcagcatcgaggcattagagctggcgctggagcagtggccgatcaaggcggtgatcctggtgccgaactgcaataacccgctcgggtttatcatgccggagtctcgcaagaagcaggtcttagccctggcacagcggcacgatatcgtgattgttgaggatgacatttacggcgagctggcggcggagtacccgcgtccgcgcaccattcattctatggacatagatggccgcgtgctcttatgcagctcgtttaccaaaaccgtggcgccgggcctgcgggtcggctggatcgtgccggggcgctattacgaccgggtgatgcacatgaagtacgccgcgggcgggtttaacgtgccgggcacgcagatggcggtggcggcgtttattcgcgacggccattaccatcgccacgtgcgccgtatgcgtcagatttatcagcagaatatggaaacctatacctgctgggtgcggcagtattttccggcagagatatgcgtcacccgcccgcagggaagcttcctgctgtgggttgagctgccggagacggtcgatatggtgtgcgtcagcaagcagctgtgccgtctgaagatccaggctgcggccgggtcgctgttttctgcctccgggaagtaccgcaactgcctgcggatcaacgtggcgttgccgccgacggagaagaaccgcgaagcgctgaggaagatgggcgaggcaattgtgattgcgatggaggagtag

SEQ ID NO: 121987 - DNA, 399 bp, Enterobacter cloacae
atgcaggcggcgtacacctacacggatattcgctacaagaagagcagcccggaagaggagggcaagcgcgccgtttatgccccgcgtaacatggccagcgcctggctgagctacgacgtcaaaaccggccctctggacggcctgaccgtcggctccggcgtgcgctatgtcaacgggatcgccagcgatcgccagaacacccatacgcttccgtcgtacacgctggtggatatgaccgtggggtatgacctgtcaaaagtggggctcacgggcgtgagcgcgcagttgaacgtcaataacctgacggacagaagctacgtcgcggcgtgtaactcactctcttactgctacttcggtgcagaacgcagcattgttggcagcgtttcgtggaagttctga

SEQ ID NO: 121988 - DNA, 423 bp, Enterobacter cloacae
atgcttcaatctctgaaccacttaacgcttgctgtcagtaatttgcaaactagcctgacattctggcgcgatttgctggggttgcagcttcatgctgagtgggatactggtgcttatcttacctgtggcgacctttggatctgtctttcttactacgtatcccgaaactacgtagccccgcaggaaagcgactacacccactacgcattcagtatcgcgccagaagattttgagccgttctcgtataagctgaaacagtcgggagtgacggtctggaaagacaataaaagcgaagggcaatctttctattttcttgacccggatggccacaagctggagctgcatgtgggagatttagtatcccgactgacgcagtgccgggagaggccttaccctggaatgcgtttcggacctggaaaataa

SEQ ID NO: 121989 - DNA, 333 bp, Enterobacter cloacae
atgtatttcccaaaatacaatgctgtcatttttatccacggctgtttttggcatgggcatgataacagctgccctatttctcacattcctaaaaataacgagtcctactggcaaaataaaatcaataaaaatcatgagagagatattaaaaatcaagatattcttgcatctaaaaacatccgcgttctgattatatgggagtgtgcaataaaactcaaaactattgattttgtcgattttattgattatatcgatgaatggcttagaggtggggcgaattcaacacagatgagcgcaaaggaaccaatgccgacttttgactttccgaagtga

SEQ ID NO: 121990 - DNA, 138 bp, Enterobacter cloacae; identical to SEQ ID NO: 76270

SEQ ID NO: 121991 - DNA, 1074 bp, Enterobacter cloacae
atgaggataacagcatcgaatctggttcaggcgatttcgagcttacccaaaaatacgctgtttaactatataaacgataggaatagcgggaagattgagattgtacgtatccaacatcccgaaggtcctatcgaaataaagaggtttgatcctaagaaaggtcaaactcaagcaacagccaaaacagagagtatttcgactcaaatgctttggcgacttgcaaacgcgctcgaagaaaacagacctgtcaacgtcgaaagggttttcggtgccagttacaacactcgctcggtattggagagcttgcttgcacatactccagagttctattggtgtaggccagccagactggaaatcatgaatgcgcaaaagtctataaagccaggacataagcatctgatttttctgcccaatatgccacatactaatggtttgttaattgagcaccagactaatattgtcgtctctgaaatgagcttcgatgttgtacaccaaagcgtcgatattgagacaattaagccgactaaaggcatgactattgaagaaaaaagacgtcatgctcagatacaaattgctttagtaaaaataggttattgtttaggtttagatacttgggttgcagccaatgatcgtagcttgcaatataatggtaaagctatagcccaaatggacggagtaataagttcattatcagatgaacaagtactgcaatcatataatgatgcaattaaagatgcccgtctaatagactgcatttggtttagggatggtcgcatgatgccagctgtaatggagattgaacacagtactggtataaaaagtggacttactcgcatgaaacaattttatgatcatgctccgaggttacaagatatccgttggactatcgttgctcctgatgaatatagggcaaaagtaatcgagtttgctaacatgccacaattccgtgacttagatgcccgatttttcccatactcaagtgtagaagaactttattctttatgcgagcgaaggaaactaaagggggttttagatagtttcttagattcttttatggaaaaatgtctagtataa

SEQ ID NO: 121992 - DNA, 897 bp, Enterobacter cloacae
atgaaagtaaatattttcctaataccggatagttttaactttgggaaagatatcgaagagattttatctgatgtaaatatttttaatatattaaaagataagatggcatctgattttgtaacattctcactgtgttctgatttttataataaaatagctcccgaattatataccgcttctatggatagtgggtgggctatgagtaaattttatgatggtattaacaatgtgaatacggaagaaattgattccgtggacacacttgttttagcgaataacgataatccagaatatttcgagcgttggattgggatatatacacctatagatattaatttatcacagctaaaagaagaagcgaaagttaaatgtgagaattccttggtgaaattctgtacaaatactttggcaaaaaacaaaagagaacattcagaatattcttttgatatacagcagatatataaaaatctaatatttctagaaaatcctcaacatgataaatataagacctttgatagtataaggaagatggatggtgggtataggaattttcaaggagcaatatcaaaatttttatgttttgctaatagctataatataatcccacataactctcaaactaatatagataatatgtgcgcttttttagattttcctgtaaccccagaggggaagggaaagaataaaagaaaaataaaagcattgaaaagagatttcttgattgatggggtggtctatgaaaatgtgaattgtgagtaccactataaattagaaaggtatgatgactcaaatggaaaaggaacttattattttaataggatttattttggtttttttaatagaattgatcctgaaaatccgaagatttcaattgcacatataggagaacacctttga

SEQ ID NO: 121993 - DNA, 1155 bp, Enterobacter cloacae
atgttaatgattgaaacgctaaaacttaaaaattttaaggcctataaagaccaaacctttaacttcacgaatcttaccgtattttgtggtaacaactctgttggaaaaagtacagctgtacaagctatagggatgtttttacaaactaattttctttcaggtagttcattaaaaatcaatggagacctagtacatataggttctgtcgatgacattcataattatgacagaagaaaagatgatgagttgttgattaatatttcttcatctgaatttgatgcctgttgggggtatggaaaagatggagtaatctatagagacaatttacctaacaagaatgaactgccgtttattgctaatgagaaaactttacataagttaaaatttttctcagagaaaaattttaactttcaatatctagatgcagaacgctatggaccgagagacaacatgcctttgtctaatcataactatcatcaaaattggttagggaagcaaggtgaatatactattgaagtattagaggggctttttaataagcggcttaagttattgaatgaaaatagcacaaatcaagaagatcctcgaaggcatgttaattcgtctagcgctaatgttttccaaaatattgagttatggatgcaggaaatttctccggggcataaaatactgcccagagtagaaaattctgccaacgttgctttcaattctataattaccgaagatggtcagcatacgaaacctataaatataggttttggttacacatattctttaagtatcgtgtctgcgttgcttttggctgagccaaatgatttagttgtaatagaaaaccctgaggctcatcttcacccaagaggccaaagttatttggggcgattaatcgctttggccgcacaggctggaatacaagttataattgagactcatagcgaccatcttctgaatggcattaggattatttcaaagatcagggaaggatttagtccagagcttttcacgctttattatatctctaaagatcgagatgatacaaaagttgtaaaaattgacataaataatgaaggtaagttatcagaatggcctgaaggattttttgatcagcagtctttagatatgtataccctgatgactggaatgtctcctaaaaattaa

SEQ ID NO: 121994 - DNA, 1950 bp, Enterobacter cloacae
atgaacttagaaaatgtgcttattgatattgaaactatgttgattggcaaagagttacagccaattcatcagagcacaggtgtgctctatgtcacaaaaattgatagagtggcaggtaagtattttgtatatagcccaaaggataaaaagactattgggagaactatttctacagagctaggtgcaatagttaacgatttaaatcgtagaggtttttgtaatgtggatcaatctctatatggtagtggttctagccgtaaccatccggagactatttttgccaacttgccttatatacaatactttaaatataaaaacaaaaaacacattttactcagagaagagatggttcatgagccaggaactctttcggaagttcaaggtgctagtttcagaactctgagaaaacaaattgataattacttagatttggatctcgaactattaaataacaaacaagaaaaaatcatccaagatctttatgatgcttacgatattgtattgaaaaaatattctgcagaactttctgttcttaaaatagaacaatctctaaaaaacctaaaacttataaataaagagttatcagattcagttgtctgtctggaccgaaggccttctgataacatcctgactaaggataaagaaagcttaggttatgtttctatcgaggactcattagatactcctgaaaatacaggcgtagatattggtgaggataatataattgatggagacgatcttaagaaacaattattcgcagccgaaacaaaattaggtgttgcaaagattaggatgatgactccaacgttatcgttaatttttgacagggttgagttcaaagatattgagttacaaccagatttccaaaggaaggaccgtatatggaaggctgataagaagtcaaagcttgtcgaatccatattaatgcgcttgccattgcctgttttttattttggcgaaaaattagatggttcatggattgttgttgatggtttgcaaagaactacctctatctatgatttcatgagtaataagttcccattggctaatctggaaattttatctaatctaaacggaaaatattttaaggatttatcgaggacagaacaacgggacataagagaatatgcaataactgcatatcttattgatgtcgatgagcgaaattcaaatttggttgttgagcttttccatagaattaatacctatggagttaaattgagtgaccaagaaattcgttcagctttaaatcaaggttccagcgttaagttccttcgtttccttgcttcattgaattcctttaaagaagcaacaagatataaggttaaacctgacaggcaaaaagatatggagctttgcctctcagctctttcgtttatggttcgtggatataaagattatgggcagggttcgtatgatagtttcttatccggaacgatgtcatacttaaatgcctttgaattgcatttagaaaatgaggatgatattgataacggtaattcaataattcgtacagactgtaaggaatatatagaaatatatgaaaaatatgactctgcattaaaattagcgaaagagatatttggggattttgcatttgtaaaagagcctattagcaacagttctccaattagtaagcagttatttgagttggtgatttattatttctcgaaaatgtctcctgctcaaagagaaatattgcgtaaaaatgcatctgaatttatcgatcatttgtatacagcaatagaagaaaattccaaggagtatgccgactggcattcaaaaacatacaatgagacagatagagggtttaaggatgctttatcaacatctacaggtaaaagaataactgtgttgtatcgctttgaagcgtttgcagaaatccttaaaaccactactggtattgtttttgactattatgatggagagaataatcatgttaatgattga

SEQ ID NO: 121995 - DNA, 891 bp, Enterobacter cloacae
atgcccccacacaaaatccgccaggagtggctgactctggacgaggccgcagaagtcatccggcagcacaacatcacgttgctgcccgccgatctgatccgccacgccctgcacggcgatctgccactctcggtctacttcccttctcctgtacttctgagaccactcaatcctccttgccactttgcctgccgattcagtaagcccccctttccgccttcgcagtgcaacaaacccggcaaccgcaaagtgatggcgaactctccaccatgcagacgcgacccgactttgcaactgaccaccagccatctgtggaatttgccgttaatcggccttgagcgcctgctgctccaccagcaactggcgaaaacgttgaatcgtccttgccccaaagatacccactgctgcaaccagattggcattgtggtctgcgatgagaacgacagctactaccaactctgttgccgcaaatcgttacgggagcttttgctggaactgctcgccacgcaaaacaacctccaggaagagcttcatctgctgattggccagctgtatggcaatggccgcaatgacctcaaatcccggctcagtctgtccgtctgctacctgcaggacacgctgcctcctgacgcactgttcgtcatccgccgcactcatctcgaagccttcctgacccgtcatcagccggaatcaaaggagcggatcacctcagcgctttcccgtttactgtggctggcctgcaagcacaacccgctactggatgatgaactactgaaccatccctacaaactgctgaacattttcgaatgctgggcgcatgaggatggtatgcaccagccgctgagtggcgagacgttgaaaaccgccctccagcgcggcgcaccgccgtaa

SEQ ID NO: 121996 - DNA, 195 bp, Enterobacter cloacae
atgaatagcgacagatttttacgcttacgccaggtggaagacaaaatcggcttcggtaaatcgtggatttaccggcaaatccagctgcaacagtttccgccatccattcgactcaacagccgccacgtcgcctggctggaaagcgaggtggacgcgtggatccaccagcgcatccggcttacccgtgatgtctga

SEQ ID NO: 121997 - DNA, 1284 bp, Enterobacter cloacae
atgtgcgcttcacacctgctcaaccgctggcttcacggtgccagcaatagcggagaacaggagatggtcctggtcagtctggagcaaatccagccgttctctctcaatccccgcgtcacccgcaaccccggctatgatgcgctgaaagcgtcaattctctcccgtgggctggataacccgccggtgttgacccgtcgccccggtgatgaaaaatacatgctcgccagcggcgggaatacgcgcctcgccatcctcaatgaactgtggcaggagacacaggatgagcgttaccaccgtgtctgctggccgttcagaccatggccggaaacgctgtcaccgcagcagggcgaagtccagtgcctgatcggccatctggccgaaagcgacctgcataacggattgatgtttatcgaacgggcggaaggggtcctgcacctgcgcgatctttacctcgaggcaggtattgaatgcccgacacagcaggtgctggcggagcaactcacccgcgacggctatcccgtcagccagtcgcaaatcagccggatgctacagaccgtcgactggctgctgccctgcatccctaacgcgctatacggcggcctcacccgtaaggttatcgatcgcctgctggcgctacgcagcgcggcggaacaggtctgggcaaagctgatgccgctggaacgccagccggaatttgccgacctgttcagcaccgccctcgccaccttcaacggtgagccggaagccgtggtaccgcaactggtgcaggatgaactgctcggtgagatgagttgtcgcagcggcatgagctggaatacgttgctggcggaactgaccgacggtcagagcaagcggcaggtgctgctggggcctcccgccgaaaaggtcctctggccgccaccgccggaagcggaaaaagcaccactaccagagcctgaaccgccaactgaacccgcagcgcccggcgagacaaagccctcgccgttggtgcatacggcacggtcactgtttgccagctggggactggacgcctgtatccagcgggacgacagtgctccggccggtttcaccctcgcgccctgccacgattttccccacccggcggcacagcgctgctatcaggtgctggcggccctgaatggcgacaccagtacgccgatgcccgccctcgaattgttgctgtcgccggactacaacaacgctcagatccagcaactgatgcagcttatcagcctgtgccgccagcgacggctgcgggaggtgcgccatgacaccctcagttaa

SEQ ID NO: 121998 - DNA, 558 bp, Enterobacter cloacae
atgacaccctcagttaaccaggcagtactcacccacatcgtccaggcgctgaaggaggggcagatccgctactgcgaatcgctcggcttcagcccgcaggagctgtgcgagctgacgcgccttaccgccgacgacatcctgtttctcagcaacagcgcggtgcagttcatcaccacccacattgatcacgagatgctgggccggatgctcgcgaggatggagcaggagcggctgttccagcagcgtctggaggaagcgctgtcgctcggcgcgtccatcgagttcattaaccactattttggcctttccacgccggaggtctgtgcccggcggcggctgattggcctgtttgtccgccaggggcgcaacaatgccccggatgagcaggtggagacgctggtgtggaacgagtggcagaagacgggcgtgaaaaagctcgactcacccgaagcgctgaccgccatgatggcaatggcccgcgaacacgatctgtcgctgacggtcatctggaacctgctgcgccagtggactcaggagaagctgctgcatgaagagtga

SEQ ID NO: 121999 - DNA, 873 bp, Enterobacter cloacae
atgaagagtgacgatcggctgctgtttctcggcaacccgcagcagagcgtgccgaagcgcctgctgctggcgcgcaacctctccccgcgcgacaagttcgcgtggcaactgctgcgcctgcatgcccgcgacgacggcagcggcgtcttcccctcctacaacgaactgcagggctggctctctgaccagcctgaaggcgagaaggcctcgcgcagtaccgtcagcaatgcactgatgatgctgcggatcacccgctggctgagcctgtgccagcggctgcgcgacgagcaaagcggcaggatcaccggcaacctctacgccctgcatgatgcgccactgactcatgccgatgcctgtcggatggacagtgaatatctgtcgctgctcaccgcctgctcccgccaccgcaaccggcgtatccgcaacatcgctatcgggctgctgctcaccctgcaacaacctgtggacggtggacgaacctgcactgagtctccattgaagaccgcccctggtcttaatcgaggactcagtaaaaaatgcccgagtcttcaattaagactcagtgatgtggcgggggctggcgggcagccggagccgcattgcgtacatactggtacagatttaaacaataaacatcaaaagcgtacgcaactgctgcactggcctgtggataatctcttcagcgccagcgagcgccgcgccgccgaacgcgcgatgcgcaatctggatccctccctctgccagcaggtgctggacgactgcctgtggcggatcgccgcccacgatatccaccgccccctcgcctatctgctggcaacgctggagaaggccaggcggggcgagttcaatcagcttcggcgcaggcgcagatag

SEQ ID NO: 122000 - DNA, 612 bp, Enterobacter cloacae
atgcctggcacaaccctgttcagcgatatccgcatcaccctgcacacccgcgtcgccgcccggctgtggcaggcgcatcccaccggtatgctactctgtctggcgttactcaggcgtctgctgcgcgccgaggaggccgacgacccgtgggccgcccactggctgaagcaactgcgcatccgcctgaacctgattgcacacctgctgaagcaaaaaaaccgtcggctggaccaggccttcgccagcctgccgggcgctatccacaccacgcaggtcagtaacccgtccccgaccgaattcatcctgccgctggcgctgttctcaccgcccggttcgcgcctgctgcaacagttgattgattacgatctgctggtccgccgaaccctgctcgcctggcacctcggccttatcacccaggcggagaagcgcgatttcattgccaccatcccacgcctgatgctccaggtgttcagcttcgtgaaccgctttcgcaccactggcgtgacccgcgccgacgtgagcgcgaacagtccgctggcgcagacgatggcgcataagctcggaaatttgcccaaaaagatgcttgcggagatcctgcgtgatgaacaatga

SEQ ID NO: 122001 - DNA, 426 bp, Enterobacter cloacae
atgaacaatgacgacgacgaagaaagcgccgcccgcaaaagctcgctaaagggccttttaaaggcctttaagggtaagggagagctgcgagcgctggtgcgggaattacagacgctgcgcatgcagttgcaactacgccagccgatgctgaaacaggcgctgtatgaactgccggggcgtaatgtaccgctgatcctgtgcagtaacccggcacgctccggagtcagctatctgcgctggcgaaatctggacaacaaccgttcggggagcgtggcgttgcaggaagccattcaacagccggacgcaagtgatgaactgcgcgacgcgctgatgacgctcgaatggcggcggcaggtgctgaatacgcagctttcagtggtgatgtttatgctgcggcgagtacagccgttaaccacgctggtttaa

SEQ ID NO: 122002 - DNA, 1827 bp, Enterobacter cloacae
atgcaactttacctgtgcgaaaaaccctctcaggcgcgcgatatcgcccgcgttcttgacgcccgtaaccgcagcgatggttacctgcataacgccaccgtaaccgttacctggtgctttggccatctgctgagcatggccgcgccggaggattacgatcccacactgaaacactggcggacggaacagctgccgtttatccccccggcatggcggctggtgatccgcccggaggtgcgcaagcagttccgcatcatcgagaagctgctgaaacaggcagatgcagtggtgattgccaccgactccgaccgcgaaggcgaaaccatcgcccgcgaaattctggaacaatgccactggcgcggtccggtccaacggctgtggctgtcggcgctggatgaggccagtatccacaaggcgcttgcagcgctgcgacccggcgacagcacgtctccgctgtaccaggccggactggcgcgcgcccgcgctgactggctggtcggcatcaacatgacccgcgcctgcacgctgatgaaccggcggcacaagggcgtactctccgtgggccgggtgcagacgccgaccttacgcctggtggtggaacgcgaccgggagatctcccgcttcacaccccgcccctggtggcgggtagatgcccgcttgcatgctgagggcacttcttttctggcacagtggcagccggatagtgcgtactgcgacgacgaaggccgctgtatccgcgaatccgccgcccgtgaggccacggcacgcctgcaacaggccggaaccgcgctggtaatggatgtgaccacccggcgggagaaaacgccgccaccgctggccttcaccctcagcgccctgcagcagacctgctcaaaacagtggggcatgggcgcacaggagatactggatatcgcccagcgcctgtatgaaacccataaagccaccacctacccgcgcaccgactgcggctggctgccgctttccatgcacgatgaagcaccacaggttctggcggcgctggtcgccagcgacgcctcactccagcccctcgccacacagctaaatttgcagcagcgctcccggctgtgggacgacagcaaaatcaccgctcaccacggcatcatcccgacccgtaaaacggtagatctgacgcagatgaacgacagcgagcgcaaggtctacggtctggtgcgcagccattttctggcgcagtttctgccggaccatgaggtggataaaacggagctgcgtctgaactgcaccggggaaacgctggctgcccgtggctcagtggtgattgccagcggctggcggcagctgtttttgcgcgagatggcaacgcattccccggaagaaatgcaggcacttcctaccctgcaacaggggcaaacctgccaggtggaacaggtggacgttcgtgcccgtcagacccagccgccggagcactacacggaagggacgctgattgccgcgatgaaaaacgccgcccgttttgtcagcgatgagcgcctgaagcagcggctgaaagagaacgcgggcatcggcaccgaagccacccgcgccgggattatccagacgctccttaagcgcggttatctgattaagcagcgccgctttctgctggcaacgaatacggccagcgcgctgattgatgccctgccggaagcactaaaggatccgggcaccactgcgctatgggagcagatgctggatgacatcgcgacgggaaaaatgggcctggaggcgttcctagtgcagcagcaagaaaccgttacagcgctcacggctcaaatagtcagaggccagaaatatgcctcatcaggttag

SEQ ID NO: 122003 - DNA, 468 bp, Enterobacter cloacae
atgactctcagaacttttcctgtattacacgatctctccgactctctgtttgcggaccgttttaaccgtatcgatcgcctttttagccagctaaccggcagtacgccgttgccctccacgccttcttacaatatccggcggctgggcgataaccgctatgaactgacgctcagcgtgccgggctggaaagagagcgaactggaaattgaaaccgttggcggtcagctgaacatcagcggtaaacgtgaagaggagaaaaccgaaaacggcgaagaagggtggatccatcggggtatcagccgtagcgacttccgggccagctatagtctgccggagcatgtgaaagtgaccggcgcttcgctggaaaacggcttgctggcgattgaattacaccaggatattccggaagaagaaaaaccgcagcgcatcgccatcaacaacaacacggcgattgaacacaagccgtaa

SEQ ID NO: 122004 - DNA, 129 bp, Enterobacter cloacae
atgtacctcctgaacagtaaaaagaatattcaaaaagttcatgtcttgtgggcagtgttccttacccgctttctatatgaggttactgtacaatatttcaactcaccgaagcgcgattttgtgatgtaa

SEQ ID NO: 122005 - DNA, 444 bp, Enterobacter cloacae
atgaacgatacccattacttcaacctgtacaccagcggtctgggctacctcaaccggatccgggaagtgaccccgaaaaaaggcgaaccgttcctgtgctgcgacattgccgcactgcggggcgaagccagcaacgcggagcacacctggttcgactgccgcgtcagcggcaaggaagcgcagaaactggtgcgccgctgtatcggcgcctgcgagcagaaacgcaaggtgctgatccagttccgcctcggcgatctgtatgccgacacctttgtctacagcaaaggcgaccgtaaaggcgaaaccggcgtcagcctgaaagcccatctgctgcacatcgggctcatcaaaattgacggtgaagaggtttaccgggcagagcgcgaagctgaatcccagccagcgccagccgcaccgccagcagagcctgtagcgcagttctga

SEQ ID NO: 122006 - DNA, 384 bp, Enterobacter cloacae
atgatgaataccgtattgaactcacgtgaagaagcccttgaccggggcaaactgattaaccttgatgacgaggcgctggacgcaggcttgccgctggatctggccattactcttccggcccacaagcactgtcttgaagaccggaatgacaacgccatcagggacttgctgaaaggtgttgaaatggcagcggtagtggcctttatctcccaccaaccgccgcaacgcaccattcgtatcgattaccgctcggtgctgacgcagaaaaccaacggcagcacgcagcagcaaaccgtcaggctgacattacgcgttcatttttctgagcaaggcatccccatcgccgccactctggggctgatgggggaaagattcccttactga

SEQ ID NO: 122007 - DNA, 660 bp, Enterobacter cloacae
atgaaacgactgctgccagctctgctcctgttcattttcaacggcgtggctgctgcctcgcctgccatgccagaagtcgtccgctacgaccgctacctgctggccagcacgtcaccgcaacagccacctctggaacagcttacagccctgtccgttccgcccggttttcacccgacgatcggtgaagcgttgcagtatctgctgcgcgacagcggctggtctttgtgcattgccgatgcgcgccgggcacagctttatgggctcccgttaccgttgagccaataccgtatcggcccgctgcgcctgaaagccgccctgcaactgctggcgggcccggcatggcggatgaccactgacgaaaaccgccgcgaagtctgcttcaccagcgactattccctccctccgggagtgatttaccgtcatcccgtgtccctccgccctttggggccgttaacggccccgttttttctcgcagggaccgtacagcgcggcgatatccgcctggcggtaatcgtgccgcccgaggccgtttacctccaccaagtggtgtggctgcgcaggggagaacagtggcatggctggcggctggaacggtttgataagcgccgggcagtgttccatcacggcaagcgccagctgacgctgaagatgccggagtaa

SEQ ID NO: 122008 - DNA, 675 bp, Enterobacter cloacae
atgaaacacctgattatcctgttactgttcaccgccagcgtgtgggcgcaaccgcttcaggtgcagaccagccagaacgcggactctgctctcagaccgctgaccacgcaacagcaggccaccgtctggggcgtcacgccggaggagtggcagcgctatctcacactaaaacaacaggcgcgcggcgtctggtcgccggggctcgatccgctgaccaccctgggcgtcgaagccgacactgaccacgaacgtcagcgcttcgccgaactgctggtcaggcaggagtaccagcggctggagaaagaactcgccttccagcgcgcctatgacgccgcctggcagcgcctgtatccgggcctgacgccgctgaaaacgacttccgccagcactgcccgggtttcgctgttcgtccaggatgactgcccgccctgcgacagcctgctgcgtaccctgctggcgcaacagcgaccgctggatatctggctggttggaagcgaaggcgatgataaccgggtgcgccgctgggcgatggcgcatggtattgacgtaaaactggtgggtaaacacagcatcacacttaaccatgacgcgggccgctggctcctgttggggcagagcaaaatcccggtggcgctggaacgtaagggggagcaatggcgcgaggtcctgccctga

SEQ ID NO: 122009 - DNA, 519 bp, Enterobacter cloacae
atggcgcgaggtcctgccctgatcctgctgctgccctgtctggcactggcgcagcctcttccagaggcttatctgcgcgccgcggagcattaccgcgtgccgccggaactgctgtgggccgtcacacaaaccgaaagcggagcgaacctgagcggcaggcatctcccgtggccgtggacgctcaatatcgccgggactggctaccgctatgccagccaggagcaggcctgtcaggcgctactggccgccatccgccgtaccagcccgaagcgcattgacgtggggctcgggcagatcaatatcggctggcaccgggcgtattttgcttctccctgcgatgccctgcatcccctgcagaacctgtcgctcaccgcgcagttgctgcgtaagcgctatgatgaacgccccggaagctggctcaatgccgccgcccgctatcatcgtcccgctggcggtgcgcctgccacacgctaccgcaagctggtcagtcgccatctgcaacgggccacatcaccatga

SEQ ID NO: 122010 - DNA, 2019 bp, Enterobacter cloacae
atgagccgctacgcgctggaagctctgctgcgcccgcctgtggagttttacagcaccgtcaccgctggctgtggtgcattaatctgcctgacgcaagcaccgctgctgatgctgacgccgtggcaggcccaactgatggcctgcgccctgatgctgctagccctgcggcgcggcttccagggatggcacatcgtgcgctaccagcgtaacctcctgcgcctgccgcgctacgcgctcaccagccgcaaaatcccggtcagccgccagaggctgtttctcggtaagggctttcgctggcagcccatccacacccagcgtctgtacgactgcctgcaaccggaagccgcacgctggctgcgccccggatggtgctaccgtctggcaaggcacatcgaaaaacgcagcgaacatccccttcccaatcttgcccgtctgctcagtaccaaccactggctgaatccggtgcgcccgctgccgcccgtcggcggtaatccgtggctgcatggggtggaactgaaagagtgcgacgtcaccctgccgctcagtgaacgccctggccatacgctggtgcttggcaccacccgcgtcggcaaaacccggctggcggaactgcttgccactcaggacatccgccgcggtgagatggtgatcgttttcgatccgaagggcgatgccgacctgctgaagcgtctgtggacagaggcgcagcgcgccggacgcggcgaccactttatcctgttccatctggcgtacccggagatctccgcccgctacaacgccatcggccgctttggccgcatttcggaagtggcgtcgcgcctcaccggacagctttccggcgaaggtaattcggcggcctttcgcgagttcgcctggcgttttgtcaacatcatcgcccgcgccctggtagcgctcggccagcgccccgactaccagttgatttcccgccacgtcgtcaatatcgacgccctgtttatcgactatgcccgcatcgtgctgccgcgccacaacgcacgggcgtgggaagtggtggcgcaactggcggagcgcattaacgacaaaaacacaccgcgccatatgctgggacgcgatcctcacgtagtggcgctggaacagtacctcaacgcggagaaattctacgatccgatcctcgatgggctgctctcggcggtgcgctatgacaaaacctattttgacaagattgtcgcctcgctgctgccgttgctggaaaagctgaccaccggcacgctcgccgtcctgctcgccccggactaccacgatctggacgacacgcgtccgatcctcgactggcagcaggcgatccgtcagaaagcggtggtgtatgtcgggctggacgcgctctccgatgcggtggtcgctgccgccgtcggcaattcgatgtttgccgatctggtgagcgtcgccgggcatttatataagtttggcctcaacgaagggctgcctggcaacggcgaaaaactgccacctatcaacctgcactgtgatgaatttaatgaactgatgggcgacgaatttattccactggtcaacaaaggcggcggcgcaggtattcaggtcactgcctacacgcagacgctaagtgatattcaggcccgcatcggcagcgcgccgaaggcaggccaggtggtaggtaacttcaacaacctgattatgctacgggtacgcgaaaccgccaccgccgaactgctgacgaagcaactgccacaggtcgaagtgcgcagccgccaggtgagttccggcgtcaccgacacgccgggcggcatcaacagctttaccagcaatacccgcgagcaggtaaccaccagtaatgtgccgctactcgataccgccgcgctgatccagcttcccaaaggccaggcctttgccctacttgatggtggacagttgtggaaaatccgcctgccgctgcccgtagcggataaacactacccactaccggagtccgtcgcgcaactggcggcatggatgcaggcgcgccagcaggggcaggtggaatga

SEQ ID NO: 122011 - DNA, 633 bp, Enterobacter cloacae
atgagtgagcagcgaacgcctccgtcacgcccggcacaggggccggtaggctggctactgtcgctggccgggcggcttatcgggctggttatcggtgcactggtgctgcgagtggtgctggaactagtggggctctatttctggtggccgcaggaggggagcaggcatgtttttcaagtgatgaggcaggagcaggcggaactggttagcgcattacaaccgcatccgttggggaatgaaattctggtgctgctggaaaaagggacaactcgtgtacttatggccaacagcctactacaaaaaccgttcgccgccctggcctatacgctggtgagttttatgcagcgcctggtatggcttgccgctatgctccccctgatttgcctgtgtgttgtaatcgggctaaccgaagggctggttcaacgggacttgaggcgctttggctccgggctggaatcggtttttttccaccgttatgtcatcaggtccggcagttcggtcgccacaacgctgtgggtgtgttatctggcgcagccactgtttctgcctccgatgctggttttactgccaaccgctttatggttcgggataacggtatggatggtggcagggagttttaaacggtggttgtaa

SEQ ID NO: 122012 - DNA, 1221 bp, Enterobacter cloacae
atgagtattttcaaagatgaaagagaaatgcaaaaatggattgaaaatgaattggatgaccaagaggggtttatcaatttaatatataacattcagtctattgatgactatattccgaaagatagcgtttcaaaaaaaatatatgatagctatcagcactgcataccagcattatcattaatggaggttatctctaaagatcaaaatatctcttcatccaaaggggacatacttaaacctgatattgttgcatactcgatagaaaaagaatcattagtcctgatagaattaaaaaacatatcaggacctactagagaagcaggtacagaactgtcggcttatgctggcgaactaaaaggatatttatctcacctttccgacggtgacataattaatgtaataatatctccagtatggcctgctctgcttaagcattatgtattcaacaatatcgtttggcaaaataaaaatatgatttgttttgagcctgcagtaatcaatggcgaaaaggtacttatgcctcttgatattgacgtgctgctccaagctgaaataccagccagttttagcgaagagcatcttcgtggctatcatatttgcctttacgactacactcaatatcatgagcctcgtcctcaaacaaagctacacgaccaactttccgttataaaatcaagcatatcccaaatggttgctgaaggagaaaaagccaatagccatggttttgtcattttaactgaagaaattattggttttgggctttctccttacatgattacgtttgtaaatgcagcaccattttcatcattagagcggtactttcactctgatgaaatcaaaacctatgaagatttgccattcattggcaagcaattttatgacatatatacttattatgagccgctaggtttaggttctagcacatctaaaatattcaattcaggaagaaggtatttatctaaaatatgcaaaccagaaatagaatcattaaactcatggaagatactgaaaaatgcggcgaataacgccagagcacaagcattttattttgattcatggggtgtttttaaagaaaaagcaatggagttactttttgaaaaatataacaactctgaatatgatatcgacctaaactctatagaattagggtatgaggttatcagcgaactcgttgatgatgagtacaacttcatatatctaccgtctatacgaccaatatag

SEQ ID NO: 122013 - DNA, 306 bp, Enterobacter cloacae
atgagctatagcccattatttctgttaatgactcttatatggtcgcaggctaacgcttccccagaatccagccagctcgccctcgcgctgaagcaactcgacggcgtgaaaacctcgctggaacgcgcccggaccagcgccagcaccgcttcacagtcgcgttacttcttcgactacctgcaggcgcagcaggatatcaccgccgttgaacagggcatccgccgttaccttgccccggcaagagcgcagccgcgcgccgttcaaccactcagcaccagctaccagcgggagaaccccgatgactga

SEQ ID NO: 122014 - DNA, 234 bp, Enterobacter cloacae
atgactgactcgcaactcgccgcctttcaggctgccagccagagcaaaccagagaccgtcagcctgctggtgctcggcatgtttaccagcgtcctgctcctgtggtgcgcctggacgctaatggtcgcctggcagggcgtctgccgccagcgcctgagctggcagagttttggcgcggtggcggcccgttcgctattactggtgctggtctgtttctggctggtactgagctaa

SEQ ID NO: 122015 - DNA, 318 bp, Enterobacter cloacae
atgcgctggctgttgctgctgttacttactacgtttgatgcccttgccgacctgccgacgatggaagatccctcgcgcggccagggtcagggcattatggagacgctgcaaaactacggttttgacatcgtggtgttgctggcgctagctatctgcgccgtcggttttctggtggtggcgaacaattgcattgccacctactcggagatccagagtgggcgcaagcagtggaaagatctgggctcgatggcgggcgtcggcagcattctgctggtgatcatcatctggctgctcaaccaggcctcggacgtcctgtga

SEQ ID NO: 122016 - DNA, 354 bp, Enterobacter cloacae
atggcgaccatcccctttctccccgaccgcctcaaccgcgagcccgtagtctggcgcggcctgaccaccagcgagctgtttctggcgctgacgatcggtctcggtggcggttgcgtatccggcattctgctggccctggtaatcgactactggccgttaattcccggttcagcgctggcaggcgcggcattactcattcatggcggcgggcgcattctggcccgcgcgaaacgcggcaaacccgacagctggttgccacaggcggtcctcgcctggctggagcgccatcatcttcggggcacacaactggtccaacaccgcgccgtctgggtggtgcgcaggagtccgcgatga

SEQ ID NO: 122017 - DNA, 660 bp, Enterobacter cloacae
atgagccgctttcgccatgcgctggccgagcgcgataaccatatcctgacgctgcgggcggtgattgttctgctgtgtctgtgtctggcgggcgttggctatggctggtacagcgccccgcaaaagctcaccctctggttcccgccggacctgcgctccggcagcacccgtccatggtgggaagtgccgcccgccagcgtttacgccttcaccttttatatcttccagcagcttaaccgctggccggataacggcgaggaagactatctccgtaacctgcgctcgctgcgcgcttacctgacgcccgcctgctacacccggctggatcaggatttccaggtacgacgcaacggcggtgaactgcgcgagcgcacgcgcggcgtgtatgaactgcccggccacggctacagcagcctggtgcatgacggcgataaacgtcccttcccgcgcgtcgagaccttaagccgggatgcctggcgggtgacgctggacgtggcggttgaagagtattaccagaacgaaccggtgaaaaaagcactggtgcgctatccattgcaggtggtgcgttacgccatcgatgcggagaaaaatccgtggggtctggcgatcgactgcaccgacgccgcgccgcagcgtctggtagcggaggagaaaccatga

SEQ ID NO: 122018 - DNA, 768 bp, Enterobacter cloacae
atgaagaccgtcctcctggctttgttcttcagcctcccggccttcgccacggaagtggtgcagtgggaaaacatcccgctacccgtcacgctacatgtcggggaggagcggattgtcgacgtggggaaagcagtgcgcatcggctatcccgccacgctggaaggcaaagtgcgcctgcaaagcgcgggcggcaaggtcttcctgctggcgaacacggtattccctgccacccgcatccagttacgtgataccggaagcggtgagttgatcctgctggatattcatgccacccaaagcacttcgacacttgaacccgtgcaaattagctatgcgccgcagacgcctgctacagcaaaaacgtccgtcccggtgacagcatcaaccgagcccctgcccgccctgctggtgcgctatgccgcgcagagcctgtatgccccgcagcgcaccgttgaagccctgcccggcgtcacgcctgcccccgtccggctggcgaaacacatcaccaccttactgccgcagcaacccgttaccgccatcccactggcttcatggcaggtcagtgccaccaccgtcaccgccatccgcctgcaaaaccgcagcgggcagcgcatcacgctcgatccgcgcgagcttcaggggcagttcaccgccgccgcgttccagcatgactggctcggcccgagtggtctggcagaagacaccaccgtggtgtacctggtgacggaaggcccggtttcccgcgccctgctgccggagccaaaaccatga

SEQ ID NO: 122019 - DNA, 1296 bp, Enterobacter cloacae
atgatgccgcgccagagcctcctgctgaaaatcctgctgcctgtgattgtgctggtaacggtatggctgctgctgcgcccggcagttaaaagcccgaaggaaaccaccacagcccgcaccgtggcagccttaaccccgcaggagctgcgcgatctgggtatcgatggcgacacgcctgctgataccgtcgccacgctggtcggtcagatgaagcagtaccgccgggagcttcagacgattcagaacgataacgaaagccagcaggcgcgcgagaagcagctgaaagcacagcaggcgacgctggtatcggaattgcgcggcgatatgcgcaggcagcaggaccagatgcgcgacgaactgctgaaaagccagcggggattgctggataagctcgaccgcctgctggcaaagcgcacggacgatatcccgcccggtctgggactgacgcccggtgaactacccgccgacgttcaacccgatatccgctggctggagccgctggatgcgcctccgcccatggatgaaaagctgctgcgcgttcccctgaaagtagcggacaagccgccgccgaaacctgacgtgaaggtctacaccctgccgcagaacgccacgctgaccggttcggtggctatgacggcgctgattggccgcgtaccgcttaacggaaccgtcagcgatccctacccgttcaaactgctgattggcgaggacaacctcaccgccaacggtatcgaactgccggacgtggcgggcgcggtggtctccggtatcgcctccggcgactggacactctcctgcgtacgcgggcaaatcacctcgatgacctttgtgtttcacgacggcactatccgcaccgtcccgcagggcggcaaatccggcaacaggcagcaggaaatcggctggctctcggataaccaggggctgccgtgtattcccggcgagcgcaaaagcaatgcgaaggagtacctgacctcgcagttcctgctggcgggatccggcgcggcggcgcaggccttcgcgaacggggaaagcaccaccgtggtagaggacggcagcatcaccagcgcggtgacgggcaacaacggccagtacgtgctcggccaggccatcggcggcgggctgaaagaaaccgccgactggatgaaacagcactacggccagatgttcgacgccgtgtatgtgccgccgggccacaaggtggcggtgcatctcaccgaaccactggctatcgactatgagccggaaggccgccaggtgaaataccagcaggtcagcacgccggggggactggaatga

SEQ ID NO: 122020 - DNA, 360 bp, Enterobacter cloacae
atgatacgcgctatattgatgttgctgtttttgctggccggatgcagcacctcgcaggaagaactgatgccggtcgatcctgacgccagtatgctcaccctgtggcagcagcaaagcagcggcagcgcgaccctgctggatgcacgtgcacaactgcgccgcccgccggatggggcggttgagcaaccagcggcagaaagcctccgcagccagttcccgcgcctgcccaacccggatatggtgttgtacgttttcccgcaccttaacggcaacacgccggtgcctggttacagcaccgtcttccccttctatacccgtccgcagtatgcgctgccgggcgaacgcctgacgccgccatga

SEQ ID NO: 122021 - DNA, 2634 bp, Enterobacter cloacae
atgaatgaacgtcgcggcctgaccaaacaggcactgaataccagctaccgcaagggcacgtcatttgtcgactggctgccgtgggtggagtttttgccggagtcgcagacgctgctgctggaggatggccgctcagtaggtgccgtatttgagctaaatcctgttggcaccgaaggccgctcgacggcttttctggaacaggtccgcgataccgtcactgacgcattgcaggatgcctttgatgagcatgaacgcgcgccgtgggtggtacagtttttctgtcaggatgaggacgacagcgaggcgtggctggcatcactttcagcttacaccgcaccggaaatccgcgattccgcctttacccgcgaatggctcacgcagatggcaaaccatatggttaatctcacccgcgatgaggggctgtttctcgataacaccgtcacccgcacccgctggcgggcgacgtggcggcgcacgcggatggtggtgtaccgctggctgcccgggctctcaccggacgaaccgtccccggaagagacgctgaaccatatctgcgaacggctcaccgccgggctgaaggcggcgggcatcagcgcggtccgccagaatgaacaggccatccaccgctggctggtgcgctggtttaaccctgcgccacccgttgaggataaaaaggacttctggcggcaactggatttaccggaagccgaatccctgcccgtcatcaccgatttcgccgaacgcctgctgacgagcgagccgcgctcggatgcggaaaacggcgtctggtggctggataaccgtccgcataaagtggtggtggtcgaccgcctgcgcaaagcgccgccgcccggcctgctgaccggagaaaccgcgcgcggtgacggcatcaatgctttgttcgatctgttaccagcaggcaccattatgaacctgacggtggtggtgtatccgcaggacaagctggagcagcacatcagccatctctccgagcgggcgattggcgacaataccgattcggaatacacccgccgtgactgccacgaagtgcgcagctacctgaaggacggccataagctctaccgcagcacgctggcgttttacctgcatgcgcccgataccgatgccctgttccgccagcagcgccagctacacagcctgctgctcaacgcagggctggtgccggtgcaggagcaacacgaagtcgccccactcagccactggctgcgctggctgccaatgtgtttcgatcccctgcgtgacccgcgtggattgtatagccgactcaatttcgtccagcatatcgccgggctgctgccggtctacggacgggaaaccggcactgggcatccggggatttgctacttcaatcgtggtggtgcgccgctgtgcttcgatccgctgaataagctagaccgcgcgcagaacggccaccttttacttcttgggccaaccggagcgggcaaatccgccaccctcaacgcaaaaatcgcgcaactgatggcgctacatcgtccgcgcctgtttatcatcgaggccggaaactcatttggcctgatggccgactacgccgccgcccacggcctgacggtgaataaaatcagcctgcgccccggttccggcgtgacgctgcccctgttcagtgacgcgtggcgactggtggaacaggcggtcaccgacgccgaaccgccggaagatgaagagaacgatggcgatgaccagcgcgatgtgctcggtgaaatggagatcaccgcccggctgatgatcaccggcggcgaggcgaaagaggatgcgcgcctcacccggccagatcgggcgatgatccgccaggcgattatcgctgccgcgcacacctgctatgaggaaaaacgccagacgctaacgcaggatatccgtgacgcgctattcgccctttcgcgcgataccagcctgccggaagcccgtcgccagcgagcctacgagatggcggaatccatcaatctgttctgtgcgggctttgaaggcgagttgtttaaccgtgaaggtgcgatgtggccggaggcggatatcactctggtggatctcgccaccttcgctcgcgaaggctatgaagcacagcttgccatcagctatatctcgctgattaatcatattaataacctcggcgagcgtgaccagcatctggcgcggcccatcgttaatattaccgacgaggcgcatatcattaccgttaacccgctgctggcgcggttcctcaccaaggggtcgaagatgtggcgcaaactcggcatctggctgtggctcgccacccagaatctggcggattttcccgacgaggcgaagaaactgctcaatatgatcgagtggtgggaactgctggtgatgccgtcggaggagattgaacaggtttgtcggtttaaggcgctgaccgaggaacatcggcaactgctgcgctcagcggtgaaatcgccggggcagtataccgagggcgtggtgctctcgcctcgggttgaggcgctgtttcgggtagtgccgccagcgctctatctggcgctggcgatgaccgagaagcatgagaaggcggagcggatgcggattatgcgggagacggggtgtagtgaggtggaggcggcgatgaaaatcgctcagcgctga

SEQ ID NO: 122022 - DNA, 639 bp, Enterobacter cloacae
atgacggtgaaaattgcaggaaaaaaaactgtttccgaatggaatgcattgtctgctaaattaaaacatgatccaacagagttagattggaatcatgcaattcaatttttcgatgagagaataaatgaacgctatctggagccagtagagcgtattagaggagatggtgaaactggtaatcttaaaggcgctgggtttgctatttgtactttactgtgtgcattagtagagaatttggaaactttttatcgggggataaattttaaacccaaacctcagggagcgtatgaatatgggaacggttgtagccgtaccttgtttactgattttttgaaaacaaaggaaccatttataaattattttggtggcaatgatgagttagcgaatagtttttatacaggtgttcgttgctctttacttcatgatgcatcgacgtgcgatggctgggtcataaacattactggatgtgaaacggtctcagttaataatggaaagaaaatattgcaccggtctctttttatgtctgatatcagaaaatatattggggattatagaaatctattattgcaaccaggaaatcaagagctaaaagatgcatttatcagaaaatttgatggaatttgtgcagctgcaatatga

SEQ ID NO: 122023 - DNA, 258 bp, Enterobacter cloacae
atgatccccaagagactaaaagaagctcgcttgcgagcaaagctgacccaggaaaagcttggtgtactcgctggtatagaagaggctacggcttactcgcggttatcgcattatgagaatggtacgcataagccgacgtttgagctggtgtgtgaatttgcaagagtgctagatgtgccggagtgttatttttatactttagacgatgggttcgctgagcaagttctgaaattatataaagagtatgaaactcgctaa

SEQ ID NO: 122024 - DNA, 279 bp, Enterobacter cloacae
atggttccgaagcgtctgaggattgcgagagagttagccgatatgtcacaagaagaattggctattgcagcaggaatttctgaagaaacgggtagttcgagaatgtcccattacgaaaatggcaggcataaacctaaattcgagctggtttgtcgatttgctgaagttctcaatgtgcctgaaggttacttctacacactggatgacggctttgctgatgcgatgctgaaactttacggtggaaaacgggttcagtggaaaaagggtcgcttaagttaa

SEQ ID NO: 122025 - DNA, 276 bp, Enterobacter cloacae
atggctaaaaaagactggcaccccgccgacatcgttgccgccctacacaagcgcggtaccagtctggcgaaactatcgcggcaagcgggactggcctcgtcaacgctgtcgaataccctgacgcgcccctggccgaaaggcgagtggctgattgccatcgcactcgacgtgcatccgtctgaaatctggcccggccgttacctcaattccagtaacaaacgtgaaccccgaaaaccgcttcaccccatgacaacaaccgacaactccgggacataa

SEQ ID NO: 122026 - DNA, 522 bp, Enterobacter cloacae
atgtttctggtctccctggctgaaggctttatccacctgttccaggccgcaggcaaaatcttcctcgacatgatgaccgggcttatcccgatgcttatctgcctgctgctggccatcaacttcctgatgaagctggttggcaccgtcagaatggagaaggtcgccgccctgctcggccgctcgcgcattctcacctacggcgtattgccgatactcggctggttttttatgagcagccctggcgcgctgacgctcggcaagctgttgccggagaagagcaagcccggctatgaagatgcgctcggcaccaccgcccatccgctcaccagcctgtttccccatgtggtgccgtcggaactgttcgtctggctcggcgtcgctgccgggattaaggcgctcggcctgcccgtcaccccgctggcgctgcgctatatcgccgccgccatgctgattggcctgattcgcgggattatcaccgagtacctgttcctgcggctcagcaagcgggggaatgcgccatga

SEQ ID NO: 122027 - DNA, 375 bp, Enterobacter cloacae
atgatgatttactgcgcacgtattactgccatcgggctgtttgtcgctgacggcctgaccgacaagatgctcatcaccttcgacagcaacgggccgaaagactgcctcgattactccctgtcgctggagccgtcgttccgggaagagagcctgatgatactccccggcgaccgtctgctgctggcgggccatgattatctggtgaccagtgttggcaaaggtgcacagcaggcgctgtttgaactcggccacctgacgctggtgttcaatggtgaactgaatccctgccacgtcggcgcggttcatctctccggcccggtgccaaacctgcgtgacctgcacggcaatctggtgattgaggagggacgaccatga

SEQ ID NO: 122028 - DNA, 981 bp, Enterobacter cloacae
atgaacacggtgcttattcctcccggtcccggcggctacggtaaagggttgtggctgccctttggcagcggcaaaaaggtgctgtcgctgaccggacgcgagattcatccggtggcgatagaaatcggcgcgctcaccgaatcggaagtggtgaacggcttcgccgatatcccgcctgataacgacatcctgtgcgtggtgattaactgtgccgggtccctgcgctgcggcctgtacccgcagaagggtattccgaccatcaacgtactgcccacctggcgcgccgggccgctggcgcagtttattaccgaagagaactacgtctccggcgtgacgatggaacagctggttctggtggataccgccgaagcgccggacggcgagcctgagccagttccagttccagagccagtcattaccaccgcacctccacctgcgcgtggagcggagaagctggtgcgcatggtcgagcagaccggcaccgccgtcggtcacgttatcgccctgctgtttgccgccagccgtgaagcggtggacgtgtccctgcgcaacgtcatcccgtttatggcctttgtctcgctgctgattgcgctggtgcaggaaaccgcgctcggcagcctgattgcccatgcgctgacgccgctggcgaactcgctgtgggggctgatgctattgtcgctgatttgcggcattccgttcctctccccggtactcggcccgggcgcggccatctcacaggtcatcggcgtgatgattggcacccagattggcgcaggggcgatatctccggccttcgccctgcccgccctgtttgcgattaatgtgcaggtcggctgcgacttcgtgccggtcggcctttcgatgcaggaggccaaaccggagaccatcgcgaagggcgtgcccgcctttttactgtcgagacaactgaccggaccactggcggtaatagtcggctggctgttttccctgggcttattctga

SEQ ID NO: 122029 - DNA, 1053 bp, Enterobacter cloacae
atgttggatactcagagaaataaaaaaataggaataatgcttggaaatggtttcaccattgatttaatacatagaataaatagttcttccaacattgatccatcagatcttttcaaatatggtgaccttgtaaaatggcccgcaactggtgaaccgggatttctgtcggcaaggtattgtccaaacctttggcgcttaggtgcaaggccgggattaaatcaaaaagcttcatacgaaataatagaggaattgattacagtaatcaatttatatgcaactcttccgtcagaaactttaaaaaagaaaaatcaatcaaatcccagcccattatctaatatatacatatatgcataccaagaattagtagcatatttaagagagttatttatatattataattcgttggttaatgacgagacactccgaaacatcccatggggatggcgtgattatcttacaaaactcgataaagacccaaccatagaatcagtcgagatcataacttataattatgatatttttctcgaaagaattttagatcaacttaacatccgcttctcaatacctggaattcaagaaaatgatgcaaagtttaaaatctataaaccacatggttcaattagctttatctatgaaggctacatgcctaaagataactataatattcagacagaactttcattgaacaacggtgatatatcaaagtttcaaataaaatatgacaacttaagcttatacatgcctctaatcccgataatacccccagcaggtgaagcccatcgatatgctcaaaactgggctaactcaataaaatcccacttaaaaggctccataagcaaatttaaagaaaaagatgatttcttcatatgcgggatatcatactggcatgttgaccgagctgaaattgatgaaataatccgagagttaaatagcgatgtaaatgtaagaatgattaacccgggtaatgttgaagggttaagcgctattttaggtatggtttttaatagttacatacatcactcatcctccgatattttgaaggagttagtctaa

SEQ ID NO: 122030 - DNA, 1029 bp, Enterobacter cloacae
atggatattttgaagcgagattccaatagcataaatattgcctctttctgggaaggttattctcttaataaatttaattttgatcctccatatcaaagagatagcgtttgggatgaagaaaaacaatctttcttcattgattcaattcttagaaattatcctataccaccaatatttttgcatcagaaaattgatgatgatactggaagaataacattcgaagttgtagatggcaaacagcgtttaaccgcaattgttaactttatcaaaggaattattatttctgcaagtgaggaaaatgatgatgagttaactggagtatcatttgaagatcttggcaatgaaaaatatgctgaaatcaagaagctattttggcgctatcaaatgccgatagaatatattgatactgaagatgaaaaaataattgacagcatttttgatcgtttaaatagaaatggagaacgtttaaatggtcaagaacttagaaatgctaaatatcatcaaacaaatttctatcaaagcgttgtcgaattatctcaaatacctttttggcagaaaacattaaaccatgtagataaaaaaaggatggaagataaagaatttatctctgagcttgtttttacacttcttgaaaatcaggtatttggagcaacacaagatatcatagatgaactatacgaaaaatattgccctcagtctcaggatttatatattccggccttacaggaatttataaatgttacttcctatttgcaagagatgaatattgacttcaaggcttataaagctaatggtgtaagccatctttatgggttctttaattacgtaattcattgtcatcaaaatagtatacctgttgaatacgcttcagatgttcttaaaaggtttcttgatagtctgtgggacaaaggtaataatgataatgaagaattgcgaaaagaataccgcaaaacaatgagttcaagtacaaaaagcaaatcacaaaggaacaaacgaatagaagtgctaattagtcttttagataattag

SEQ ID NO: 122031 - DNA, 243 bp, Enterobacter cloacae
atgggacgtattgttggcgacggagcattaaacttcgagatagtcgatattgccgtcgatcccgctcatcaggggcgtggccttggccggctcattatggaaagcattattcactggctggaccgtcatgcttacaaaggcgcttatgtctctctggtggctgatgtaccggcactctacgcaaagttcggttttgaattagtccggccggaaagtgagggaatggcgagagtctgggggtag

SEQ ID NO: 122032 - DNA, 888 bp, Enterobacter cloacae
atgtcatacggcatcatgggctatacccggctggaaacgctgctggaagaagaggctatcgacgtggtttcggtggcgacaccggacccgtatcacaccgaatccatcctcaccgccctgcgctacggcaaacatgtgctggcggagaaaccgctcgccacctcagtacgcgagtgcgagcttatcgtggagatggcgcagcagcgggacctgctggtcggcgtcgatttccacaaacgctgggacccggcggtgatgcgcatcaaagctgaactggagaagccggaagccgggcgcatcctgcgcggccatatcagtatggacgacgtgataacggtcccgacagagtggctgaactgggcggaggcaagctccccggtatggtttctcggctcacactgctttgacctggtgcgccatctctccggccaggaagtggtgttggtgtacgctgtcgggcagaagcgtctgatggtcgaatgcggtctcgacaccttcgacagtgtgcagagcctgctgacgatggccgatggcagttcgtgggtggtggaaaactcgtgggcgctgccggagggctttccgaaggacaacgacgggcgtatcgatattctctgcgaggcaacctatatccgcagcacctcgcaacatcgcgggctggaaatcaccacgccggggatgacgcttacacccaacagctacttcatcaactaccgcaacggcgttgccagcggtttcggtatcgacccgatcaatgactttgttcactccgtcagacataaagcaccgtacccggtcaccgcgatggacggactggcggtcagccggatttgtgaggcagtgcaccgcagcctggaaagcggcaaacctgaacgcccgataaagccataa

SEQ ID NO: 122033 - DNA, 885 bp, Enterobacter cloacae
gtgagtaaactcttcaccagaggtaactcacgtggaaaaattaataactcaggagtctctcgaaaatgtttgtgctccatttggttatacaattatacttcgcgccatattttattgtttctattgaaggttaccgtgattataattaattccattaaagataaactggaaaaatccacaaatcactccaatccttttattggtgttgatgagttaggcaatgattggtttgtaaaaacatatttcagcaagtccggtcatgaaacaaatgcgttatttaatgaattagtagcttttaaattagctgagaagataggtttaccttggccaaagggccatctagttcagttttcagaaagtgtaaagagtgaactaaatgtatcaacttctcattttattgcatatgagttcatgcataatctagaagagttgcctgagggttatcaattcagtaataaccaaataaaaaatctctatggcaaatcaatatttgataattggctatcaataggtgatgtaaaaaatgatacttgcaaactgttaaatggcgaactgctattcatggatgctggaatagcctttgaggatgataattgtgaggcatggggggaagatggtcttatatggacagaaaataaattgttcattgaatcatcgccatatcatcgcggaattttgcattctgcagaagagtataaatcatggatggataaaatttgtgaaatacctgttgagttttatcaatccatcgcagatagcatccctcaagattggcatgttccggaaagttacaaattaaaatttgttgaggtgttttcatcatcttgtgagaggtttattcctatgatgaaatcatgtattgagtgggaattaaatcaccaataa

SEQ ID NO: 122034 - DNA, 636 bp, Enterobacter cloacae
atgaaattacagcttgccctggacgagttaaccctgcctgaagcgctggcatttattgataaggtggttgacgacgttgatattattgaagtgggcacgccttttcttattcgggaaggcgtgaaggctattaaagccattaaagaaaaatatccacacaaggaagtgctggcggatgcgaaaattatggatggcggccattttgagtcgcagatgcttttcgacgccggggcagactatgtcacggtgttaggcgtgaccgacgtgctgacgatccaatcatgcatccgcgcggcgaaggaggccggaaagcaagtggtggtggatatgatctgcgtcgacgatctccctgcgcgggtccgcctcctggaggaggcgggcgcggatatgctggcggtacacacaggcaccgaccagcaggcggcagggcgcaagccgattgatgatttgataacgatgctgaaggcgcgccggaaagcacggattgccgtagcaggcggcatcagtagccagacggtgaaagactatgcgctgttaggcccggatgtggtaattgtgggatcagcgatcacgcatgcagcggatcctgctgatgaagcgaggaagatttcgcaggtgttgttgcagcatcattga

SEQ ID NO: 122035 - DNA, 567 bp, Enterobacter cloacae
atgatggaaacgcaatctgttgcaggcgttgcctgtagcgacctgaatcaggcgatgtcgcggattgatggcgctgcgctggcgcgtctggagcaagccattgctgacgcgaacgcggtatttgtttttggcgcaggccgttcgctgttgatgctgaaagcttttgcgatgcgcctgatgcatatcggcctgaaggtgcatgttgtcggcgatgtggtgacgcctgcgctgcaaaaaggcgacctgctgctgctggccagcgcatcgggcgaaacggcttcgctggtgaatgtggctacgaaagcgaaacaactgggcggcacagtggccctgctgaccattttccccgagtccacgctggggaaactggcggatgtggtggtcaggatcccggcctataccgacaaactgccggatggacccgataacgtgaaaggcattctgcccggcggtagcctgtttgaagaggctgtcatggtgttgggcgacgccatgattgtgaatctggcccagtcgacgggatatcgcttaaccaaaggttttgcgctgcacgccaacctcgaatag

SEQ ID NO: 122036 - DNA, 843 bp, Enterobacter cloacae
atgaaacagctacaccacagcggcctgccgctgtatctcgatgacgacggcgtaatggcgctgaaaccgccgctgaactatctcggttttggtcgcaaaagcgccgggcagatggcggtggttttaccggaattcaccgaagcgcagcgtgatgaaccggcttacgatgtttatcgcgggctgagttttccggaggatcaggaacggcttgccgctgaccagtatcagtacgacatcaccatcattatgccagggacgattggccatgagcgcaagaaaaccagcggccattatcacggttataacgacacgcggcgcaacacccatccggaagtgtatgaagtgattaagggcacggcggcgtatatcctgcaaaagtcgccggattttgccgttgaaccaaaagatctgctggtggacgatcttatcgtggcggtggtgaaggaggggcagagcattatcgtgccgccgaattacggccactgctccatcaatatcggcgacgggccgctggtattcagcaacctggcctataaaccctgcgcggttcactacgacacggtgcagttttaccacggtatggcctgctacatcgtggaagagaacgggcagctctgcgtgcgcaagaatcactactacccgcgtattccgcgcatcaaattcgccaccgtcaaagagaacccgcatcttggcatcaccttcgatacgccgctttaccagcgctactgcgccgcaccggaacgttttcattttctggggcatgtcgataactatgtccgggaaatcatggggatgctccagtatgaggatgatttattcccgctctgtcaggaggacgcatga

SEQ ID NO: 122037 - DNA, 1527 bp, Enterobacter cloacae
atgaaaagattcaaccttctgcaaatgttacaaagcatcgggcgatcgttaatgatccccattgccatgctgcctgccgccggtattttgctggccttcggcgtcagctttcaggatcccaatattgtcgccagcctgccgtttctcggcgctgactggctggttcacgtgctaaagctgatggcggaagcgggcagtgcgattttcgctaacctgccgctgctgtttgcggtcggcgtggcggtaggactcagtgacgatcaggggattgccgggctgtcggcgatcgccggatttctgattatgaacgtcaccatcggccagtttctggggatcacgcccgagtcggtggcgcaggtgcgtgactacacgatggtgctgggcatcccttcgctccagaccggtgtgtttggcggcatcattatcgggattatcgccgcctggctgtataaacgctattaccgcatccagcttccttcgtggctggagttcttctccggcaagcgcttcgtgccaatagtcacctccttcgccgcgctgtttgtcgggctggtgatggcggtggtctggccgccggttcagcatctgattaatggcctgtcgaacaccatgacggtgcaggggccgggcgtgtccgctttcctgttcggttttgtcgagcggctgctgatcccgtttggtcttaaccatgtctggtggccgacgttctggctgcagtttggcgagtacgtgaacaaggccgggcaggtggtgcatggcgaccagcttatcttctttgcccagttgaaagaccaggtgccgattaccgccggaacctttatggccgggctgacgccgatcaagatgttctgcattccggcgattgcgctggcgatctaccgctgcgccagcccggaaaacaaagcgcgggtgaagggcattatgctatctggcgcgatcacttccatcgtctgcggcatcaccgagccaattgagttctccttcctgtttgttgcgcccgtgctgtatggcattcacgccgtcctggcggggctggtgttcctgctgatggagtggttcagcgtgcatatcggactctctttctccggcgggcttatcgactatctgttctttggcgtcctgccgcgtgcgcctcactggtacatggtgttcccggtcgggctggtgatgggcgtggtgtactacgccctgtttacctttgccattcaccgctggaatttgctgacgccggggcgtgaagtcgaagaaagcgcggtgactcaggaaaacgaacagaacgatctggtgagcggcatcattctggcctatggcgggctgggaaatatgaccagtatcgaagcttgcatgtcacgtctgcgcattgacgtaacggataagacgctggtggacaaagcgctgctgaaacagcttggcgcggcgggcgtcgtcgaggtcgggaacaacatccagagcgtatttggcatgaagtccgatcggctgaaagaggcgatccgcgcagctaacgcgtatacacaggaggcaaaatga

SEQ ID NO: 122038 - DNA, 1680 bp, Enterobacter cloacae
atgagtatcttcgaggcgcattttcgcaggctgcacgcccgctacggcgcaggccagacgcacgaattacagatgcaggagatcgccgccatcttcggctgttcagtgcgtaactgccggattgcgctgaaaaagatgcatcaggaaaaatggctcgactggcagccccagcgcggacgtggcaagcgctcacggctccacctgttaacctcgccggaaaagctgttcagccagaacgtcaataagctgctggagaagcaggattacggcaacgtgctgcgctttatcggcaacgacaagtatctgctggatcgcctgagcctgtggcgctttggggtacaggataaaagcagcgaaacgcgggtacgcatcccctactatcgcaatctggatccgcttaatccgctcgttcccctgcggcgaaccgaacgccacctcctgcgccagtgcctgagcgggctgacgcgctatgacgccgttcagggcaggatcgtccccgatatcgcccactactggacccacaacgacgactttacccgctgggagttctggctgaaatccaccgcccgctttgccgatggcaataagctggatgccagcgccgttcagcgcggcctgctcgccgccagccagagcccgcagttcgcgccgcttttcagcccaatcaaagccatcaccgctgatgcctcctggcatctggtgattgaaacgcatcatccggtcaaacggctcgactgtctgctcgccacccagccgacgatgctgttcgattaccagtacggacacatccgctgtaccggcgctttccacctgcaggagcacagcgacaactttatggtcctgcggcgcaatcaacactggcaccaggcgcggcccggactggatgagatcaccattttcacctgggctccagaacatatcagcatgagctttattcccctgctgcagggcgaggaggcgcaggatgaccgcccgctcaacgagcgtagtctggagcagggctgctgttttgtgctgctcgacagtgaaggagcctttgcggatgaggccgaaaggcggtttatcaattatctgctgcaacctgtcgaactcctcagccagacgcagcttcccgacgaatacgcacgcatcctctccgtggctcagggcatgctgccgcagtggaaccaccgcccggtagatttcggcgggatcaccgcgccgtttaacctgcgtcaaccggttatcatcagcacctttcagcaaccggaactggtggagcttgccggggcgattcgcatcctgcttgagcgctggcatattcgcgccgaaatacggatcgacgcatttgacagctttaacagccagccgcgccctcctgcggatatctggctcagcaactttatgctcgataccctttcggttccggcatttctggaatggctggcgtccaccgcgctgtttacgcgcttgcctgaagcccagcgacgaaacctgaacgccctgctaccgaccattctgaacagtgacgatgaaaaggcgttcgccaccattgccgcctttttccatgagatgacccaccagcgatatgtcattcctttgctgcatcactggatggaatttgcgaccgagaagtcatttacctggcgggatttaaatacgctgggatggccggattttagccaactttggctcgaataa

SEQ ID NO: 122039 - DNA, 537 bp, Enterobacter cloacae
atggtcaccacacatgttttcatcgcggtcagtcttgatggttatatcgcccgacaggatggcgatatcgactggctgttgaagcgcgatgacccgacagaagaccatggctatgctgcattcatcgcggacaaagattggatcattatggggcgaggcagttatgagaaggtgctgacttttgacgaatggccttatgatcgacccgtgctggtactttcccggcagctaaccaataccccggtgcctgaggcgctgaagggcaaagtgcagttttcatgccgcacgcccagggaggctcttgctgacctgatggagaagaacgtgcaccgggtctatatcgatggtgggcagttaatacagtcgttcctgcgcgaaggtctggttgccgatatcgttatcacaactgttcctgttctgctcggttcgggaaaaccgctgtttggagtactgccccatgatatcgatttgacactattatccagccgcagcttcccttcgggtctggtgcagtcgcactatcggctgacgtcataa

SEQ ID NO: 122040 - DNA, 3543 bp, Enterobacter cloacae
atggcaaataaaaaaaaactgagcaatcctttttctacaggcggtggcggtgttcattttgaagcacatgtccaagcgtcttttgttgctctgatgctcacaggcggtaatgcaccttgtcttccttgctggccaatagtggacattaaacttcaaggcaaaattgatggttttgataccgacgatttgatagttgttgttgaaaatgtcaccagcaatgaaaagcgaaagctcttagggcaaatcaagcattctatttcatttacgcaaggtaatacgatatttggggaagtgatacaggctgcttggaacgatttcaacaatcctgacgtatttaccaagaaaaaggatgttattgcactgatcaccggtccgctcagttctaccgatacacacaatgtgcaatggttattgaaccaggctagacacacaaaaacagttgatgaatttttgagaaatgtgcagcagggcaagttcagcccagctaaaagtaccgagaagttgggtgtcatccagtatcatctaaaggtggcaaatagtggtaacgatttaacaaacgatgagctttatgactttttgaaccattttcatttacttgggtacgacctaggtaatgaatcaggcgtcgtcctttctttgctgcactcccacattgcacaattccatcaacagtatcctcaatgggtttggtcgcggatagttgatatcgtacaaacttggaataaagatgctggcactatcatttcaagtaagataccagaggatcttttagatgttttcaaacaaaggattgttgctgagattcctgagaagttaaggttagtacaacagatagtcaaaaccgactggactcaccatccggatgcctcctatctagccctaacagtgttgattgggagatggaatgagaaaaatgagtgtgacctaaatgtactaacccaaatgcttggtatcagttatgacgaatggctaaggaaggcacgagagattttacatagcccagacagtccgttgtcactcaaaaatggcatttggaaagtaactaatcgaatggagctatggagccttctgggatcccgaattcttgatcagaatctcgaattgtttaagtctttcgcgatttccttactcaaagagccagaccctgctttcgaattacctgctgagcagcgttacgctgctagtattcatggtaaggtgctgaatttttcacccatgctgcgacaaggcatagcagagggtttagccataatcgggagtcgaccagaggtttgcgttaactgctctcaggggaatgccgaaatttccgttaacgtcgcaatacacacaattttgactgatgcgaactgggttttatggggtagcctgaacggtttgctaccaactttggctgaagccgccccctcaaaatttcttgatgcagttgagaaggcaatgcgtcagacgccttgtgcatttgatgagctattttctcaggaaggaaatggtatcactggtggtaattatctgactgggctgctatgggccctagagggattagcctgggatgagcaatatctagtacgcgtctgtgttgtactggctgaacttgccagccacgaccctgggggtaattggactaatcggccatctaattcgcttgctactatattattaccgtggttaccgcaaacgctggcttccatagaaaagcgaaaagttgcagtcaacgtcatttttaaagaatggcctaatattgcttggaatttactcgtccggcttctacccggtcatcatcaaacctcttctggatcacacaaaccttcttggcgccgtataatcccagatgactgggaaaacagcgtgactaatcaagattactggttgcagacttctttttatgctgaacttgccgtcgcaagcgccggagaagataccgaacgccttaccttgttgattgatcattttgatagtctgccatctcctgctttcgaacaatttcttgaggtcctctcttcgaaaacaactactgggctcaatgaagagcagcgagttttaatttgggatcatcttaatcgattctcaaataaacatcggagattctctgatgctaattgggctttatctgatgatctgctaacccaaatcgaaaatgttgcagagcaactggctcctgccaatccgttcaacttatatcaacaccttttttcaaatcgagattttgatctttacgaagaaaatggcgattgggaagaacagagaaaaaaactcgaagcaaggcgcgaatcagcaatttcagaaattcttaagcaagatggtgcagaaggcgttatgcggtttgctgaacacgtttctgcaacccatcaaataggaagtgtactcggcactattaacgatgatgtgttcgaaaaaattcttttgcctcatttcctggatacaacagaaaataagtataaggcattggtaggcgcttttatttggaaacgtttctatctcaaaggttgggagtggtacgacaatctggataaaacagactggactcctgaacagttaggtcaattcttggcttatctgccttttaacaaggaaacctgggcccgagtctctcatgatcttcaagcttccgagaacgaatactgggcccgcaccgatgcaaatccttaccagggtgaaggtgatcttactcatgccatcgataaactgattgaacatggtagaccacatgcggcaatcaactgcctgtactggatgcatcaggcggagcaaccaatcgacactgaacagtgtatccgcgctttgattgctgcccgttcaactaacgaatctagctccaacatggatggttacaacataacgactcttatacaatttcttcagactgaacccaaagtgaatccggatgttctatttcagatcgagtgggcttaccttccattgctcgatggccgccaaggtgctgaacccaagctccttgaaagtcggatggctaatgacccagaatttttctgcgaggtaatccgactcattttccgttctgacaaagaagaccagacggcgagtgaaccaacagaggaattgaaatccatcgcaacaaatgcatggactcttttgtacaattgggagacaccgccaggaagccaagcagacggaacgttcaacggagaacgctttactgaatggcttcagaaagttaaggaaatttctacaacgtcaggtcacttggacgttgcactcagcaaagttggtgaagtcttaatttctaccccctccgacccgaatggcttgtggataaacagagaggtcgcagttgctctgaacgatcgtaatgctgagagtatgcgtgaaggctacagaataggaacctacaactcacgtggtgctcattgggttgacccaactggaaaacctgagagagagctggcgaaccagttccgagcaaaagcagaggaagtagaaaacgctggttttcagcgattcgccgttaccttaagagttttagcggatagctatgaccacgaagctgaactggtcatcagtgatctaaatgttggaaaggatgattaa

SEQ ID NO: 122041 - DNA, 1890 bp, Enterobacter cloacae
atgaaatcagagccgcttaccgtcaatcaactcttccagaatcgtcggcagtattgcgttccattttatcaacgagcctatgtatggacactaagagaccaatggtcagctttattagaagatattatcgataaggctgagagcagactttctaaaacaaaaccaacgcctcacttcctcggggccatcgtgctcgaaccacaatccaaagacagcctattgggggtggatacgtcacacatcattgatggccagcagcgactcaccacacttcagtatgttcttgcttccatccgtcttgctcttcgggcaacaggactttccggcctggagaagatcgtattgccttgtttacgcaacataaacgaagagactatgcgtaatgtagacgttgaacgtttcaaactttggccgacattccgtgatcaaaaagactttattaaaagtctcaacgctgactcagtcgaagctcttcgcgaggtctatccggaaaacttcacacaacacgggaccctgcgtaagtatttcagccacccaccctcactggaagcattatggttctttagtgacgcttttattcagttcatcaacgcggaagggcaccctgtagcctcaaatgcagaggctttgattaatgcagtcctgactgacctcaaaatgatcaacatcaccctggaggaaggagatgatgctcaaatcatttttgaaacgttaaatggccgtggggcagaacttcatgcaactgatctcattcgcaattacatctttatgcgcgctgtaagtgatgatattgatgctgcgatgttgtatgagaatgactggaagccttttgaagatccctactggactgaaaatcaacgccgtggtcgaatttataaaccccgactggaatggttaattcacgccacgttacaggctgaaaaacgcagtgaggtggatttgtcgcgcctttacaatgaattccgggactttgtgactaaggatatgcctgcgcgccgcgccgatcagcaggtcgcgcttctcactcgctatgctaatcaatataaagaactgatcggagatagtggtacgactcctgtcgcgcgctttggccgtcgtattgcagcctatgacgtgacgactattcatcctcttgcgctcctgatttcagtcactgatatctctgataccgaaaagacaatcatgtttaatgatctagtctcatatgttgtacgaagagccgtgtgtgggctgacacctaagaactacaataacgtattcatggctgtcttacggcacctggctaaaactgccgtttccagtgttgagctacgctacagccttaagaatctgaatggcgaggcttctcgctggccgactgactcagaattccttaatgcctgtatcaccgcacagctttatcctggcaggcttgatacgccgaagatgcgtatgatgctgacagagctagaaggggaactgcgccgtcaggttaaaacagaggaaccagatgttcctaaactttccagccttgatatcgatcaccttatgcctcaacagtggttctctcactggcctctcgaaaatgggcaatctgttacggatacagaagcatcagcggttgctcagatagttcttgcaggagcggagctgacgcctgatcaggaactggtgcggaaacggcagcaagtaattgcaactttgggaaatcttacgttacttaacctcagcgtgaatcgatccctccaacactcagattttctaaagaaacgcgatgcttttcttgcccataccagcctgcgtttgaacgtgcctctgaccgttaaagacagatgggatgaggaacaaattctctcccgtggtgcgttgctagggaatgccgcacttaaaatgtggccgcgagctgattaa

SEQ ID NO: 122042 - DNA, 894 bp, Enterobacter cloacae
atgcgattaagtacgctgtatatgtttaaacagagcgccgagagcatgtcaaagcgcgtgagtgataataataatatttatcttcaactctctgctggaaaatcgttgctgcgagcctcggatgatccaaagtccgctaccgatgcggtaaattatcaggacgcactggcgaagcttgagctttacagcaacgtacgttcaacggtgcggagttcacttgagcatgaagataatatcctgaacggtgtgggcaatttgctgaccaccaccctcaccgaaaaaatcgtagcggcgaaaacggaaagctactctgatgaagatcgtcgggcgctgggtgcagagattaaaggtattcgcggcaatctgatggatctcgcgaataatcgcgacgggagcgggcgctatatttttggcggatttaaaagcgatacggcgccgtttgacgatgcgggtaactatgtcggcggtgataccgctcgtcgacaaaccgttgccgatggtacggatatgcagacgggccacctgggcagcgatgttttcggggatatattctctgttcttgataaagcggtagaagaactttctcgcgatcccatcgaccgtgatgcgctgaatgctgcgttgagcgccgccagcgaagcggtttccggcggcatcgatcgtctgggtaaggcgcaggcggaactggggaccaaccttcagcaactggacgcgcttgatatgagtggcgacgtcatgatcaacgacaccataaccaaggttcagacggccattggcgctgactatagcacgatgacctcgctcattatggattctaaaatgtcagaatttgcgctgaacgcatccatgatggtatttcagtcaatgcaaaaaatgaatttatttaataaataa

SEQ ID NO: 122043 - DNA, 1641 bp, Enterobacter cloacae
atgaacaacctctttagtctcgcgaaaagtggccttagcgtagcgcaatccgctcttagtgtggtaggcagcaacctgaccaatggcatgagcgatacctatagccgccgcagccttgtgattggtgagctcggtggcatgaccacgggaaacggattttatggctacggtgcgacggtaactggcgtcgatcgcgcttacgatgcttttgccaacaagcagctacgcggctccgtctcaaactgggcctcgcttaacggccgcatggagcaattgagcgacattgataatatgttgggcgatgaatccgacaacgtctctgtctccatcaataacctgttcaagtcgatggcgacgctgagcgcaaccccagatgacggcccggcccgttccgcagtattcagctcactcggcgtattgacccagcgcttcaatgacagcggcaagcgcctcaccgcgctggaaaagagcaccaacaccaatatcgaaaccagcgttaaagaaattaatagcatcagcgaccagctggcagaagtgaataaacagctggaacgcgtacaggcgcagaacggtacgccgcctgcggacctgctggatcaacgtgatgcattactggaaaaactgagtgagcagatcggtatagatgtaaccgagaatagcgtatctggccgcgtcgacgtaacgcttcaggatggtcgcccccttgtctttggcgaaaacgccagcaagctacaggccacagcgtctgaaagcgatcctgacagaatcgttgtctcttacgttgatagcaacggtactaccacgccagttaacgaagcgagcattaccaaaggccgcctggccgggttgtttaagttccgcagcgaagatcttgagctcgctaaaaacgagctaaaccagatcgcctttatgatggcgagccgcatgaacgagcagcaccgtttgggtgagacgccagcgggtgtgccggggggcgatcttttctctctgccacctatgaaggcggtggcaaatgcaggcaatgccggtgggggaacgctcgacgctatcagcgtgacggactacaccaacgtaaaatctgaaaattacagcatcgactttgatggaacaaactggaacgtaatgggggaggacggacgcctggtgaagcaggtgccggccggttccgccacgctagagtttgacggcattgagattgatctctccggtgtgaccgcaagcgccggggacagtttttcctttaatcctatggctggggctgcggagggtattggccgcgcgatcaacagcgcacaggattttgccgcagcggatgcctccgggggcggggtgggaaataatcttaatctggaagagatgcttaagatccagaatgagaaactgattggcggcagcacgctgacggaggcttattcaagcctggtggggaccattggttctaacgcgcgggcggtaaaatcgggcatttcctcggctgagatcgacctgcaaactaaatatgatgcgaagcaggcgctttcaggtgtggatatgaacgaagaaaccgtcaatatgcagatgtttattcaatattaccaggccaatgcgcaaattctacagaccgcaaccaccatgtttgattcgctgctttcgattaaataa

SEQ ID NO: 122044 - DNA, 930 bp, Enterobacter cloacae
atgaatgctttcgatcgtctggataagccagcctttgacgttcgctctctcgacgcgctaaagcgcgatgcacgccgcgctgaacccggggcgctcagggcggcggcgcagcagatggaggggatcttcgtgcagatgatgatgaagagcatgcgcgatgccaccatcaaagatgacctcatgcacagccagtccaccgatatgtttaccgcgatgcacgaccagcaggtggcgcaaaatattgccgggagcggacagcttgggtttgcggatatgattgtgcgccagtcaggcggggagatcgatagcccatcggtgtcgacgcccggcagcggtccgcttaatttgccgggactttcctcctccgtcagatccgccaccgggccgctggcgccgtctgcgtcggtctccttcggcaaagtagcgcagggggctcaatcctttatttctcgtctgctgcgtccagcacagatcgctgccaggcagagcggggttcatccgcaactgatcctcgcgcaggcggcgctggagtcaggatgggggcagcgtgaaatccccaccgctgacggccgccccagccataacctgttcggcattaaggccggaggtgactggcaaggcaagaccacagaggtgatgaccaccgaatacatcaacggcgtaaagcaaaagataaaggcctcgtttcgcgtttacgattcctatgaacatgcgctcgccgattatacgaagctactcactaagaacccgcgctatgcgggcgttgcgcattcccgttcgccggagcaggcggccaaagcgcttcaggcggggggatacgcaaccgatcctgcctatgcgaaaaaactgatcaccattattcagaaagtaaaaggtgatattaagcagggtgtagaagcctataaaaacgacctcgcgaaaatattttaa

SEQ ID NO: 122045 - DNA, 1116 bp, Enterobacter cloacae
atgaatacaaaatccattctgttatttctcggcctgctgctcagcattccgatgctgtacacgccggcgcaggccgagcgaattcgcgatctggccacggtgcagggggtacgctccaactcgctaatgggctacgggctggtggtggggcttgatggcacgggcgaccagacgatgcaggcgccgtttacgggccagagcctcaataatatgttgtcccagcttgggatcaccgtaccggcgggcaccaacatgcagctgaaaaatattgccgcggtgatggtgacggccgaactgccgccgttcgcccgctcaggggataagatcgacatcgtggtctcttctctggggaatgcgaagagcctgcgtggcggtacgctgctgatgacgccacttaaaggggcggacaaccagatctacgcgatggcgcagggcaatgtgctgatctccggggctggcgcgcaggctggcggcagtcgcgtgcaggttaaccagcttaacggcggtcgcattagcggtggggcgacggttgaacgcgaagtcccaaatgacttcgccacgcaaaacacgctgcgcctacagcttaacgagtcagatttctcgctggcgcagcagatcagcgacgagattaatcgtcgctatagcggtggggcggcaatccctgaagatgcccgtactgtacgtttgtttgcaccgccggatggtccttcccgggtgcgtttcctcgccaatatccaggatattccgctgcgggtggggatacaggatgcgaaggtcattgttaactctcgtaccggcgccgtggtgatgaaccgccatgtttccctcgatgcctgtgccgtagcttatggatcgctgacggtagaggttacacagaataatgttgtgagccagccggatactcccctcggaggagggcagaccgtcgtggtgccacaaaccgatatctcagtacgcgaccgcggcggctcgctgcaaagcgtgcgcagcagcacggatctgaacgcggtgatcagggcactcaatacgcttggcgcgacgccaaatgagctgatgtccattttgcagtcaatgaaaaatgcaggctgcctgcgtgcgaagctggaggtggagtga

SEQ ID NO: 122046 - DNA, 528 bp, Enterobacter cloacae
atgaactatggctatcagccgatgtttgaagaccgcaggccgcgcagcgtgggcgacacgttgacgatcctgcttcaggaaaacgttagcgccagcaagagctcctccgccagtgccaaccgtaatggatcggccggaatgggattactggccatgccgggcagctcgaacagctggctgggtaacggcaaagctgactttaacgcggagggcaaaagcgacttctccggcaagggcggggcggcggcgcgcaacacctttaccggcaccatcacggtgacggtaaataaactcctgccgaacggcaatttacaggtggtcggtgagaagcagatagccataaaccaggggaccgagtttatacgcttctcgggtgtggtgaaccctcgcaccatcagcggggccaacaccgtgccctcaactcaggtggcggatgcgcgcattgagtatgtcggcaacggctacatcaacgaagcgcagacgatgggctggctgcaacgcctgttcctgaacctttctcctttttga

SEQ ID NO: 122047 - DNA, 783 bp, Enterobacter cloacae
atgattcggtcattatggatcgcaaaaaccggtctggaagcacagcagaccaatatggacgtgatttcaaacaacctggcgaacgtcaataccaacggctttaagcgccagcgagcggtgttccaggatttgctttatcaaaccatgcgccagcccggtgcacaggcttccgaacagacaacgctgccaagcggcctccagctgggtaccggcgtgcgtccggtctctacccagcgcgtgcatactcagggcggcctgaacatgaccggcaacgataccgatgtcgctatcgaaggcaaaggcttcttccaggtgcagttgcctgacggcagcaccgcgtacacccgtgacggacatttcgataaaaatgaaaacggtcagttggtaaacgcagaaggccatcccattctgccgggcgtcgtagtaccgcaggacgccaaagagatgcagataagccctgatggtatcgtcagcgtgacgctcccgggtcaggctcagccgcagcaggtggggcagttgaccctggcgacctttgtcaacgatgccggtctcgaaagcattggcggcaacctctatcgtgaaacgcaatcctccggcgcaccgaatgaactgaatccgggccttgaagatgcgggtacgctcaagcagaagtacattgagacgtctaacgtcaacgtggctgaggagctggtcaatatgatccaggtccagcgcgcctacgagatcaacagtaaggccgtttctgcatccgatcagatgttgcagaggcttacccagctttaa

SEQ ID NO: 122048 - DNA, 738 bp, Enterobacter cloacae
atggatcgcgcaatatataccgcattgagtgctgccaacgcggcgctcaaccgccaggccgtgacgtcgaacaatatggctaacagcgccacggcgggctttcgtgctcaactggccgcgtttcgcgctgtgccggttgaggggcagaccctgaaaactcgcgcgctggtagcggaatcgacgccgtataacgacgacaccatgggaccgattacccacaccggacgcagtctcgacgttgcacttccgcagaacggctggctggcggtagccttgccagacggtagtgaagggtacacccgtaacggcggcattgagatcgatcgggacggcgcattgcaggttggcgggaagtcgctgatgggcgatggcgcaccgctggtggttcctccccattcgcagatcaccattgcggaggacggtaccgtctctgcacttggcgcaggtgatgagccaacggccgtcgtgccggtcggaagactgaaaatggttaatgctcccatgagcaccctgatccacggcgacgatgggctgtttcgcccggcggcgggcaatgcgttgccccaggatgacgccatgcgtctgagtcctgaatcccttgagggaagtaacgtgagcccggtgaaggccatgacggagatgatcgccaccgcacgcagcttcgagatgaacatgaaggtgatccgcaccgcggatgaaaacgcgcaaaaggccaaccagctattaagcgtgggctaa

SEQ ID NO: 122049 - DNA, 1215 bp, Enterobacter cloacae
atgagcttttcacaaggtcttagcggcctcaatgcagccgccaaagcgctggacgtggttggaaacaatatcgccaactcccagacagcaggttttaaagcaggctccgtggccttcgccgacatcttcgccggaacgacgggtctcggggttcaggtggcgggcgtgacccagaacttcggcgacggtggcctcacggcgggcaatagctcgctggatatgggcttacagggaaaaggatttttccgcatggtaagcgaaggtggcgccgtctattacggacgtaacggccaatttaagcaggatcagaacggcaatatcatcaacagcaccaatggattgtacctgaccggctaccaggcgaccggtacgccgccgacaatcgcccctggcgcaccggtaggacccattcgtataccgacggaagacatgccccccgcggcgtccaccgccggatcccttacgggtaacctgaagtcagatgacaccaccatcatcaccgactcgttcgattatagcgatccgaaaacctacaactaccagagccagattgaggcgaccgacacgctgggcaataaacacaccgtaaaggtctacttcgtgcagaccgcggcaggcgagtggaaagcttacgcgcgcgatgaaaccgcgcccggcacgcctgatgtgacctccctggatttaaagttcgatagcaacggcaatatggacacggcggcgatggccagtaccaaaatgaccattaacggggccgcgtttaatggctccgcgccgctgagtatcgacatggatctttccagcttgacccgccgggccaccgatagcctcgtgaaagttgacaccatcgacggtcaggccccgggtaaatatcagagctttgttattggcgacagcggagaagtggtcgcgacctacagtaacggtcagcgtcagaccgtggcacaaatcgtactggctgatttcgccaacagcggtgggctggcggctgaaggtaataacgtctggagcgaaacgccgcagtccggccagcctttccttggtacttccggctccggcagcttcggtacgattaacgggaatatgcttgagcagtctaacgtcgatctgggtcaggagatggtcaatatgattgtctaccagcgtaactaccagtcgaattcgcaaaccatcaaaacccagtctgagctactccagacgctggttaacctgcgataa

SEQ ID NO: 122050 - DNA, 699 bp, Enterobacter cloacae
atgacagtttcaacggtaaacgacaccagcggcaataccagcacctacggcacgggcagcagtgcagccgacctctccgagcagtttatgaagctgctggttgcacagatgcaaaaccaggacccgactaacccgatggataacaaccagctgacctcccagctggcacagttcaataccgccgcgggagtggaaaaactcaacgcatctgtcggcaacgttcaggcgcttatggcgcagttgggcagtatgagcgccgcctcctgggttggccgtggggtactgatcgagggcgatccgaaagtcgcctttggtgacgccacgcagccactggacggggaggagaagccatcagacagctttagtttcctgttatcgggggatgcagaaacggtcaccgtcacgctgacggatgatgaaggcaatgcctatacggcgcagctgaaggacgtgaaatccggtgtgaagacttacaccctcgacgatctggaaaacttccagccggagccggggccgcctcaggacagggaatacacgctctcctttgaggcgaaaaatccggaaggcgataacccggaaatatccggcctgattcaggagcaggtgtctggcgtcacgatgacggccaacggcgcggtactgcacctgctcaatcatgaccccatcaccatgggcgacgtggttgttatccaaaaatag

SEQ ID NO: 122051 - DNA, 405 bp, Enterobacter cloacae
atgtcgttatttagcgtatttgatatttcaggctcggcgatggccgcgcagtcaaaacgtctcaacgtgagtgccagcaatatggcgaacgcagacagcgttgccggaccggacggacagccttaccgcgcccgtcaggtcatgtttgaagcggacacctctgccggccagggcatcggcggcgtcagagtcagcgacgtagtggaaagtacagcgcccgatcgcctggtctatgagcccggtaatccgctggcggacgaacagggatatgtacgtatgcctaacgtcaacgtggtcaatgagatggtcaataccatttccgcctcacgcagttatcaggcaaatgtggaggtgatgaactccgccagggccctgatgcagaaaaccttaaccctcggtcagtaa

SEQ ID NO: 122052 - DNA, 411 bp, Enterobacter cloacae
atgatgaataaacttgacgatgcgtttcgcttccaacagcaagcgttaggtctgctctcgcgtcggcaggaagtcctggcatcgaatattgcgaatgccgatacgccaggctatcaggcgcgagatattgatttttctcagcaacttaaaaatgcgttaggcaataaacctgcatcagggcctgtcacaatggctttaacgtccagcaagcatatgcagggtaaaaaaatgccttttgatgatgctcagttgctatatcgcgtaccggatcaaccaagtgctgatggtaacaccgtggatatggaccgcgagcgagttaatttcgcggataacgccatgaaatatcaatcgagcctgacattcctcggtgcagatattaagaaaatgatgacggtagtcagtcaggggtaa

SEQ ID NO: 122053 - DNA, 699 bp, Enterobacter cloacae
atgaagcttccattattacgcgtaacgctggtaacgctccttttcgcgagcccgctgtatgccagcgtgccatccgcgacaacggcgaaacttcgattagtgcagaaactggaggcgctggttaagctcacggaaaatccaggcaatatcgttcgtaccgttacactgctggcctcgcccggacagctatcagcggtgtgcgaaaatcctgacctgagcctggccgggcatgatgaccgcctcaccggcaaacgcaccgcagtggcgcgctgcggcatgcgtaagttctatctgccgtttagcattagcgcccagggaaccttctgggtcgccagtcatagtctgaagggcggggaaattgtgcagcagggcgatattactcccatgaccggcagcatagacgatttgcccgttgggctaatgtttgaggcgagggacattgtcggccaacgccttttgcgccccctttccgcgggcaaaccggtgctgcaaaaccagctgcgccagcagtggcgtcttcgcgccgggcagacggtagaactggtcatgtcgggaccgggtttctttatccgcagccagggcaaagcgctaaacaacgctgcggttgacgatacgctgcgcgtgaaaaccacgggtggacgtaacgttacgggaaaagtgggtcgtgacggagccgtgacaatttttttagaacaataa

SEQ ID NO: 122054 - DNA, 291 bp, Enterobacter cloacae
atgagcatcgaaagcacccaacccaccgcaccgattggcaatctggctggcggacaggaactgcgtacacgcggcactactcaggaaaatagtgtcgcgacgggcgaagcgcgcggaaacaaaaccgaagtgaccctgagcgcgctgacaaaaaaaattcagaccgatgacagccgtgacgtggattatgctcgggtggataagatccgtgccgcaatggcctccggggaactcactatcgagccagagaaaattgctcaggcgctggtgcgacatatttttgagtattaa

SEQ ID NO: 122055 - DNA, 444 bp, Enterobacter cloacae
atggataagctgtacccgatactgacgcaaatgaaaacgtccctggacgagctggaagccatcatgattgaagaggtcaatcagctcagccgcgtacaaataaatcccgtttcgctacaggtattatcggataataaaagccaattgctttcgtcgattcagtactatgatgaaatgcgtctccagcaggaacagctttccgcccttcaggcgccctatcaccatcacagcaggctgttcaccagctggaagctgatcagagaacgggtgcaaagcaccaaaacgctgaacgcgcaggtcgaaacgcttctgcaaaaccatatgaagaagaatcaatatatgcagaaggtggtagaccgcgtgggtcacgccaacacgctctacggccccgccggggaatccagccaggcacctgcgggtcgtaaatacaatatcagcatctga

SEQ ID NO: 122056 - DNA, 309 bp, Enterobacter cloacae
atggctgataaactcacgcggcaaatcgccctgatgttgcagagtaacgaacgtctacagcagttagcagacgaggaggcgtgggagtactttaatgaagaggttgcagcctacgcccggggtatgcaggcgctctgtgagttcaatctctcgccgcttgctgaagacgtccgcgcacagcttgcgcagcttcttgcccaggacgaacgtctgcgccagcggatgtctgtccggctaggtcatctcagcaataacatttctgctctacttaaatcaaacgcgtctgcccaggcataccacactgtctga

SEQ ID NO: 122057 - DNA, 408 bp, Enterobacter cloacae
atgtacaccaaaacgggcaacagcgcctattcctccgtctctctggacagccagattgctggcgccaccccgcaccagctcatcgttttgctctacgacggagcaatcaatgccatgcgtcgcgccgagatctacttccagtctggaaacatcgctcgccggggtgagatgatctcccgtgcaatcaacattattgataatggcctgcgcgccgggcttaaccatgaggttgggggacagattgccgccgatctggagcgactgtacgagtatatttcgcgctctctgctggaagcgaaccttaataagtccggggaaatgctcccgcatcttatctcactgatggtggatatggccgagacgtggaaagccatcgacccacaggcgcgtcaggtgaagcatggctga

SEQ ID NO: 122058 - DNA, 1503 bp, Enterobacter cloacae
atggcttcgttctctatgtcaggcctcggcggctccgggttagatattgaaagtatgatttcgcagctccaggtagctgagaataaaaaattaaacccctatttgcagaagcagagcaattatgaaggacaaacttcctcctggggtaaaatctccagcagtctggatgcggtgaaaacggcgctgaaaaaactggaggatgaagggttcaacggggtcagcattggcaccaacaaggcatttaacgcaacggcaggtaagggagcgatcccgaatagttactcggtccaggttgagcagttagcaaaagccaataaagtggggacggcaccgcaaaatgcgaacgacacccagctgggtgacggcgccggtccgcgtacggtgaccatcaccgcaggcaaaggcaagccgatggaggtggagctgaaagatgatgaaacctctctggtacagattgctaaaaaaattaatgctaaaaatggcgatgttaccgcgacggtaatgcctgccgaagatggcaaatatcagctggtcgtgacgtcgaaaaagaccggcgaagatggcgaaattagcatcagcgtaagcggcgacagtaagctggcaaaagtgctggattacgacccggcagtcacgccgggggcagataatgcccgggagattacgccggcgcagaatgccattgtctacgttgatggtacgaagattgaacgcagctccaataccatttctgacgccattgacgggatcaccctcgatctgcgcgaggtctcagaaaaagatcctgacgacgcatcaaaactgaaatcagaaacactgtcgatcaccgccgatacctctaaggttaaaagcctgattgaagagtttgtgaatgtctataacgcctatcttagcgcggcatccagcgccagtgcatacaacgaaccggaaaagacgaccggcgatgaactgccgcaggccaatgcgtcaaacggcgcgcttttcggtgacggtaccctgcgccgtttgaccagccagatgaagtccgctgtcgccgggagctatggcgatgccgacgatctgtacaaatctctgggtgcgctcggtatcgaggtgaagttcaacgaaaccaaacccggcgaggagcgtaccgggaccctgggcatactcaccatcgacaataaaaagctcgacgaagcgctgaagaaaaatccaaaggaagtggaagctctgtttttaggcaccggctcaacgggcgggatcaaggatcgcatggaggaggtgttcaccacctatctgggcgataacgattcgatcccgaaggttgaaggggcgatctctaccgctctcaagggggtaaaggaacaaaatacccgcgttgaaaaacagattgcccgcatgcaggaacgcattcaggacagccttgaccgcagccgtaaggaattccagcgtctcgaccaggccctgacgcaaatgaacagtacgagccagcagcttcagtccgcgctgcttgggatcatgggttaa

SEQ ID NO: 122059 - DNA, 1494 bp, Enterobacter cloacae
atggcccaggtcattaatactaacgcattgagcttgatggctcagaacaacctgaacaaatctcagacttctctgggtactgcaattcagcgtctctcttccggtctgcgtatcaacagtgcgaaagacgatgcagcaggtatggcgatctctaaccgcttcacctcttctatccgcggcctgacccaggcagcacgtaacgccaacgatggtatctccctggcgcagaccaccgagggcgcgctggaagaagtaaccgagaacttacagcgtatccgtgaactgaccgttcaggcaaaaaacggtaccaactcctctgacgaccgtgactccattaaaaaagagatctctgcacgtctggacgaaatcaaacgtatttctgaaaccaccaacttcaatggcgttaacgttctcgatggctccaaagataaactgaccatccagattggcgacaaagatggccagaccatcgacatcgatctgaagaaactggacatcgactctctgggtctggacggcttcactgctgcattcgataaaattgccggctctgcgggcgccaccagtcagtacaccaagaaagctgaccttaaggctgatggtgatgacatgggtatcgataccggtgctaccggtatgtggaaatacaacgaagctgatgatggcgctgcgctggcaaccgcaattggcgcaggtgctgctgcggatgttgaagtttacagcactggcggtgaagtgttcgcctacgacaccgtgaacgaaaagatgtttaaacttgatacagccgcaatgaccttcaaggatgatggttccggtactactgctcaaatcgacgccgtcactgccgctaacgtaacggaagtcaacgcgctggatgccgatatcctgttgaacggtccatctacgctgagcgatgccactaagctgaaagaaggcgcgaccttcaaagctcaggatggttctgaagtgacgctggatcaggctaaactggacgagatctccaacgcggcctttggcgctgacgctgctgacagcaacatgcagctgttctccgtgaaagacggtgcaaacaccaaatacttcgcgcagagcaccgacgcaagcggtaacactgtggtgaaagagctgaccttcgcagataacgcaactgcccctaccgttgcggatgcaggcgcagcgaactccgcgttcatcaacaccgccgctaacgctgccgcagccgacgacctgctgggtaacctggatgcagccctgactgaagtgactaacttccaggctgacctgggtgcgattcagaaccgtttcagctctatcatcgcgaacctgaacaccactgttatcaacaccaccgaagcccgctcccgtatccaggatgctgacttctccgtggaagtgtccgcaatgagccgttctaacatcctgcaacaggccggtgtatccgttctgagccaggctaaccaggtacctcagaacgttctgagcctgctgcgctaa

SEQ ID NO: 122060 - DNA, 819 bp, Enterobacter cloacae
atggtcaattacattgcgattggatcgttagtgacgctggatttacacacgaggttactaacacgaacgcgcgacggcgagtgcgtgacgctgcctgccagcgcctgcctctgccttgccgccctggtggaagcgcagggacaaattttgtctcaggaacagttaatggatatcggctggcgtagcgctggcgttgaggtcacggataatagcgtgcgcgttatggtgaacaagcttcgacgagcgctggcctcgctagagatgcaggatgctattgcgctggttgccgtaacgcgaagcggctatcgcctgattattcgtgaagagagcccgccggaaccctcggctgaaagcgttgagatcctccccccaccacagccgcctgaaatgccggtggaggctacgccttctcccccctccgctacgccagcaccgcgtcgaaaaaggcttttgcgaagcgctgcgttcgcggtctgcggcatgctgatcggtattcttattgccttgtccgtcaaaaatgcgtttgtccccagcccgcagagcatcgagtttatcctctggcagggagaagggatcccccccggccatatcgtgatggtgcaaaaaaaccgaataagccaaacagaacttatccaggcaacgctgcacacctatagcgaatatgtgctggaaagacgcgtccattacagaccgggtaaaattttatacatcactaccggtacgggaaagatagataaatatcaggcagttattgcctgtcaaaaacccattcaggagcaaaagaatgactgtgaatcgttctattttcatctttattaa

SEQ ID NO: 122061 - DNA, 522 bp, Enterobacter cloacae
atgactgtgaatcgttctattttcatctttattaaacgcccgcagatcctctttgctggcggtctgatgacaggtttagcgttaacaatcgggtacacgatcgccacgtcgccgctgagacagacgtgctttgccccagcctcgttttacactatcaaggacgaaaacaacgtgacgctggcgcgaggaatttatcgctcataccgcgatggacttcatgagggacacacgacctatatcggtaacatccgccattttcaggacggaaaacgcgtagggcaagcttcacccgtacagcgcagcgtgaattataccatgtccttctccggcaacctgctgcatctgacgatgcttagccacgcccgtcgactgggcgatcaaagcaacgaaaaagaggtgacggattatatttttccgcagcttaagagcggcgatacctccaccagttccctctatttgctggaaaacagcatcctggcatcgggaacggagacggtagtacggatagcctgcacgaattaa

SEQ ID NO: 122062 - DNA, 780 bp, Enterobacter cloacae
atgatttttaatcttccccttgagcagctttacgccctgataagccattactttttggtcatggtgcgtatctcggcgcttctgcatgttgcgccagtctttagcgaaaaagcgatcagcgcccgcctgcgtgcggcattggccttaaccctcgcgctgctgctgggcgggctggtttctgacgcggatataggactttactcctgggcgggcgtctggacgatggctaagcaggtgctcatcggcgccgcgatggggctgacgatgcaactgctgtttgccgccgttcgcctggcgggcgagatcattggaatgcagatgggactctcgtttgccaccttcttcgacccgggcagcggtaacagcccggtgatcgctcgcctgctaaacatgctggcgatgctgctctttctggtgtttaacggccatctgtggttgctttcgctgcttgcagagacattcgaggctctccccattaactcagaaccgctgcatgctggggggatgttttacctcgttaatcatgccggactcatcttcagtcagggactgatcctgggcctcccggtgatagccctgctgctgagcataaacatggtgcttgcgctgctaaaccgtcttaccccgcagctctcgatctttgtagtagggttcccgctcacgctgacctttggcatgctggcactgttgctcatcgacgaaacgctggctccattttttgaacgtcttatgagccacggcttcgagatcctgagcgggttactacaggcgctggtttga

SEQ ID NO: 122063 - DNA, 270 bp, Enterobacter cloacae
atgacccccgaaagcgtcatggtattgggcatggaagctatcaaggttgggctaatgattgcggggccgctgttgctggtcgcgctggcaaccggtctgattatcagtattcttcaggccgcgacgcaggtgaacgaaatgaccatgacctttatccctaaaatcctgatgatcgtgggtgtcggcgtactgctcggtccgtggatgatgaaaatctttattgaatacacgcgcatgttgttcgccagcattccttacgccatcggctaa

SEQ ID NO: 122064 - DNA, 744 bp, Enterobacter cloacae
atgaaccgtctgttgattgcccgtgctgcgacgggcgttggtctgctgctgcccgtcgcctctgcgctcgccgctaacggcgacattacgctggccagttcgccggggagcgctggctggacgctacccatccagacgctattgttgctcagtggattcacgttcatccctgcggtactgctgatgatgactggctttacgcgtatcgttatcgtgctgggattgatgcgcaacgcgcttggtacgccgaccgcaccgccaaatcaggtattagtgggactggccctgtttttgaccttttttgtgatgtcgccagtgctcaaccagatctatgaacaggcatggcagccgttgcaggccaataaaatcaccatggaaacggccctgaaggaaggcgtaaaaccgctgcgggcctttatgcttgagcagacgcgtgaagccgatctggcgatgtttgcccgcattgctaaaacgccgacccttaccggcccggaggacgtgccgttgagtattctggtgccttccttcgtcaccagcgagctgaaaaccgccttccagattggttttaccatctttattccgtttttgattattgatttggtggtggccagcattctgatggcgctggggatgatgatggttccgccagcgacaattgcgctgccttttaagctgatgctgttcgtactcgtggatggctggcagctgctggtcggttcgcttgcacaaagcttttactcatag

SEQ ID NO: 122065 - DNA, 396 bp, Enterobacter cloacae
atgaacgcagtacaacctccttttgccgcagggagcacgaacgtgctctctggcggggcaatcgcgctatcggttatcggtacgctcatgctcattattatgctgatggtactgctggcgtggatcgctcgccgcagcgggttggcgcgttgcacccgtgaaagcccggctgcggtatcgctggtggcaagtaaacctctcggctcgcgcgaacggctggtggtggttgacgtgggcgaacagcgtctggtgctgggtgttaccccaacccacattagctgtcttaccgtacaggttaggccagaggtgcctgagcaggcgactccttcagcggctttccccgccatgctggataactttcttcataaataccgttcgggtggagagcaaaaatga

SEQ ID NO: 122066 - DNA, 384 bp, Enterobacter cloacae
atgagcgacatgaataactcgtcgggatctgaagataagtctatggacaatctttggggtgaggcgctgaacgagcagaacgctgcgggaagtacagagcaaacggcggttcctcagttttctgaagagatgaacctgattctggatatccctgtcaaaatgaccgttgagctgggccgcacaaaaatgactatcaaggagctgctgcgcttaagccagggctcggtggtttcgcttgacggtctggcgggtgagccgcttgatattctgatcaatggttaccttattgcccagggcgaagtggtggtcgtgtccgataaattcgggattcgtattaccgatatcattaccccatccgagcgaatgcatcgcctgagccgctaa

SEQ ID NO: 122067 - DNA, 993 bp, Enterobacter cloacae
atggctgatagttttttatcacaggatgagatcgatcgcctgctcaatgctgatacggagagtcccgatgacctccatggaagcatgggagatgcggggataaaaccttacgatccaaatactcagcgacgcgtgattcgcgagcggcttcattctctggaaattattaacgaacgctttgcccgtcagttcaggatggggctatttaacctgctgcgccgcagttcagatattacggcgggaaatatcaagatccagccgtatcatgagtttgcccgcaatttaccggtgccaactaacctgaacctgctgcaccttaatcccctgcgtgggaccgcgctgatggcattctcctccggtctggtatttatggccgtggataacctgttcggcggagacgggcgtttcccgacgaaggcagacgggcgggaatttaccccgaccgagcagcgggtgatccaccgtatgctgacaatggcacgcgaggcgtatgagtttgcctggggctctatttataaaattaagacggaatacatccgttcagagatacaggtgaaatttaccaatattacctcttcaccaaacgatgttgttgtcaccacgcctttctccgtggaaatcggctcgcatcgcggggagttcaatatttgtattcccttcagcacgatagagcctctgcgtgaactgttaagcaatccgccaatggataattcgcgccatgaggattctgagtggcgcagcatgctggcaagccagatgcgtgaaaccgagctggagctggtggcgcaatttgccgacatcaacacgcggttgtcaaacgtcatgaagatgaaaaaaggcgacattatcccactggataagcaggagtttatagaagcgaacgtcggcagcgtgccggtatttaccgcgaaatatggctctgtaaataatcaatatgctctgaaggtcgatcggatgaatcagccagcattaaaatctttcaataaggagtga

SEQ ID NO: 122068 - DNA, 540 bp, Enterobacter cloacae
ttgctgcctctcttattttattgggtttacgtaatgggtaacaaaaataaaaatgctgcggctcgcggagggtcgcgctcgcttctgttaatactaatgtttctgattgccctcgcagcctgctgtttttcaggctatctgttctggtcgatgaaatatgcacacgtgcagacggacaacaattcgagaagtgagcacgaagccccggcggtacagcaagttgaaccgttatacgtgtcgatgaatacctttaccgttagcctgaccccgacgcagcacgagtcggatcgcgtgctctacattggtctgtccgtacgacttggcgatacgtcgtccgtacaggtgcttgagaaattcctgccggaatatcgcagccgattgtttatgctgctttctcagcaaacgtatgaaacgctctcaacggatgaaggtaaacgccagctgattagcaacatcaataatgagcttaaaaaaccgctggcgttcaacaaaaagattaacgtcactgacgttttgattaatgaatttattctgcggtaa

SEQ ID NO: 122069 - DNA, 1062 bp, Enterobacter cloacae
atgaatattgatattacggctctgctgtccggcggagcgccgacgagagcaggcaaaggaaaactcatcggcgaggattttgctctcacgctcgacgacaggttggcgcagatgggactgttgttacctgggctggacgtcccggcgcagctgttgagtcatgaaggataccctctcccgcagccggttttgccgccggtagctgagccgggggagagtgacgacacgctggcggaggtcagaatcagcgcctctcccggtgatgaaagcccgcaatggcagcttcagcagatagtcacccgccaggcgaggggcgctacagaggcttcgacccttgctgatgcgactctgccacgtgaagaggtagctggcgaaaaggcgcctttaacgatccctgttgacgatattaagctgaagcccgcccgacgcgaagatacccctctccagatgcaggcacaggcgttaggggggaaagccccggacgccagcgccgtgatgccaggcttaacggctcatcagggagacgcatcgcagcacgctacgtgcgatcccacggttcagagcgtcgtgatggagccatcaacggcgcgactggtcagtcagcctgtctcacagcaggtggtcaacgtccgttatccgctggagtcgcccgaatggaaacagtcggtgagccaacatattgccctgttcagccgcgacaatttgcacaatgcggagatccgcctgcatcctcaggagctgggctcattgcatatctctttgcgcgtgcagcaggaccaggcgcagatccatatcgtcagcgaacatgcccaggtgcggcagatgatggagactgctctaccgcacctgcgggcggctttagcggaaaccgggcttcagttgggccaggcgagcgtgagccccgatcgaccacatactggcggtggcgagcagggacgtcatccttccggagagcagcataccgctcaaggcgcagataacgtgttcgtggatgaagacactgtggcggaattattaacatcgacgcaaggaaatatatacggcattaacacttttgcctga

SEQ ID NO: 122070 - DNA, 450 bp, Enterobacter cloacae
gtgaaagtgaataatccaatggtcatgctgcgtgacatggctcaggaaaagcttacggagaccactcgcgccctcggcagcgtccagcagacgcttatggcagccgtggcccagcatgaacagcttcagcactatgagcgcgagtaccagcaatctttgcgtcagggcctgctgggcagcggtatgtcgatggcggatctggttaatcaacagtctttcattttgtcacttaaccaggtggtgaagcagcacgaatcacatgtttccacctgcgaacaagccgtggatcgggtcaaagagaagtggctacagaaaaagcagcgccttaatgcgtttgagacgctcatcgatcgccgcgaagcggcactggctatggcacagagccgccaggagcaaaaaatgatggacgaattcgcccagcgtgccggacagaaaagagaaaggctatga

SEQ ID NO: 122071 - DNA, 1374 bp, Enterobacter cloacae
atgagccagcagttaaaaaactggctctcggtcatggatcgggtggaagagaagctcggagagctcccgcgctttcgtcagtacggcaagctgacgcgtgctaccgggctggtgatggaggccgttggcctgaagctgccgataggcgcgttgtgcattgttgaacgtcagaccgggcaggctattttaccggtcgagtgtgaggtggtcgggtttaatggtcagacgctctatcttatgccgcttgaacatgttgacggtattcttcccggcgcgcgcgtgtacgcgccagaggccgataagggagcgggtaaacagctgccggtggggttacacctgctggggcgcgtgcttgacgctcagggccgccccctggatggtcgtccaccggcgggaaaacccgtagccggcctgtttaccccctcgtttaacccgcttcaccgcgatcccatcaagtccgtgctcgatgtgggcgtgagggcaataaatggcctgctgacggttggcaggggacagcgtatgggcctttttgccggctcgggcgtcggtaagtcggtgctgctcggcatgatggcccgtttcaccaccgccgacgtcatcgtcgtcgggctgattggcgagcgcggacgtgaagtaaaagattttatcgagaacattcttggcgaagaggggctctcacgcgcggtcgtgatcgccgcacctgctgacgtctcaccgatcctgcgtatgcagggtgcggtttacgccacccgaattgctgaggattaccgcgatcgtgggatgaatgtcctgctgataatggactctcttacgcgctatgccatggcgcagcgtgaagtggcgctggctatcggtgaaccgccggcaacgaaaggttatccaccgtccgtcttcgcgcgtctgcccgcactggtagagcgtgcgggtaacggtatgcgcggcggcggatcgataaccgccttttatacggtgctgaccgaaggggacgatcagcaggatccgatcgccgattcggcgcgcgcgatcctcgatggccatatcgtgctttctcgtcgcctggctgaggcgggccattatcctgctattgatattgaagcctctattagccgcgcgatgacggagctaattccacatgtccagtaccgcaaggttcagcgttttaagcagctgttgtcgacctatcagcgtaaccgggatctggtcagcgtaggcgcttacgtgaagggcagcgatccgctgctcgacagagcgatagaccagtatcctgcgctggaagcctttctgcatcaggcaatacacgagcggagcggttacgacgaggctattgccgcactgagccaacttttcccagacatcgttgaacaggcgggataa

SEQ ID NO: 122072 - DNA, 705 bp, Enterobacter cloacae
atgcctacgtttgatgccaatagcgccgctcagtggcgcagctggcagcctgaggatctgttaaacgaaacggttgaagtaccgttgcagacgcaggataccggccattctgacgcgcagtttaaagccgagctggcacgcctgcgtaagcaggctgagcagcagggtattgctcagggattggcgcaaggcaaagaggaaggccgtcgcgaaggctatgaggccgggctgaaggaggggcgtgaggcgggtctggcgcaggggctggaacaggctcgtgacgaacggcaggctttactgctccaggctggagaatgggtgacgcagtgcaagcttgcgctttcgaatctcgatagccttattcccggacgtctggttcagctggcgctgacggcggtacagcagctgtacggcaccctgagcgtggcggataaccatgctctgcttgcgcagatccgccagttaatgaagcaggataccctgctcaacggcccgacagaactgcatgtgaacccgcaggatctgcccatggtctcccaggcgatcggtgagacgctctcctcaatggggtggtccttacaaagcgatccccaattggccgcagggggatgtcgtgtggtcacgccggacgtggagtatgacgccaccatggaaacgcgctggcagtctctctgtcagctcgcccgagaggaattgtcccaatga

SEQ ID NO: 122073 - DNA, 987 bp, Enterobacter cloacae
atgaatgccgcagagaaaagcgccatcgttatgttgacgctgggcgacgtcctggccgccgaagtctttaagcacctaaacgcgcatgaggtgaagaccatcagcagttctatggtcaacatggcggggtttacccacgatcaaatggcctccgtgctgcgcgactttaaaaatgactcaagcgagtatgccgcgctgagccttaacacgaacgagtatctgcgcagcgtgctggtcaaggcgctgggtgaagagcgtgcgtcaacgctgcttgaggatttgctggatacccaccagggtggaaacgggatcgaaacgctcaactttatggatccgctggcggtattcgatctgattcgtgaagaacacccgcaaattatcgccacgatcctggtccacttaaagcgtaaccaggcggcggacgtcctgagcaaattcgacgatcgtgaacgtaacgacattatgctgcgtatcgccaccttcggcggggttcagcccgccgcgttgcaggaactgacggaggtactcaacggcctgctccacggtcagaatcttaagcgcagcaaaatgggtggggtgcgcccggctgcggagattttaaacctgatgaaatcccagcaggaagaggccgccattgaggcggttcgcgatttcgacagtgagctggcacagaaaattatcgacgaaatgttcttgttcgaaaacctggtggatgtcgaggatcgcagcatccagcgtctgttgcaggaggtggaaagtgaaacccttatcatcgccctcaaaggagcagacgaagcgctgcgggccaagttcttccgtaacatgtcgcgccgtcagtcggatctgatgaccgaagatctggcatcgcgcggtccggtacgtttgtcacaggtggaagccgagcagaagactattctgaacatcgttcgtcgccttgcggagacaggggaaatcatcattggaggcagcgacgatgcctacgtttga

SEQ ID NO: 122074 - DNA, 1671 bp, Enterobacter cloacae
atgagtgccacattaaatgatttaacgaataatccggctgaccgaattaaatcggctctgtcatggcttcgcgccagcccgaagctatcgctggtcatttgcgccgcggctgccgtatcggtattaattgcgcttatgttctgggcaaaagagccaggctatcgcgtgttgtttagcaatatcagtgatgaagacggtggggccattgttgcccagctgtcgcagatgaatgtcccttaccgcatcgacgcgccgggtggcgctattctggttcctgaagggcaggtccatgaagtgcgtatgaagctggcccaacaggggttgccaaaaggcggctccgtagggtttgaactgctggataaggaaaagtttggtattagccagtttagcgaacaggttaattatcagcgggcgcttgagggagagctggcgcgtactattgaaaacctggggccgatcagatcggcgcgcgttcatcttgccacacccaagcagacgatgtttgtgcgtgagcaaaaacagccaacggcttccgttaccgtcaacctgattcaggggcgtaccctggatgaaggacaggtcattgccattacccatctgatttccagcgccgtgacggggctgacggcagaaaatgtcactatcgtcgatcagcggggtgagctgctcacccaaagtggtttgcgcggcctgcaaacgtcacagctgaagtacaccagtgagatcgaaagtgattaccagcagcgcatccagcgaatcctggcgccgctggtgggcagcaaaaatattcgcgcccaggtcacggcgcagattgattttacccagcaggagcagacgcaggagcagtatcagcccaacgccgatccgcaaaaaatggtgattcgaagccgccagacgagccagtccgagcagggtaacggacgcggcaatggcggcgtaccgggcgcgctgacgaatcagccgccagcgcctgccactgcgccacttacgcagccgcttgacaagcctgccgctcaaaccagtaccgctggtaccggaaatgaccgctcacagccctacaacaatcacaacgatgagaccaccaattttgaggtcgatcgcacgctaacccacattaaaaatgccatggggcgcatcgatcgtctttcagtcgcggtggtgataaaccatctgccgcaaggcgctgagggcaagccgggtccgctgagtgaggctgaactgaaccgtattaatgctctggttaaagaggctgtcggctatacggcctcacgcggcgatagcgtcaatattttgaactcgccgttcaacggggttgaggaagaggaactcccgccattctggaaacaggataagttttatcagttgatgatggcgattgcgcgttatctggttattgcgattatcgcctgggttatgtggcgtaagcttgttcatccggcctggatccgccatcaggaaaccagcctgcgccgcatggaaatggaaaaagaggcgcgtcaggaagagctggccgcccgcaagaaagcgtccgaaaaggatgcgcgtgaccgcgctcagcagcgtgtggatacggaacttaacagtcagcagctgcgcgaactggcggaacaagagccgcgggttattgcgctggttattcgtcagtggatgaatcaggagctcaaatcatga

SEQ ID NO: 122075 - DNA, 324 bp, Enterobacter cloacae
atgtcagcaactttaatgcgtggcgtactcgatcaaattaacactcagtcacagcaaatagccggcatgagccgaaaccagcctgccgcgctgaaaaacacgccgtcgttctctgacattttattcaatagtatcaatgaaattaatgaaactcaggttaacgcgaaagaaatgacgcagcagtggatgtctggcagtagcgatattggattaaatgacgtaatgctagcaatgcagaagtcctcaatttcttttagcttcggtgtgcaagcgcgcaataaaatgctcagtgcctaccaggaaatcatgaataccccggtataa

SEQ ID NO: 122076 - DNA, 387 bp, Enterobacter cloacae
atgtcggataaaaacctgcgttttttggtggtggacgattttgccaccatgagacgtatcgtacgtaacctgcttcaggatctgggctattcaaatattgaagaggcggaagatggccaggacgcgctgaacaagctgcgcgccggtgagtttgatttcgttgtgagcgactggaatatgcccaaccttgatggccttgagctgctgaaaaccattcgcctcgacccggcgatgtcaaagctgccggtactgatggttactgcggaagcaaagcgcgaaaacattatcgccgccgcgcaggcgggtgccaacggttacatcgttaaaccgtttactgccgccacgctggaagaaaagcttggcaaaatttttgaaaaactcgggtga

SEQ ID NO: 122077 - DNA, 642 bp, Enterobacter cloacae
atgaccactcagcctggcgagatcgcggaaccgccaaaggatctctttttgcgtatcggtcaattaacccggctgctgcgcgacagtatggcaaatcttggcctggagcaggccattaaagaagtcgcggacgcgttccccaacacgcgtgaccgtctcaactacgttgttggcaaaacgtctcaggccgccgatcgcgcgctgacggccgtcgaggtggcacgaccgctccaggaaagattaggtgaaaatgccggtaagcttactgaacggtgggacgcctggtttgaagagccacagccgcttgacgaggcgcgagaactggtgaaagagacacgtacctttctgctggacgtgccggccaccgctcagcaaaccaaccagcagctcaccgaaataatgatggcgcaagatttccaggatctcaccggccaggtgctacaaagcctgatgcaggtgattcagaccgtcgaaaccgagctgatcagcgtgctggttgaaaacatgcgcgaacgtgacgcgggtatcgaacagagcggtgacgcccatctcaagaacggcccgcagattgataccagcgtcgccgggattgtcgcctctcaggaacaggtggatgacctgctggagtcgctgggcttttga

SEQ ID NO: 122078 - DNA, 1146 bp, Enterobacter cloacae
atgtctgaagagagcgagagcgacaaaacagaagaccccacaccccaccgaaaacagaaagcgcgggaggaaggtcaggttccgcgttcgcgcgagctgaccacccttgccatgcttctggtgggctgggggcttatcgtcggcgcaggtagccatctggcgacgcagcttgaatctattctgcacaacgggctgacctttgatcgactgctgatccgcgacccgcagaatatgttacatcgtgcagcctcgctgttgagcatggcttttctcgccattctgcccttcgccggcgggctgtacgtgaccgcaataacggcaccgtcgattatcggcggcctgaacgcaagcagtaaggcgctaaaggttaatcttaaaaaacttaatcccgtcaccggtatcaagcgtcttttctctgcccaaatggtatcagagatgatcaaaagcatcctcaaggtgctgttggccgccacggggggaggactgtttttactgctcaataaaagcaggttcatcaatctaatgtatgaaccgttgggcggcgcgctaaacgacatcagcaacctgctgattggctgcatgctgtacgtgattttgtcactgatccccatggtggccttcgacgtgatttatcagctctggagcaactttaaaaagctgagaatgagccgccaggagataaaggatgaatttaaaaaccaggaaggtgacccgcacattaagggtcgcgtcaggcagattcagcgccagatggcacaaagccgcatgatggccgaggtgcccaccgccgatgtggtcgtcaacaacccgacccactattccgtggcgctgaagtaccaggaaggcaccatgggcgcaccgatcgtcgtcgcaagcggcagtggacttattgccctgcgcatccgcgagatggctgaagaaaatcgggttccgatgctggaagcgccaccgctggcgcgtgcgctttaccggcactgcgagccgggtcagccggtgcccggtgaattatataacgctgttgccgaagtcctggcctgggtatatagcctgcgccggtggcgtaaaggctttggcttgcgcccaacagaacctaaagatttgccggttcccccggcgctcgattttgcacaagagagtaaagagtaa

SEQ ID NO: 122079 - DNA, 1371 bp, Enterobacter cloacae
atgaagcgcctgataccgccagacgactgtccggaggaaattgcccgccgtctcgacgtcatacagcagcaccgggcgctcaacgcgatcctcggggttaaccctgacgccatgtctcaggcggaacagcatcagcagcagcgtcggcgtggagagccgatcggccccctgcacggcgtgccgctgatcgtcaaagataatattgcctgcgcgccgatgccgatcacccttggctgccgtgcgctggcctcacttaacgcgacagcggatgctcgggtcgtgcagcgattgcgcagagcgggggcgattattcttgccagggccaatatgtccgagttcgcgttcgatgtgcgctcgcgtagctcgctggggggggatgtggcgaatccactttgcccgacactcaccgccggaggttccagcggaggatgcgccgcggcggtggcggctggaatggcggatggcgcattgggtaccgataccggcggctctatccgcattccctgtagctataccgggctggtggggctacggcctgcctttcgccgttcacagctggacggcgtggcgccgctctcacccagcaaagataccgttgggccaatggtacatagcgttgaggatgccgccttgctgcatgcggtgatccatggcctgccgccggttgcgcttcctgtgcgttcgctgaaaggcgttcgctttggcgtggtgaccgcgttacagggagaggatgaggtacagctggaggtctggcagtcggcgctgcacacgttgcgccgtgccggagcgacgctggtggaggtttcactccccttccttgaagaggtgaggcaggccacctgcctcagtctgtatgaatttcgcgtggcgattgacgattggcttagcaaacagcctggcgctccctccggactgacaagcattgtggactccggcgctttcctgccagagtttgcgccgtttctacgtcagatgctggcgagtaacacgctgaaaaccccgctctggctggcggggcgtcgctttcagcgcctgttgcggcagaacctttgccaggtggcggaggtgcagcgcatcgacggatttgtgtatcccaccgtacaacgattaccagaaagtatggcgaagatgccgccaggctgcgcgccggaactggccgccatcagcggcctgcctgccattacgttgccctgtggcgtaagccgtaacgggctgccggtagggatggagatgttatcggcgcaggaggatgagacgatgctgatgacgctggcgctggcgtgtgagggggcgctgggcgggataaatgaggtgctgaggtttaaggcaggatatcgccagagcggtaccgtttgtgagaacctctcttaa

SEQ ID NO: 122080 - DNA, 972 bp, Enterobacter cloacae
atgagtattgcagcaatgcacctctcacatgaaaaggtacacgggatgagtgaaaaagaagataacatgacaaacgacggtggggagagcgtaacgtataccctgcggaacatccccgctgacaccgaccgggtgatcaccgacctggcaaaccacgcccgtaagccaaaggcaacgtttctgcgtgagttcctggaagacagcttccgcgacgtcatcgacagctttgccctgaagaacccgctcatcgcctccctggatgaggagctggccagttatctgggcgctaaggtcatggagcagcgctaccagagccatttcattacccgctggaaccaggaataccagaagctgctggggatctcgacggaagaggagctccgccggttggtgcttaacaacacccccttcctgcaggtccgtgccgaccaggtgcttaagggctggaaaaatatcccgcgcgggatctccctgaccttctccctgtttgccgagatagccggccgggacagggaaaccatcgaccaggcctggaaaaatatcttctactcgcagctgagggaaaaaaaacaccgcttttaccaggatatcgaggccatccgcgccctgaaaaaactgcctgccctcaccggcgacagctggacgcgggatgggatcacagtgcgtatctaccgcccggaaaactacgcccgcggcgcatggcgcgttgcgctgagcctcccggaaaattacgccacccagatgtggaacatcccgttcccggagcttgaataccgcctctttaccgccgatcctggctacagcgccctgatcagcgccgaacccgacaggtgggacaaggccttccgatttgtggacgggatgtgtgagcttcacctctacaccaacggtgtggaagaagatcacaatcccaccccgctcggggatgttgctcaggcgctgatcaacgtggtggaagaaaacctgctgtaa

SEQ ID NO: 122081 - DNA, 255 bp, Enterobacter cloacae
atgaaaggacgacagagccgctatgttaccggcggagatagtttcgcggagattgcccgtcgaccgtcaggcgcggtggtgatgctcagcctgaacaccggtcttgaggatgcgctgcgggaggcgtcaaaatcgctcaagtcagccttcacccgttgcgggcgaaaatgccggcttgcagcgggaacggcacaaggaccgtttaccggacggcggcagggcgtggccacgcatctcttcgtgtcggtactctga

SEQ ID NO: 122082 - DNA, 345 bp, Enterobacter cloacae
atgaaaaatttgttcgaaaccgagggaacggttctattcccattccagactgaaatcgcttttgttctggcgattatcaccaccgccaaagacctttccgtcagtgcctgggggcacatcggacagaaacaatactggagcgcgagtctctgtattttgcttcttgtggcttacgtgggactctgtgctgcagtggtctgggcggtagtaccctggcttaaggcctttattgtgtcgaaatttgcggtttcggcactctgggtcacgccagtaaagagcggactgctctggagtatcggtaagatggtgggggccatctgccgaaagtttactctatccaagtaa

SEQ ID NO: 122083 - DNA, 1002 bp, Enterobacter cloacae
atggccgatccagtcaatctgcagaccgatgtggtcaggcagcatacggttccccgttttttactgaagcatttcagtacgccgggaaagggaaagcgccagcgtttatacgcctttgacaaagctgccgggcgcgcctatgccaccacgccggatgatgcgaccgtccgcaacacgttctacaacctcgataatcacccggaccgtctgagtcttgaaccactcctggggatttacgagcaccacgcggcaccggtaattgcagccctgctggcgcacagggatattcgcaggctgacagatgatgaacgctacaggctggccgtgtttgttgccgtgcagcgcgcacgaaccttcggtgaactggagcgtatctcaggcatgatttcggtgcttaccgataagatggaggccatcggctcgactaaagagcaggccatggaaaccctgggcctgtcgtccgggggcgataccaaggatatttttctgcggcagctcgtccagcaggtgtcacatattgatctcctgctgaaaaaggactggtaccttctggaaaccaggccagaacgtcctttttacgtatcagacaatcccgtcgtgcttaagaacagcaatgacttcggggcgtacggtaatctcggactggccgtacgcggcatagaaatctatctgcccctgtcatcgacgctgatgctggccatgtattgcccttccatccgggaaaaaatgattcgagataagcagaatcttcagcaactcatggccagagctccggaccggatcccgcgtcacatgcgcccgtttgaaatgctcagtcatctcaacagatttacagactatcttcttatgccgcttaccccggagcatgtcacgcactacaacgcgctgcaggtggagtacgcagagcagtacgtgttctgcggtgaaaacgatttttctctggttgagagaatgctggctgctaatgatcgttaccggacaggcccgcggtttacgttgtag

SEQ ID NO: 122084 - DNA, 186 bp, Enterobacter cloacae
atgtatatccttcacatctgcatatacttaacctatacatatgaagccgtactgaagcgcctggagcaggccgtgctgctgggtcagcgtgtcgtgatctcggccattacctacttagagatgcgcttcggtgccatcggtccgaagcagtccccgcgacattttcaactggctgacggcgtctga

SEQ ID NO: 122085 - DNA, 378 bp, Enterobacter cloacae
gtgccatcggtccgaagcagtccccgcgacattttcaactggctgacggcgtctgagttatccgcaaaagtgggtttccgttctgccgatcctgatgccggcccgaaaggctggaaagccgccgggaagatattctcgctgaaggtcgacggggaggatttgtacccggattatgttctggatgagaaaatgcggcctctcaaggttgtccgtttgattctttcactgtttaaggagcgtaaaataccgtgggggctggctatctggttcggctcggcaaaccgcaggctgcgaggtgggaagccgaaagatctgctggtatcaaagtcagagttggttctgatggcggcgcaggatgaggtggagtcgggggagtag

SEQ ID NO: 122086 - DNA, 483 bp, Enterobacter cloacae
atggctaaaaaaacagcgcctttgcttccggatactaatcagttgcttgctgagtttggtgagcgccttaagttggcgcgtctgagacgcaagcttacagcaaagcaggttgctgaacgggctggaatgtctccaatgacattgcgttcccttgaatcaggtggggctggtgtgacaatcggcgcttacttgtctgttatgcagatcttagggcttgaaaaagatctaaataaacttgccgccgaggatgagcaaggacgcctactccaggattccaggttaataaacaaaacgtatgcttctcatccttctgcaacttctcgcacaaacaggcataccgggaatgtggtaaaacgtgacgcgtccggtaagcaatccatggtcccatcaaaaaaatcagcaaatgccgaactaaaaacatctgccgcgacatcggcatccctggctgcgctgttaaaaccaataaaaaatcctaaaaggtaa

SEQ ID NO: 122087 - DNA, 1269 bp, Enterobacter cloacae
atggcaatgattggcgtgtatgcggactgggatggcctgcatggccccagacgaatcggctttttgcatagtcgccggacccgtgcgcgggaattatttgaatttgagtacgatccggatgctttagccgatcccgagcttaacttcctgcagcttgaccctgaaatagttttgtttggaggtgctcagtatccaacaccacctcgcgataaatttggtgtttttggtgactccagtcctgaccgctgggggcgaatgctgatgaaaagacgcctggaacgggatattcgtgaagggcttctgcctgaagggacacaactgcacgaatccgattatctgctgggtgtgcatgatctttatcgggttggtgctctgcgttacaagttggaagatgaaggtgagtttcttgataatcgaatggatgttgcggcccctccatttaccgaaattgccgcattagaaagagccagtcggtcacttgaggatgatccggataacagagcattgatgggccatgaatggctaagaatgctaatagcgccgggtggttctctcgggggcgcacggccaaaggcaagcgttgcggatgacaacggacatctttatatcgctaaatttccgagcacaagagatgaatatgatgtcggtggttgggagatggttgttaacgctctggctgtcggttgtggccttaatgtggctgctgcacaagcacgtaaattcgctagcgatcatcattgttttatggtccgtcgttttgaccgtaccgatgttggtcagcgtcttcattttgcatctgccatgacgctaacccgacaccaggatggggacgattactcaacaggagctagctatctggaacttgctgaagttctcatcagaaatggtgcacagaccaatgctgacctacaggaactctggtcacgcatcgtttttaatattctggtctctaattcagatgatcatttgcgaaaccacggatttattctggttcccggtaagggatggcgactttcagaagcctacgatataaatccggctcccagatctgatggcttgaaactgaatattactgaggcggataacgcgcttgatttggaattagctagggaagttgctgaatactttcgcctgaacttggccgaagctgatgaaattattgccagcttccgggggatagttagtcagtggagaactattgcggacagtcttactcttccttaccgagagcaggaacaaatggcggaggcattcagacgcgcaatgtga

SEQ ID NO: 122088 - DNA, 267 bp, Enterobacter cloacae
atgttaccccggacacaccgccagctcgtgagcgttgaagtgatgtggcctgctcagacgctaccgcttcccctgcaacaagtcgtcgaagcattgaatcagggcgaaacgcccgatcagctcattatcagtatgaatctacagggcctgctggcgtggcgtgaggatgcatccgcgcaggatacacacgatatctttcaggtacggctggacaatcagcatgaggcgcggtttctctgccgctacgtcacgctgccgctgcactga

SEQ ID NO: 122089 - DNA, 456 bp, Enterobacter cloacae
atgatattgatagaaaaatccagcccagacacgccagaatctttgtatcttatcgaaatgctatccgcgacgctggctgagattactggcgatagcggaaagactaactttaacgtcgataccatgaaatctgatcgagcgctgtgggtagtggcaaaagatgaaaatggcgaggctatcggttgcggggcgatccggccaatatctgaagatattgctgaattgaaaagaatgttttccgtcaataaagcatccggaacaggtacagcattgctccggtatcttgaaggtgaagcaaagtcgcttggatataacgaaatcaggctagaaacccgtaaagttaatacccgcgcagttgctttttatgtaaagcataactatcaacgcatcgctaactatggcccgtatgtaggtaaagatgaggctgtttgcttctcaaagcacttatctctctag

SEQ ID NO: 122090 - DNA, 1596 bp, Enterobacter cloacae
atgctgaaatggccacaaagaccatcccagaaccagccatctacgccagacgctgcgctgccggagggctggtatgcgtcactatccgcagaacagttgctggcgacaccgttacgccagtcctgtttgcaccagttacggcaactgaccccactgccggataccctgtttaatagctggctcctcacggcgattaatcgcttcgccgcactggtacagcttctacccgcctcacaaaatcatcaccattccattcccggcgggttattggatcattcgttggaagttgcctgcaacgccatccgactgcgccagggttatctgctgccaccggaagcgggcgcggaagaacaggcccggcaggccagcgcatggacggtcgcagcggtctgcgcggcattgctgcacgacacgggaaaaatcgccgtggatatggagatttaccaactcgatggtgaacgctggcatccgtggcaagctaatctggcgcaggcttatcgctggcagtaccaaagccacggtcgcgactatcatctgcatccggcggctggcgcaatgctgattaatcagttgataccctcgccattactggactggctggccggatatcccacggtttttgcgtccctgatttatcagatcaccggacactacgaacgggctggcgcgctggcggaactggtacagcaggccgataaagcctctgtcgcccgatacctcggcggcgatatcaaaaccgcgctggcgcaaaagccctctttctttccccaacagcttctcaccgccttgcggtcgctggtacagaacgagtaccgactcaataatcccgaatgcggatcagatggctggttgacggaggatgcgctgtggcttatcagcaaaaccaccgccgaccgggttcgcgcctggctgctccagcatggcgtatctagcgtgccggaaaacaataaccgcctgtttgacgaactgctgacgcaccagcttatcgttgccaatgaggataaagcgatctggcgctgcattatccgatcggataagggctggtcgcccgttgaaccgctgacgctgctgcgcctgacaccgtctgcaatatgggagccaggcgaacaacgtcccgccggttttgccggtgatgtgacgccggtaagcgaagctgaacccgtccctgaacttagcgcccccactcaaccgctgccggagatagcagacgacccgaggcttggtgacaataataatttcctgcagtggctgaagaaccacaccagcccttcagccacggtgaatacccgaaacggcaaggtacatgtggtggaaaaccatcttttcttgatttcaccagggatctttaagttatacgcatcagaaacaacaggtgataccggtgacggctggaaactggcacagcgaatgtttcaggagtcagggctggccctgcgctgtaatgatgacagttttatctggacctgcgaggttcgcgcgccacaaaagaaaagtagtcagttgaaaggttttctgatggaagatccgaagcaggtgttgggggagaaagtgccggtgaataatccgtggctgaagctggtacccgctctggaataa

SEQ ID NO: 122091 - DNA, 726 bp, Enterobacter cloacae
atggcacccggaacagcagtaagaatggagaaagacgccggacgcgtagtggtagacggtggggacgtccgtctctcttttgcgcgggataaacatcagggcgtacacaagcaggaccagacttacacggtggaactgatcgttaaagaggtagacagcagcattgatgcgctgcaacaccagcttgaaacattgctgcgtgtgacagaagcgctgaagaataaacgcaagactgtgaaatcaggcaatgttgaaactttgctgtcattgtttaaaacagcgctggaaacagaaccacaggaaaagggtctgcatggccttgtcgacgaggaaaggctcgcacaagcaagagcaaagctggttgacgaaggctggctgaccgcacgcgaaatcgcgcaactggcggggttttctgcgctgaatccttcttcgcagcccagcaagtggaagcgtgcaggccgtatttactcggtatataaaaaaggtgtgggcgaggtatttccccgctatgcgctggatgaaaatctgcggcctttgcctgtggttaaagtgattctggatattctggccgaagtgaaaaccccatggggcatagccgagtggttcgccacttcaaatgatttgttagccgggaagatgccgcaggagatgttgctgcgttatccgtctaatgttattcaggcagcggaagcggaagccgggcggatgcgggatggcgcagaataa

SEQ ID NO: 122092 - DNA, 708 bp, Enterobacter cloacae
atggcgcagaataaatccgccaggaacgagtttggtacgccgcaggttcttgtggcgcgcatcgcgtcgcctccggacaatatagtggtgaaccgggttattctgccgtcgggtagccgattgcaccgctgtcattcccttcagtggtctggcgatagttttaatcctggaagagatctgcaatcctgggaatatggcgcacgcttcagttcctttaaggatgatacagggcaatatgttccctggctgtatgcagcaggttcactgcagggtgcgctggcggagaccgtgtttcacgatcttatcggcgaagcacggacaggatttctcagcctcaggtctttcagaaactggggctacacggaacttgccagtaccagaacactgcaactagctagtctgaagtcgcaggatctatatcgcatgggcaccagtaaggctgaattgatcgagagcggaaggttactgtatacgcagactcgcctgtgggcacgggcaatatatcttcagcattgtgatattgatggactggtctggaaatcgcggcagcatgatgacagtgatgcgtttgtactgttcggtgacagggtcaaaccaggagatctgcgtatcgccagttcaacggttcgctttacggatgatgtttctacaggatacgaaatacagcagatggcacagcggcttggcgtcattctctctgatgaataa

SEQ ID NO: 122093 - DNA, 372 bp, Enterobacter cloacae
atgggactcgatctcttctttttcgaacgggcaaaaaacgcgcccgatgaaagccagtacgccagagtgggttatttccgcaaggtgaacccgttactcaaatgggtggataaacacgttgggctggtgcgtaaccaggtgctgttagaagtcacaaaagcacacttgcaggcgcttttgagtgacctgcaaagcctgacgccggataactgcggcgcggtttatcccacgattgatggctttttctatggttataccgattatggagaacactactggaaagatgtccgcgccgtcacccactgggtgaaagagacgctggagacgtttgattttgagcgagacaggttgatgttttatgcctggtggtaa

SEQ ID NO: 122094 - DNA, 906 bp, Enterobacter cloacae
atggacagaagcaacgatatctaccagaaagtcaccaaccagattattgctgagctggaaaacggcaatgtgccgtggatccgcccgtggcgcgatggcgagccgccgttcccgatcaatgcgttatccggtcgaccgtatcacggcatcaacgtgccgctgctgtggaacagcgccgacaagcagagcttcgccagcgaccgctggctgacgttccatcaggtcagcgcgctcggcggacaggtacgtcggggcgagaaatcctctctggcggtgttgtatctgccgcgcacgcaggaagagaccgacgcactcggccagccgttgctggataaagacggcgaaccgaaggtgcggcattttgggatcattcgtgaatttcggctgtttaacctgtcgcagtgtgacggcctgccgcagtcgctgtccgagccgtttacccgacccgcagagcctgtggagatggccgaaaccattgcgaagaatagcggcgtgacgctgcgccatcgccgccagtcgaaagcgtattacaaacccgcgcccgacctggtgatgatgccgcacccgcagcagtttgaaagcagcgaggcttactacgccacgctactgcatgaactgacgcacgccaccggtcacacttcacgcctcaaccgccccggtattgccggagcagaacgcaccgaagcactctacgccgctgaagaattagtggcggagatgggtagcgccttcctgtgcgcccattgcggcattcagggcaggctccaacacgccagctatatcggctactggctggatattctgcgccaggacaagcggacagtgatccgcgccagcggtatggcgcgccacgccagtgaatggctactcaacgctgtaccacaaccctgtcagcttagcgcctga

SEQ ID NO: 122095 - DNA, 291 bp, Enterobacter cloacae
atgtcgcttttcgataaaaaaccgtcgttaatgccggtggttatcgcccctgatgtctggcaatccgctgtggaatttcccgccgacccgcagcaggtggaggaacggctgggcaatctgttgctcgccgtactgctaaccctgcgcaccgccgggacgtcccgcaagaaagtaacctttacgatctactgccagccgccgcagggcgatatgaaagtccctgtcgcattaccgctatcactcaactatcacggccactatgtgcaggtctcgatggctgaacaggcataa

SEQ ID NO: 122096 - DNA, 201 bp, Enterobacter cloacae
atgaacccacaagatataaacgcattaaagaattttgattttctggcgcgcagttttgcccgtatgcacgccctgggccagccagtggatatcgatgctgtgaccggcaatatgagtgatgaacagcgagcatggttccgggagcgatacgaccactaccgaaagcaggctgagcgggcgcgagtgatagaactgcggtga

SEQ ID NO: 122097 - DNA, 873 bp, Enterobacter cloacae
atgatctctcctgaaacgctgcaatccgccatctctaacgtctctgtctggcgtcagggtgacgtatgcgcgccgcataaaccgctgctgctgttgtatgtactgtcgcaatacaaagcaggccatccacgcctgtttaactacggcctggagatccacgaaccgctcacccgcctgctgaaagagtttggtcccaagcgacgcaccgactatcccaatatgccgttctggcgactgcgaacagacggcttctgggagatcgctcacgcagaaggttgcaaaccgcgtaagggcaatactcagccgactaagaaagaactgattgataaccaggtggcgggcggcttcgatgaagcggcttatcaacaattgctggcacaccctgagatgatcggccagttggcccagaagatccttaccgatcgcttcccggaaagtattcagcggatcctggccaaccaactgggattcgattttatcgatcgctccaggaaccgcgatccgcgtttcagggatatcgttcttcgcgcttaccactcacggtgcgcgttctgtggttatgatctcagactcgatggcgcgctggttggtattgaagcggcgcatattcactggaaagcgtacggtggtccgtgcgtggtaaacaatggcctggcgctctgtacgttgcaccacgatgcgtttgatatgggggcattcgggctggatgagagtataaccatccgcatctccggcggcgtcagtcgtagtccggtggttgaccatctgttctggcagcgggacggccagcagttattcctcccttatgacaaaacgcagtggcctgctgaacagtatgtcggctggcaccgtaaacagatttttaaagcctga

SEQ ID NO: 122098 - DNA, 1503 bp, Enterobacter cloacae
atgaccgccaacagctatttcgagtacgtgctcaccctgctcggctggctggtgaacaacggcgtctggcagacgctgaccgccaccgggctgttcgccctgcccctgctggcaaaactgattgccctgtggctgaaggcgcgcggccagggggctgatgaaggcaacgtcgcccgccttctggtcgtctgggtggagcactcgctctacagcgccctgctggtgatcttcttcgcgggtgtgccgttcctcaatgtcgatatcaataccctcacctacgacagccagcgcacgaagcagtgcggctggtcggtggtacagcccggtgattccggttatgcgccgttgattaatgaactcagcggccagagcgcctcggtgccggtgtggtggtacttcacccacgcgctgggcaagggcatcaccagcgccgccgtcgcggtgctcccctgtaagccggaccttcgtcagctgcgctttgaagtacagcacacccggatcgccgatccggcgctggcgcaggaactacaggatttcgttaacgactgctacgggccgtcgcgggcaaggctcaagcggctgggcagcgatatcagtgaggagcaaagccgggaagtggactgggtgggatcgtctttttacctctccacgccgggctattacgaccacgaacactcccgttcgccactcgccgcctggccttatgacgccagccgcgacgacggtctgagcgatacgggtggaggtggctatcctgcgtgtaaggagtggtggtccgatggtgatgcggggctgaaaaaccggctactgaagcaggtcgataccacgctctggcagcaactacaaaaactgggacagtcgaaagaggagtatgaagaggcggtactgcgctcgctggtgagcccgcgcaatatgcaggtgtcgcagggaggtctggtgtacaacgggtttggtgggagtgcgggggatcatttaagccagacgcagttgctgagtcgtgtgggcgggatcatcggcgcggggctttcgagctacgccctgtttccggcttttgataatgtccgccaggcgctaccgatggtgcaggcgtttctcgaaatggcgctggtgatctgtatcccggtgatcctgctgttctcggcatgggatcttaaaacagtcatcacgctgagctttgtgcaattcgccctgttcttccttaccttctggtgggaactggcccgctggctggataactggctgatgcagatgatgtacgacagcgatacccactcgtacttcaacctctggggcctgcaaaacacctccgacgatctgattgtgaatattattatgggcgtgatgttcctggtgttacccgcattctggctgggtgcgctgacgtgggcaggcgtcaggatcggcgcagccatcgccggagtgatgggcagcgcggtcggcgatatccgcagcgcaggcgaacaagtcgggaagatgatcgtcagtaaaacacgcattccctga

SEQ ID NO: 122099 - DNA, 1362 bp, Enterobacter cloacae
atgagagtcttttgcctggtcttattgtttttcgcctgggtttgcgtggcggcagatgactacagcttccgcacgcgaggcgcggttgacgacctgctttactaccagattggtggcggcgaggcggtgatgccgccgcccgtgcgccgcagcccctcaccgctcagcgtgggaattggctggaacgccgatatgatgtgcggcaatttcgatatcaacaccacggtgcgcaaccagctcaacggcatcaccgatggcttccagcaactgatgggtaacgttatccagagtgccaccggcgcggttgccagcctgcccgcgatgattatccagcgcgccaatccgcagctttatgatctgctgaccaacggcgtgctgcaggggcggctggattttgataagtcgctgctgaactgccagaaaatggcggagaagatgaccgatttggcggcagactccgcctggttttccggagccaaagcggagaattaccagtccctcgccgccagcgataatgacgccatccgcaccgaccagaaagcggcaaaagaggcagccgaaaagggtaaacgctggataggtggcgaaaagcgcggcggcaaaagtcagccgccgattaagatagtccatgacgccaccgccgcaggctggaacattctcaaccagcagcccgccaccagcaccacgtctcttacctcctccgaatgcgacggggaactttgtagcacctggacatctcctgaagaggccgccggatggatgacccgcgtgctgggcgagcagaccatcagcgtggcgcaggccaccgacgatccggatgcgcgttccggcgcgcaggcggggatcggtctgcatccgctgatcgacgaagaaaaggcgaagatcctcccccttctgacggatctggttaacggcagccagaaacctggcttcgacaatttggcgaaagcctccggcggatccatgcagctagcccgcggcgtggtcgaggcgctacgcgacgatccggatgttgccgtcctcaccgaacggctggcgggagaactggcgctggcccgcgtcaccgagcaggcgctgctagcccggcgcacgctgctcgcgggcatgcgtgaaccgaatatcgccaacgttaaagaggcgcaggagagcttaggcaaaaccaccgcccaactggatgaagagctgagccagcttaagctggaactcgatttccgccaggcactgacgcgcaataccgccagccagatcctgcaacgcaaacagcagcgcgaccagcttcaggggcaggcagtggaagtgccggacgacagctatcgccgcctgcacaagctgaataacccgcagccggacagtccgcgatga

SEQ ID NO: 122100 - DNA, 924 bp, Enterobacter cloacae
atgcgagcccaatacatccttctgctactgtgcgctgctttccccctcagggcgattactacgccggagatcgcagcctctgcgcttacgccggactgtgtgaaataccgggtggtcggtctgtgctactggctgtactgcacgccgttcggctgtacggtgcgcacgtcggtgaaggtcagtcatttccgcccggatctggtggtatcggcttacagcgtcaccgggcaaaatccgtggacggagatgtcgctgctcagtccggcgttacccggcattgccgaaggcggcggcgacaccaatccgcgctcggccagccagcacagcaagatccgctttaaaaatgccgatgccatcggcttcccggcaggggatgaactggcgacgtttttcacccagtttggctatatctgctcgccttcatcgcagccttttcaaccgtactttttgagtcaactcgatacgctggcgtggcgcagcggtgtgccggaaatgacatacccggaggcgctgacgccgggaatgcgggaagtcggtcggaacggcgatatgtggggcaatatctacccgcgcgccggagccatcagccagacgcacgattacaaagccgctgccgttatcgcccagcgcgcggccgatctggtgacgcgtaccgggcagccgcatatctatacgccgctgaccacctcatcgcgcgccgggtactggtcgccctccccggttatcgaaggcgacagcgataaccatcgctggcaaatgctctcgccgaaaaaatccgccgcttgttcggtgttcccggatggcagtgtcaccgacacttacgctgacagactggcgaatgacggggcttacgcctggacgctgtggcggccttacaaatgctgtccgcgccgcgggcaaaccttcctcggcagtacgggttaa

SEQ ID NO: 122101 - DNA, 591 bp, Enterobacter cloacae
atgcctgaaaaacgaaagcatctcactcgccatgaagtgggacagatattgcttgcagcagacagagggatccattttgagcgcgattattgcctcattcagatgtgttttttacacggcctgcgggtcagtgaactgtgcgggatgcgtctgtcggatatcgatttgatcgggcgctcggtgtatgtccggcggttgaaaaacagcctctccacgcagcatccgctgttcgatgccgaactgcctgcgctgatgcgctggctggcggtacgcaaccgctggcgggatgcggactcagactggttgttcctgtcgcagaaaggcggtgcgctgtcgcgccatcaggtcagattgttactcaaacgttacggagaactggccggtgtcagcatttccgcttacccgcatatgctgagacacggttgcggttacgcgctggcagatctggggcgtgacacccgtctgatacaggattatctggggcaccggaacatccgacatacagtgatttatacggcgacaaatacgcagaggtttatgaatgtctggggaaacgtgagagaaaaccacacaattagtgccagaatgtaa

SEQ ID NO: 122102 - DNA, 513 bp, Enterobacter cloacae
atgaaaaaaacgatgttaagcgcgtgttttatgctggcggcggctaatgccatggccgccgacggcaccatccatttcaccggtagcattaccgaccagacctgcaagatcgacactggctcccagaatctaccggtgaacctcggcaatgttgcccaaaccgcccttaacggggcgaaggggatgagagcggcgccaacgcaatttaccatcaacgtgagcgagtgcccggaaacggtcaccggtgcaaatgtgaaatttgacgggacatccgataacaacgaccagagcctgctggcgctggacagtggcacgggcatcgccaccggggttgggatccagatcgcagataaaaacggcacggccatcccgctgcactccgcttcatccgactacaccctcgcagaaggcgcaaacgcgctcgactttgtcgcccgctatgtctccaccggcccggcggtcaccaccggtacagcaaacggtacctctgagttcaccatcatttacaaataa

SEQ ID NO: 122103 - DNA, 681 bp, Enterobacter cloacae
atgaacaggtatgcagacattttgctggcgctattgctggccgtatttaccgtgcaggcacaggccgggattgtcattggcgggacacggatcatttataacggcgacaaaaaagagacctccgcttctatacgtaaccccgacagatccggcgtctggctggtgcagagctgggtagacagcgggatgaagggaagtaaaacgccgtttatcgtgacgccgccgttgtttcgcattaatcctggtgaagagaatatcctgcgtattgtgcgcaccggggggagactgccggaagaccgggagtcggtgttctggctgaacgtaaaatccattcccgccaccgatgacagcacgccccacaacaatgtcctccaggtggtggtgaaatcccgcctgaagctcttttaccgcccggcggggctggaaggacacccggagacggcttaccaccatctgtcggtctcccgtagcggcaatcgtcttacggtcagcaatcccacgtcttactacgtcactttgttcaccttaaaggcggatgggcaggagatcaaagaggccgatatggtgccgccgaaaggcagcgtcagcttcacgctgccatcgacaactgtgtccacggtgacctggcaggcgatcagcgattacggcggcgtcagccagaccgaaatccgcaagctctga

SEQ ID NO: 122104 - DNA, 2508 bp, Enterobacter cloacae
atgaataacccgaattcccgcctgatgatcttcctgctggcgctgttgctgattatggtgctgctattgggttatctgcgtcatgcggaagcccgcgagactttcaatacccacgcgctggagctggacagcccgggccaggcggtcgttgacttatccgccttttccgaagccgatggccagctaccgggcacctaccgggtgacggtgtacgtcaacggcgagcagcagggcgaggcgcaggatattgcctttgttaccggggcagataaaaaactcaccgcacagttaaccccggcgatgctgaaagcctggggcgtgaataccgccgcgttccctgctcttaccgcactgccagcggacaaaccgctggaggatatcggccgctatattccgatggcttccagcgaactgcgtttcagtaaactgcaactaaacctcagtatcccgcaggcggcgatgagcgccaccgcgcgtggctgggtggatccgtccgaatgggacgagggcgtacctgccgcgctgctgaactataacctcagcggcagcaatacctggcgcgacagagaaaatggctccgatgataactactacgccaacctgcagagcgggctgaacctcggcgcgtggcggctgcgcaactattccacctggaattacgacgaggataacggcagccactgggattcggtgaacacgtacctccagcgggatatccagcgcctgcaagggcaacttacgctcggcgacagctacaccccgtcggacatcttcgacagcgtgcagtttcgcggcgcgcaactggcgtcggatgacaatatgctgccggacagcctgcgcggatttgccccgatcatccgcggtattgcccagtcgaatgcccaggtcacgattaagcagaatggctacaccatctatcagagctacgtcgcaccgggggccttcgccatcagcgatctctacccgacatccggcagcggcgatctggaggtaacgattaaagaagccgacggcagcgagcgaacctttattcagccattctctgcggtaccgattatgcagcgtgaaggccgtctgaagtatgccctcactgccgggaaataccgcagcggcaacagcgacagcgatgagcctgagtttggccagataacggcgatttacggcctgccgcacgccatcacgatttatggcggcacgctgtactcggaggactatcagtccggggcggcgggtctggggtttggtctcggcgagctgggttcggtctccgcggatatcaccgccgcccacaccacgctgaataacgatgaaactcacgacggtcagtcgtaccgggtgcagtactcaaaagattttcaggccaccgataccagcttcaccctggcggcgtaccgctattcaacggaagggttctataccttccaggaagcaaacgacttacgctcggacagcgatgatggctggcggctgacatacaacaagcggcagaaactccagctcgatctcacccagagtatcggcagctacggttcgttctttgtttccggctaccagcaggattactggcatgaggacggttacgagcgcaccctcagcatcggctggaatggcaacatcaacggtatcagctacagcgtttcctacagttacagtgattacccggacagcacccagcctgccgaccagcagctggcgttcagcatccaggtacctctcagccgctttatgccgaacgcatgggccagctacagcgtcaacaccgcgaagcgcggcgacacccgccagcaggtgggcctcaatgggacggcgcttgccgataacaacctcagctacagcctccagcagagctacaccaaccacggtgtgggcggctccggcaatatcaacgccgactacaaaggcgggcagggggaaatcaccggcggctacaactatgacgacgatatgcagcaggtgaactatggcctgaaaggggggattgtcgtccatccacatggcgtcaccctttcccagccgcttggtgactcacttgccatcgtgaaagcgcccggggcggatgacgcgaaggtgcagaataataccggggtctataccgactggcgcggctatgcggtcgtgccatacgtcaacgcctaccgaaaaaaccgcatcgcactggacaccagtacgctcggcgatggagtcgatgtcgacaccgccgtgcagaccgtcacgccgacgcagggcgcagtggtaatggcggacttcaacacccgcgtcggacggcgcgtactgatgacgctgctttaccgtgggctgccggtgccgttcggcgctcaggcgaaaatgaaggaaggcgacagcggcatcgttggcgatgacggccaggtgtatctgacgggcgtcccggatgaaggtgatatcacggtgaactggaatgggaaacagcagtgcgtggtgcattacaggttgccggagaatgccgcaaacgcgccggtaacggaaactgaacaggagtgccgggaatga

SEQ ID NO: 122105 - DNA, 954 bp, Enterobacter cloacae
atgaaaggattattaaaatcaggctgcctattgctggcattatggctggttgcttttggcgcacaggcctcatgccagtttgctaatggcgtgacatcggagatctctggttatctcagctttggcaatgtggcggtgcagcgggattctgcggtgggtagtgttatcgccacggccaccacgggggcgtataacggcggcaataacattgcggggtgcagtgaagcatggacctaccgctgggagctgagtaaatggggaacgctgagcacgctgggggggaatatctataacactaatgttccaggggttggtatccggctgacgaacagctcttccggtaaagtgcttccctatgaccagagcgcgggcgcaaatacttatatttttattggtggaaacggcatcaaagcggagttaatcaaaacgggcgatattaccgggggaaccctggataccggtatgctggcgcgggcctcggtggcaaaccaattttattttgccaatgtcacgttgaatggcacaaataccattacctctgaatcctgctccgttaccactaacccggttaatgtcacgctgggcgaccatgacaaaagtgagttcagcggtccgggtaccggaacggcctggcagacattcaatatcaatctgagttgtgttcagggcgcgcggattaatgtgcgtattgacgccacagcagatagcgacgcaggcgtacccggcgtcattaaactcgacagcgatcccgttaatgccagcggtgtcggcgttcaggtctggtatcgctatgaagacagcccggtacagttcggccaggagcggtattactacacctcgccatcaggtggtaacgaatatgttcagcttcaggcgcgctattatcagactacgcagagcatcacggccgggaaggcgaacgccacggcgacgtttacgttgacgtataaatag

SEQ ID NO: 122106 - DNA, 1041 bp, Enterobacter cloacae
atgtcccaatattggtggaaagatctttttgatcgcaataataactggcagggtctggagctgacactcaagagcagccagaggaccgacgtggtaatggaaatgctaagtggtcggtatgggcgaatggcgctacaggtctccgggaagacattattctgggcatcaatgttgaaagatcattccggtgtctggttggtgtttaatgccgatcattctgcttgccagacattattaccggctgtcacatctgaagatattgaggggattaaaagcaaaggcgaacgggcctggacaggtgaatggtgtcgctatttttcccggcaattaatgagtgcgccagtgcctcttctgtctcctcgccgatggctgataaggccgatggaggccaaatatccattaccgaaattatccggacagcgtgttcctgtaaatagctggcgttttgattccccagaaagcagcgggaatatcggctgtagctggacgctctacggcgaagattttcctgatttggttaatcctgacaaagtccgattagtggattggtggtggggaggtaaccagctacttgggcgttatccgatacaacctgatgccggaaggttgaaatggtggcgtaaaaaatgccgtgagcgtgcgctgcctccagtacttgtctggtatatagcagggctgggatcatttgttattcttgatggtcattatcgtttacaggcagcgattgcagaagaaattccaccttcatttctggtgctcagcgaattgcaggaacgggattttgctaccgatcaagaccatcgtgcccgtattgtccgggctttagaacagcagctcaaaaatcctaagtgcaaaatcgatggtgtaaatcagactctgattaatctttatgatacacgctatctttatgcctcaacccatagccgcgcgacgctcggcgaaggaacgcgctgggcacaggagttagaaagctatctgcaacggcatcagttggaagactatcgggacagagtacttaatggcgttaacgatgaatgctga

SEQ ID NO: 122107 - DNA, 882 bp, Enterobacter cloacae
atgtcatacggcatcatgggctatacccggctggaaacgctgctagaagaggaagctatcgacgtggtctcggtggcgacgccggacccgtaccacaccgaatccatcctcaccgccctgcgccacggtaagcatgtgctggccgaaaagccgcttgccacctcggtacgcgagtgtgagctcatcgtcgagctggcgcagcatcgcggcctgctggtcggcgtcgattttcacaagcgctgggacccgacggtaatgcgcattaaggctgaactggagaagccggaagccgggcgcatcctgcgcgggcatatcagcatggacgatgtgattagcgtcccgacggagtggctggactgggcgggcgcaagctcccctgtgtggtttctcggctcacactgctttgacctggtgcgccacctttccggtcaggaagtggtgtcggtgtattccgccgggcagaaacggctgatgaccgaatgcggcctcgatacttttgacagcgtgcagagcctgctgacgatggccgacggcagttcgtgggtggtggaaaactcatgggtgctgccggagggctttccgaaggacaacgacgggcgtatcgatattctctgcgaggcaacctatatccgcagcacttcacagcatcgcgggctggaaatcaccacgccggccatgacgctcacgcccaacagctatttcatcaactaccgtaacggcgttgccagcggtttcggtatcgacccgatcaatgactttgtgcgggcggtcatacataaagcgccgtacccggtcaccgcggtggacggactggcggtaagccgtatttgtgaagcggtacaccagagtctcgagagtcaaaaaccagtgtcattaaaataa

SEQ ID NO: 122108 - DNA, 483 bp, Enterobacter cloacae; identical to SEQ ID NO: 117657

SEQ ID NO: 122109 - DNA, 981 bp, Enterobacter cloacae
atgaacacggtactgattccgcccggtcccggcggctacggtaaagggctgtggctgcccgtgggcagtggcaaaaaggtgctgtcgctgaccgggcgggaaatccatccggttgcgatagaaattggcgcactcaccgaatcggaaatcgtcaacggttttgccgatatcccgccggataacgacatcctgtgcgtggtgattaactgtgccgggtccctgcgctgcggcctgtatccgcagaagggcatcccgaccatcaacgtgctccccacctggcgggccgggccgctggcgcactttattaccgaggataactacgtctccggcgtcacgatggagcaactggttctggtgaataccgccgaagcccctgacggtgaaccggagccgatgcctgtcactgcaccacgggttatcaccacgccaccgcctgcgcgtggcgcggagaaactggtgcgcatggtcgagcagaccggcaccgccgtcggccacattatcgccctgctgtttgccgccagccgtgaagcggtggacgtgtcgctgcgcaacgttatcccgtttatggcctttgtctcgctgctgatagccctggtgcaggagaccgcgctcggcagcctgattgcccacgccctgacgccgctggcgaactcgctgtggggactggtgctgctgtcgcttatctgcggcattccgttcctctccccggtgctcgggccgggcgcggccatctctcaggtgattggcgtgatgataggcacgcagattggcgcgggtgcaatttccccggccttcgccctgcccgccctgtttgccattaacgtgcaggtcggctgcgacttcgtgcctgttggcctttcgatgcaggaggcaaagccggagaccatcgcgaagggcgtccccgccttcctgctatcgagacaactgaccgggccgctggcggtaatagtcggctggctgttttccctgggcttattctga

SEQ ID NO: 122110 - DNA, 375 bp, Enterobacter cloacae
atgatgatttactgcgcgcgtatcgtcgctatcgggctgtttgtcgccgacggcctcaccgacaaaatgctgattaccttcgacagcaacggaccgaaggactgcctcgattactccctgtcgctggagccgtcgttccgggaagagagcctgatgatactccccggcgaccgcctgatgctggcgggccatgattatctggtgactgctgtcggcaaaggtgcacagcaggcgctgtctgaactcggccacctgacgctggtgtttaatggcgacctgaatccctgccatatcggcgcggttcatctctccggcccggtgccgaaactccatgacctgcacggcaatctggtgattgaggagggacggccatga

SEQ ID NO: 122111 - DNA, 522 bp, Enterobacter cloacae
atgtttctggtctccctggctgaaggctttatccacctgttccaggccgcaggcaaaatcttcctcgacatgatgacggggcttatcccgatgcttatctgcctgctgctggccatcaacttcctgatgaagctggtcggcaccgtacggatggagaaggtagccgccctgctcggccactcgcgcattctcacctacggcgtgctgccggtgctcggctggttctttatgagcagccccggcgcgctcactttaggcaaactcctgcccgaaaagagcaagcccggctatgaggatgcgctcggcaccaccgcccatccgctcaccagcctgtttccccacgtggtgccgtcagagctgtttgtctggctcggcgtggctgccggggttaaggcactcgacctgcccgtcactccgcttgcgctgcgctatatcgccgccgccatgctgattggcctgatacgcgggattatcaccgagtacctgttcctgcggctcagcaagcgggggaatacgccatga

SEQ ID NO: 122112 - DNA, 285 bp, Enterobacter cloacae
atgaaaaagtcaacaaccaaagactggcaccccgccgacatcgttgccgccttacacaaacgcggtaccagtctggcgaaactgtcgcgggaagcggggctggcctcgtcaacgctgtcgaataccctgacgcgcccgtggccgaaaggtgagtggctgattgccatcgcgctcaacatgcatccatcagaaatctggcccggccgttacctcaattccagtaacaaacgtgaaccccgtaaaccgcttcaccccatgacaacaaccgacaactccgggacataa

SEQ ID NO: 122113 - DNA, 315 bp, Enterobacter cloacae
atgttcaggtgcagggtggcaatcgtgattggtaaaagattaaagatttcaagagtcagggctgatctgacgcaagcggaactgggtgtactcgcagggctggatgaagaatccgcaagcgcgcgtatcagttcgtatgaaaaggaagtccatgcacccgattttaagcttgtctgtaagctggcggctgcgcttgatgtaccggaagcgtatttttatgctgtagacgatgagcttgcagaattgatccttcagtatcaccgttttaagaagaataatccgggccgtacattactgttttcaccaaatccttaa

SEQ ID NO: 122114 - DNA, 2016 bp, Enterobacter cloacae
atgaaacgcgccccttttctcaacaagcagtctcccgaccgcacgctcgaagtggtgatcctcgccggaagcctggcatgggagacctcgcgcgtgtggcgaaaagatcctgaccgggaagatgatgttcccccggtggtgctcggcccggatgaactggccgatctggacaatttgaccataatcaggcccgacacgctctacgtccgggtattccgcactggcgatatccgcgaagaggagctgctaaaaatcgccgtaaaactggcgcacgcgggagtgcagatggcccggctgatgacccccgatggtgagatgcttgagaactggaccgggcagcttgaacgcctgcgacaggaaaggccttctgacatcctgccggatcacttccgcctcgatgaagaggcgctgtggtttgataagctcaccgaacgacgcgacggtgaaagcgacagccatgacggcagctatggccgcctgctggaatggcacaccaccaccgggcagttacggcgctgggccatgccgatggcaatgctcagcggcaacggcgaggagttgcggcgcatcctgctggagaacggccttacctatatctccacccgccctgccctgcgcagcctgctgtgcgagtacatctcgcggtcgctccccggacgccgggtcacctgcgtggagaaaaccggctggcattgcggggtgtacgtgctgccggatgaggttatcggtcccgatggcgacaatgtcattctccagggcagccactatctgaccggcggctttgcgcaggaagggacgctggcagagtggcaggagcaggtcgccgcgctctgtgcaggcaattcacggctggtctttgccgtctgctgtgcgctggccgccccgctgctgcgcctgacaggaacgggcggcggaggctttcatctgcgcggtgagtccaccgacggcaaaaccacggtgatgaaggtggccgcttccgtctgtggcggcacggattactggcactcctggcgggcgaccgggaatgcgctggaaggaattgccagccgacacaacgatgccctgctgccgctcgatgaactgcgcgaagtagacccgcgtgaagccgggatgattgcctatatgctggcgaacggacaaggcaaggggcgcgcccgcaccgacggcgaagtacgtaaccgcagacactggacgctgctgctgttctccaccggtgagctgtcgctggcggagcacaccgaacgcgccggagaacgtctctacgccggaatggacgtgcgcatggtgcaaatccccagcgacaccgggcaacatggcgcgtttgaacagctacacggctttgccagcggccagcagttcgccgataccctctgcgaccaggtggcccgcttccacggcaccgcctttcgtgcctggctggccttcctcacccgcgaaatggacgccagcaccacgctggcgagagagctacttcgccgctaccagaccgccctgatgccggaaaatgccggaaaccaggtgcagcgcatcgtggcccgttttgccctgctggcggtggccggagagatggcaacgttgcacggcatcacgggctggcaggaaggcacggcgtatgaggcagtgcagatctgcctgcatgcctggctgaacgagcgcggccatatcgccaaccaggaggatgaaggcgtgctggagcagatcaagcggttcatcaccgcgcaccagtacagccgctttgcctcgtgggatggcccggaccgcccgctgaatatggtgggctttcgccgggtggaaaaagatccgctgacgggcgaggaacacacgcggttcttcatcctgccggagggctggcgggaaatgtgccggggtttcagtcccgccagagcggccaggttatgtctggaagcggaatgcctgctgcccggcagcgacgggaaataccagtcgcaggttcgcctgccggagatcggcaaagccagggtctaccgccttacctcccgcatcctcagtatctga

SEQ ID NO: 122115 - DNA, 216 bp, Enterobacter cloacae
atgaaaacccgtgctgacagtaacgatgcttttcccgaaagcggcaacgttcgtatgcggcaggtagtccagtttctggcgatgagcgaatcgtcggtttaccgcctgattaaaaacaccgactttccccgccccgtccacctctcttcccgactagtggtcttcgatgctatggaaatccgtcagtggcaacagcgccgcgccatcatccgttaa

SEQ ID NO: 122116 - DNA, 543 bp, Enterobacter cloacae
atgaatatctctcaagtgcgatatcaagatggagcatcgcatgacggtgacaacaatttttacacgttatcgagtttagaatctactattgatcaagttaaaaaatcttgtttaggacatgatgagttaatatcaattatggaagatttggctgaatatctcgatgattatccgggcagagctatcattggtctagaagctaaacttttacgtggtgaccgttctgacttagtggaaagagctaccagattaaagagtaagtttgctagaagagttgcaaaagatcagatgtcattggtcgaacaaacggtttatattcaagtcttatcagctatttgctcaagctggcatcagtgtatatatcctgcaataataagtggtcagagtaaaatagaagtcgatcgacttattaatatggaaataatacaaccagtgcataaagctattgtccgttttgatagtttagtaactactgagttagtatcaggaatgctctattttctaactggcctatgtcatgtatcatgggaggtaaagtgttaa

SEQ ID NO: 122117 - DNA, 522 bp, Enterobacter cloacae
gtgttaatatatcatcccatatttgacgcaaatcattgtgtttttagaacgttgcttttattgcaagagcaaaatcattgtgaaatagatattgagctatttaggcttatggatttttatgtgctttttcctagtctcttaaaatctataaaaccattcccaagtgagttgagaatctataaaaaagaaatacaaaaaatatgtgagccatatgagaatatacaaaaccccaataggatatttgttgagttaagaagaatacagtcgattgcattttatcatctcttatcaaaacaattaattgatatgaaaagttttgagaacggtatgattaagagaacagaaacaaatttgccagatcagttagtagcatcattaaatgaagcagcaatcaaaaaaaataaatggtttattctggtttctaaagagttccaaaaaatagaattttatggggcaaatggccttaaaaaaagaacgggactcatggagtatagatatgatgaggtcgaaaaaaatggttaa

SEQ ID NO: 122118 - DNA, 1893 bp, Enterobacter cloacae
atggttaaaccccatttacttgtagaacgattcgcagtatcaagaaatgaaaaattcgtttatgatcagtattttcataagggtgtaaacatcataagaggttggaatggtacaggtaaatcaaccattgtagatctactttcatatgctttaggatccgttataactgattggactcagcatcaatcttattgtgacaatgttttcgcacaagttttacttaatggaatcaggatcaccttaaaaagaaatattgttgaaaacggcctttcaaaaatgcacttacatgaaggtacaattgattcagcaattaaatgtggtgcgcaatggacaagctatccttatcgaagaagcgatacgttgcatagtttctctcagcaaatttttgagttactagggctgccaaggcataaaactgatgatgagcgtaatctaacacttcatcagataatgcgacttatgtatattgatcaattatcagcaacgacaaagttattaaaagaagaaaagaattttgataacccaaatttaaggcgtgctattggcgaatatcttcttggcattgatgatttagaagctcacaatttaagacaggagttgttatcagaaactaaacgcttcgaaaaatataactctgaagccaatgctatttttaaaataattggtggtgataatgtaagagttaatgagaattcgttgaatgaaaggattgataattattcaatggagcttgatgctcttaatgaaaaaatggagtcattactttctagtggaaataccaatctaaataaagaagaacagacaattttatctaagttgcaaagcgaaaacatggaattagttgcgcaacgacttaaaattgaagaggatattctatctttaacaaaagaaataaatgatactaaattatttttgatttccctcgaatcaagaaaagatgctttacttcattctaaagctgtaaatttttctcttggtagcattgagtttaaatactgtccatcctgcttgagtcttattgagagcaatagtgataaacatagttgtgggctatgtaaaagcaaacataacaaaaactcttcggatgatgcttatgtaaaacaattaaataatctaaatttccaagcaaaagaaagtaatcaggtaataaagaatcttgaggttgaagttacagaattaaaaatttccctagaaaaaataaatcttaaaataaatgaaattgccaggaatcttaagacgttttccgttatcccatctgaaaaagaaagtttgattgtcgaaattgggaaaaatatagggtttattgaaggcgcaattctttcacttgaggaaaatagaagtgggatcgctaaaataaattccttgttgcttgaaaaacaacaagctcaaagaaggattcttgaaattaaggaaaaattagataccttggacaaggcacaagccgagagacaagtgtctgtttattcagatatagaaaatattactaagcgtttacttatatctgatgatggtaatgaaccagcatttgatagtcctggggatgttataattgatttcgctagagatagaatgtacctagatggtatgagtaagttttctgctagttcaatggttatctttaagaacagtataagacttgctattttcttacactgcgttgacgatcctgaaactcgtctacctaattttatgatcatggataacatcgaagataaaggaatggtagaagcgcgaagtcataacttccagcatgttattattagtgaatgtcaaaagctacacgacaattatcaacttatattcacaacatcaatgatatctcctgaattgaacaatacagcgttttgtgttggaccttattatcctaagggtgatcatacacttaatctgtaa

SEQ ID NO: 122119 - DNA, 648 bp, Enterobacter cloacae
gtgaccagtcccattcgtcagaatctgtttgaacgggaatgtgatatgccgctgctggaagcgcggcatctcgcccttctgcttctcggcctcgatgcttcccaacctgcaaacgccctgccggaagaacatcaggaaaattaccgtatcctgcacgacgccatcagccgcaccatcaaagcaacgggcatggtcagcgccccggcgaacaaacgcatgttctatgccgatgagatgtttgcactggcatggcggcttattgatgacgaactgacgccgccagaaattaaggctcggagcttgaaggcggtaatgaaactgtcacgcaacagccgtggccgcaagtggctgaagacgctcggtgatgatgcgctgcctgatctcactacttcagcacaaccttcccagcgtgggatgcataagcgcgacaaggcgcgggagaatactgcccgactctgctggctaatggttcagcttctggttgaggagactgacggacggtatgggacgtctgataaaccggcttcggatgggatacttcgaaagctgagagcgctggcacaggagcgggaagtgccgtcggatgggcttggacgagggacgttttatgaggtgttgaatatgggaaggtgggaaaaaactaagtga

SEQ ID NO: 122120 - DNA, 1248 bp, Enterobacter cloacae
atgcctaaggtattgaaatccctaaccaataccgagatcgctgccgccaagccgcagaagaccgagtatatgctgcgcgatggcgacggactggctttgttgattaagccatccggcagaaagatctggtacttcgaatacactcccccggcgctgaaaaaacggaccaaaatcagcattggcccctacccggtagtcaccctcgccatggcgcgagatttcaggttgcaataccggcgtttactcgtgcagggcatcgacccgaaggcccatctggagcaggttgcagaggagcaacgactccagaatgaatgcacgctggaaaaagttgcggaacagtggctcaaagagaagaaacggaccagcgatcttagcgaagatcacgccaaagatgtctggcgttcgctggagatgcacgtcttcccttctctgggcaatacgcccgtcaccgagatccgcccgaagatgctcaaggaacacctcacaccgctggaagaacagggcatcctcgaaacgctgcggcgggtcatctcacggctcaatgaaatcttccgctttgccatctccgaagagctcatcgagttcaatccggctgacaacctagtcgcccgctttaagaaaccgaaaaagcagaacatgcccgccctccaccccagcgagttgggcaggttaatgctggcgctacagaacgcatctatccgcaaggaaacccgctgccttatcgaatgggagctactgacctgggttcgccccggcgaagccgtcagcgcccgctggtgcgacatcgatatgaaaaaagcggaatggcgtatccctgacacctttatgaagatgaaccgttcgcacacggtgccgctcagcaaacaggcgctgcgcgttcttcagatcatggagcccgtcagtcgccatcgcccgtgggtgttccccagcatccgcaaaccactggagcatatgcaccagcaaaccgcgaacgccgcacttatccgaatggggtttggcggtgagctggtcgcccacggcatgcgcagcatcgccagaacggcgggagcaggccattttccccgtgaagtactggaatctgcactggcgcaccagaaagaagacgaaatcgaagcggcctacaaccgcagcgattacctggaacaaaggcggccactgatgcagtggtggggaaactacgttgatgctgccagacggcaggcattgctcggtgaagaagaaccgctgcggatcgtggaaggagaataa

SEQ ID NO: 122121 - DNA, 744 bp, Enterobacter cloacae
atgaactggggctggcgtattccattcgtcttctctgccgtactggtgctgattggcctgtacgttcgcgtgtcgctgcacgagacgccggtcttcgctaaagtcgccgcggcgaaaaagcaggttaaagttccgctggggacgctgctgaccaaacacctccgcgtgaccgtgctgggcacgttcatcatgctggcgacctacacgctgttctacatcatgaccgtttactccatgaccttcagtaccgccgccgcgccggtcggcctgggcctgccgcgtaacgaagtgctgtggatgctgatgatggcggtcatcggatttggcgtgatggtgcccatcgcgggcctgctggcggataaatttggccgtcgttcaagcatgatcgtcatcacctcgctgattattctgttcgcgctgtttgtcttcccgccgctgctgggttcaggtagccctgcgctggtgatggcgtatctgctgattggcctgagcctgatggggctgacttttggcccaatgggcgcgctgctgccggagctgttcccgactgaagtgcgttacaccggcgcgtcgttctcctataacgtttcgtcgattctgggcgcctcggtggctccgtatatcgccacatggcttcaggcgaactatggcctgttctatgtgggtgtctatctggcggcaatggcagcgctgacgctgattgcgctgctgctgacgcacgagacgaagcatcaggcgctgtaa

SEQ ID NO: 122122 - DNA, 1146 bp, Enterobacter cloacae
atgatgggaagttttatgtcgatcgttaacgtattgattcctttatctgcattaagctacccgattgctgtagttctaccaagaaaagattcagtttcaaatataattgtacggttaagtttgatactaggaattgctacatccgtgacggttctaattggaatgattctatatacactccttagacacgatattggcatgccaatatggtatatagctgtcattcctcttactatgcttgttcttcctcttcagcaatgtggacagcaatggctcataaggaaaaaacaatatagtgcaattgctaaagtttctgtcattcagtctgttgtacttaacgcattaaaaataataattggattaccttggcatggcgtgaaaacgttagtaataattactgcattaggctattggttacaggcattacaatttttctataatgcaaaaaaaaatggccttgtgatagttaaaaataacttttttcgcaatttaacaaaggtaagtcgtgcgtacgctgactttcccgcatatagaactccacaagtactggttaatgcgctttcacaaagtttgccaatattcgtaatagggttttattttggggctactcaggttggttattttagtttagcacaaacaatacttggggctcctgtgacactgctcactggtgcattaagtaatgttttatttcctaaaattacgcaaaaagttaataacagagaattaatttcgccattaataaaaaaatcttttttgggacttatcgctttatcaacgtcaatatatataacggtgatattatttggtccgcaattattttcttttgtttttggacatgaatgggaagttggtggtgcctatggtagatggatggccctttattgtattttttggttatctgccagaccagctattgatgcgattccatctttgaaaatacaacgccaattcttaatatatgaggtatgctcgcttttgcttaggtttacaggtttgattgccggcataatgatttataacgacagcatttttgccatgattttatattctatcataaatgcgctttgttatttttctttatcaatatttgtattatggaaatctaaacaatatgagcggaaagtatttagatcctgtagttag

SEQ ID NO: 122123 - DNA, 177 bp, Enterobacter cloacae
atggataactggctggcgctttttgacggacagacgcgttattttctggatattaatgacagtaccatgacggcggatgttttgcgctttcgcggcagggaagccctgagcgagcccttccggtgggacatcgagttcacctccgggcaggcgaatattcccccggaacaggtctga

SEQ ID NO: 122124 - DNA, 228 bp, Enterobacter cloacae
atgctggcgtcaaaagagctgctggtgatgcccgacggcagcgtgacgctcaatatgcccatggatgaagacgctgagttcgtggcggtggtggggctgtttaaccgtcccgacatgcaggacaaccgctggcggctggtactgacccgtgacgacctcgacccggacaaaccccgtacgattgaactgggtgatggctggctcagcctcgttccggtaaaggagtga

SEQ ID NO: 122125 - DNA, 561 bp, Enterobacter cloacae
atgaaaattaacatatttaatttgtttagaaaaaaaaatgaatttcaggatgattttcctatggcacaattcagcgctttgccaagggggggggctacatatccgtcatttttatctttggaaaaaaataatatacatgcttattcagcacggtttatgataaagcctgaagatctatcagctattgaatgtttaattggattattttttcatggaaaagttaaaatagatgagagggaagaaaaggttatagaccataataaagttctcatttgttataaatttaaagaatttggacaggatatagtaaggattattacgaataataatgaatttatcaaatgcctttgtgagaaaggcttagaacctccagggccagaaaatgtatttcctgataaggattttggtaattatggtagcctgcaaggagatatggcattctggtgggatgtatattgggagccgttttggaaaagcttaagagaggaagagaaaaaacaatatatcgagcgaaataatttctcggttgataccattcaatttttggagtaccgccattag

SEQ ID NO: 122126 - DNA, 885 bp, Enterobacter cloacae
atgactgaacaatcagctttaaccaatgaaaccccacattcaacatatgatataactgggttgttaatgcccgctcgagcatttttttttactgttgttgatgagccaggtaaagatggcttcttggttaggaaaatatatgcttctaattctgatccttacctttcaaaaatggatttatcagaggcaaagatgctttctgaaactaatccagagcgatatggtttaattccaaaggatttttctgcttcctattctgtagcagagcatgtgatgggcaagaatgcatcagcttatatttctactagttctgcatttccggaaggatctccaaggtttgaaggtaaaacaattattgttgatattgataaagccgttaagtcaggtgcgaaattaatttctacagaagagatacttaagagtcttgacgactacaagaaacaaaacccacatcttgggaaacgcattgacaaaatatcaaattatgttagggacatagataaggaagtattgttgcacggtgaaaaaataccagctgctgcgatttttactccagaaacgttaaaatacacaaagtattttacacgtggtgctcgtgtggtacaggtaacagggattgtctttacagcctatgatctagagcaggcgtctgaaaagtcgcttaaaaacggtagcgttaaaccaataactgctgaggtcatcagacaagctggaggatgggggatggctgttgctggagcaaaaataggtacagcggcaggtgcggcggttggtattgagacagggccaggggcggtgctgacggggctcgttggtgggattatattcggaactgcaggttactttggagcagattgggtggcggattacattgatgaaaattaa

SEQ ID NO: 122127 - DNA, 2124 bp, Enterobacter cloacae
gtgccggaggtggtggagcaggttctgcgtcagcacgggctggaagggccggactttgagtttcgtctggagcgcagctacccggcgcgtgaacttatcacccagtggcgggagacggatttacagtttatccagcgcattctgtcagaggtggggatttactggcgtacggagatggatgatgtgcgcggtctggatacgtacatttttgccgacagccagcttaactaccggtttgacgtgcgcctgccgtaccgtgagccatcgggtctgtttgacggtgcggcggagtcagtctgggatgtgcggacctggcacagggtagtcaccggcaccgtcgccacgcgggattacaactaccggacagccaccacgccgatggatgcgacggtcagcgtgcgcagtaatgcggtgacgacgggtgagcactaccgctacgccgcgccgtaccgggaagcaggcgacgacagcgacccggagccggaaaccgagtccggcgcattttatgcccggcttcatcacgagcgggaactcaataaatcagcccgtatccacctgttcagcaacgcctcactcctcgcgcccggtcaggtgctggagccgcagggcgatgtcattgccgccctgaaagagggggccatcctcacgctggtgaccttccggggagcgcgggattcccgcctgcacgtatcggtgtggggcatgccttacaccgaacgttactgtttccgcccggcggacatcccgcgcccggaaattcacggcacgcttccggcccgcattgagagccgggaaaagaacgatatctacgcccacctggacgaccagggacgctaccgcgtcaggctggactttgaccgggacgatgctgaacagggattcgcatacctgtggctgcggatggcgaaaccgtatgccggggagacgtacggctggcatacgccactgaccgacgggaccgaagtggtgattgcgtacagcaacggcgatattgacctgccgtacattgcgtatgcgctgcacgactcggagcacccggaccacgtcacccgcgacaaccatacccgtaatatcctgcgaaccccggcaaacaacaagctgcgcatggaggataagcgcggagaggagcatatcaaacttgccacggagtacggcaggacgcagctcaacagcgggcatctggtggacagccaggggcaacgtcgcggtcagggaatggagctgcgcaccgacgaacggggaaccctgagagcaggcaagggactgtttgtcagcgcggatgcgcaggcgaaagcgcagggtgacgcactggatatgagcgctgcgctgaaggaaatcgaccggcttaaccagcaactgcagcagctggaaatcgctgcggagcaggctcaggcactgaaggcggatgttgacagccagatagcgatgtttgcgcagcggctgaagcctttcaatgaggcgctgctgatgtccgccccggaagggatggcgctgaccagcggggagcacctgcaaattgccgccagcaaaaacgtcgccattaacgccgggggcgatatcagcattggaacaatgggcaatgcgaccctgcttaccggggagaaactggggctgtttgcccgcaccggacaactgagcctgaaatccggggaagggcctgtggaggcgcaggcgcagaacggcaatatgaggctgtttgcggagaaaaagttgacgctgagctcggcgggtgacatctccctgaccgggaaaaaacgcatcacgctgattggcggcgggagctacctgcggctggaggcggggaaggttgagtacggtacgacagcgacgtatctgcgcaaagttaagcggactatggtggcggcctctaataatttacaagtcacaacaaagccaatgccatttattgatgatctgagaaaagatggtttatatgatgagcaattccgtgtcctggatgataatggcaagcctttagccaacgttccgtactttatccgtaacgaatataatgaaacatttaaaggtgtcaccgatgctcaaggtttatgtaaacgcgtttttacaaaggaaccatccaaactaactgtttggttaggtgttcatgctctggagaagtggtaa

SEQ ID NO: 122128 - DNA, 1386 bp, Enterobacter cloacae
atgattataccagtaattatggctgggggtagcggtacccgcctttggcctctgtctcgctcgctttttccaaagcaatttctagatctgttgtctaagggaagcttactacagaatacacttaatcgcttaactgatatagattacggaactccgataattataacaaataatgagtatcgttttttggtcaaggagcaaattaaaaaaactaaacatcctgattcgcaaataatccttgagccagccgcaaggaatactgccccagcaatagcgatttctgcattcagttctattaaaaatggagctgatcctcttttgctagtaatgccctcggatcacctcattaaagatgagatgcaattctcagaaagcataaaaaaagcgcgtgaatatgcagaaaagggctttttagtaacattcggtattaagcctacttcgcccgaaactggatatggctatattaaggcaagtggtaagatcggtgaaggaatatacgatatagaacgcttcgttgagaaacctagcctaaataaagctattgagtatatttcagatgataagtatagctggaatagtggtatctttctttttaaagcttcaacttttcttcaggaaataaatgcttttcgaccagaaatttatgagtcctgcttgaagtctgttaataatgcaattactgatcttggtttcttaagagtagagcctactagtttcgctcattgcccctctgattcaattgactttgccgtgatggaattgacaaagaaaggtgttgttgtgcctgtagatattggttggagcgatgttggttcctggagtgcactatgggaagttagtaataaagatgacaataataacgtctctaacggtgatgtctatttgaatgaaacttccaatagttatatctattctaaagacagattcgttgcatgcgttggtgtcgatgacattattgttgtagacacgagtgacgcgttactcgtagtttctaaaaacaatgtgcaaaaggtcaaggatgtagttaatcatcttcaggtaaaaaatagaccagaatatcagaatcacaatgaacaattccgcccttggggtagtcatgaagttgtgagttctggtagtaaatacaacatcaagcgtgttgttataaaacctggccatagtagttcagagcaaattcattataatagaacagagcattggattgttctttcaggcacagctttggttatgtgtggtgatgaaataaaaacagttaaagagaatgaatccacttttattccggctggagtaaaacataatttttcaaatccgggaaaaattgatttggaaattattgaagtgcaaacggggccatacctagcagaagacgatatttatagagaataa

SEQ ID NO: 122129 - DNA, 771 bp, Enterobacter cloacae
atgaccgtttttattagtgttgtatcacatggacatgcagaacttataaaaaaaatagattgtcttgcgtcactttcaaatatttttaaagtcattcttaaatgcaataagagcggtgacgccgaatcgctttgcgaatatgcaaattcccataatatgtttctacttaatgaagcatatggattgggcttcggtgaaaataataactatgtattcgactattgtttaaaacaactaggaatgaacaataatgattatttcattgttttaaacccagatgtcaaaattgatccggacacacttacaaacttaatcgagcatatggacgttgatgagagtagattagcttcgattaatctatataaaaatgctgagatgactgtttatgataattcgataagaaaatttccggggtttattgacttcttttcatcattcattttcaaaaaaaacaatgtaatatataataaaaatcatgtaactgctccaactaatgttgaatgggctgcggggtcttttttagcctttaaagtaagccattatgctttgcttaaaggtttctcagataaatattttatgtattgtgaggatattgatatatgttatcgttctcatctatataatgtacctgtaagatactatcccgaagttaaagctatccattttgcaaaacatgccaacagaagcattttttctaagcatttctggtggcatgtaagcagtattttgaaattcttatgctttaaatataataataggataaaaagatga

SEQ ID NO: 122130 - DNA, 1083 bp, Enterobacter cloacae
atgaaagagatcattatagtacatgattttgatggtaggccctatttcaaggcgcttgagaaaaattttcactgtaaatttatcaatagcagaccgataagattcttgttacgtgatcttataaaaaagaaaaaaatcactaaagattccatcgattcacttctatttttatttctgttacctttccataaaaatcaaaccataattttgggtatggctccttttaatttcaggttgctaatttatggtatcctttgttatcgcaataaactactgttacattcttcctggcatcaatggttaggaaaaactccgttttcatatccgaagattattaataaaattctcaaaaaagcttggcgtcattaccttcctagattttcgaggataattgctgtaactagagcaaccaagcggtcaatattggatttcgcatatcctatgcaattgaatattgacgtgattccacatgtggtagacattgagcctatagctagaaccgagttagaccaaaaatgggattctaaggatattcaaggattatttgttggtcgacttactccagaaaaaggtatcaaagatataattgatatcgctgaaaaaatgcagtcaggtgtattgcaaaattctaatataaaaattgctggcaaaggaaatcttgagaacgacgtcgttaccgcgagcaaaaacatttccgggttgtcttatataggctacataacttcacgggaagaacttaaggatcatatgaggcgatctaattttttcttgcttccttcaaaaaagataaaaggatgggaggagttatttggattagttattgttgaagctatgagtcaaggatgtgttgtaatagcttccaaacatataggacctcaagaaattatcgaagaccatgaagatggtatcctttgtgaagaaaatgaatttataactcaaaccttacggaactttaatgagtttcatgcggatatttctcgttataaagaaatttcgttgcatgcacttgataaaagtcaaaaatataatatgaaaaatatttctcatctttggtctgaactcattaacaatctggaaagataa

SEQ ID NO: 122131 - DNA, 834 bp, Enterobacter cloacae
atgtttccgttatggcttaagaaaactaattattcatgggtgattagttttcattattctggtctagcataccctttaaaaaatgtcaggtctgtaataacagtgcatgatcttatgtttgaactagtgcccaattttttcaatactaaattaaaaaatcttattgggaagttctattatcgtattattgtaaaacaaagcataaggaattccgatataaccataagtgtatctgagactactagagaggatatatctaggttatataaagaggattctgaaataagcggtgagggtatatttttacaagcagaaagtgatgattctattttaagagaaaaaaatttagaaccaaataattatttcttatatatagggaataataggcctcataaaaatatagattttttaaaggaatgctttcgtaattccaagctaaaacataatttaaaatgcaaattagttttagttggtcatacagggcaaagtgatgaagacataatttatccaggaatactcagtgatgaacaaattgtagggctttatagaaatgcgaaggcattcgtttttccgtcaaagtatgagggttttggtctgcctattttagaggctttagataataaatgcccggttatagcctccgatatacctgcgttcagagaattttcaaacagtaatataacttatttcaaattggcagataaagccgcactggttgacatattgagtcgggactataaatttgatgaatctgaagctcaagaaattattaacagatacagttggcctcaaacttataaaaacttagaccgaatttttggtggccttatatga

SEQ ID NO: 122132 - DNA, 1017 bp, Enterobacter cloacae
atgaatggcaaagtgctgttcgacgcgggcaatggcctcagcgggctgcgccagtttgctgttgatctcgccgctcgccgggaacgccgccatgcggtcgcgcaccagttcgcccaggctctgccctttcaggcacagcagctcggtcaccagcagccacgggatcatcccgctgtcgcagtaggcaaaatcacggaaatagtggtgggcgctcatctcgccgccgtagatggcgtcttcctcgcgcatacgctctttgataaacgcgtggccggttttggacatcaccggctcgccgcccgcggccttcaccacgtcgacggtgttccaggaaagacgcggatcgtgaatgattttcgcccccgggtttttctcgaggaacgcttccgccagcaggccaacgatgtagtagccttcgataaactgccctttctcatcgaacaggaagcagcggtcgaaatcgccgtcaaaggcgatacccatatcggcgccgtgctcaatcaccgcgttgcgggtgtcgtcgcggcactccggcagcagcgggttaggaataccgttcgggaagttgccgtcaggcgtgttgtgcactttgacgaaggtcaccggcacgttcagtgccttaaagcgggcttcaagtgcatcgacaaccgggcctgccgcgccgttgccggagttaatcaccagcttcagcggtttgaggttcgccacgttgatgtagcccagcaggtggtcgatgtactctttttgcaggttaatctgcttatagctgccgcgtctggcttcattcaccggcgggaagtcgttggcctcggccagacgctgcacgtcgcgcaggccggtgtcgccgctgataggacgcgcgcccttgcgcaccagcttcatgccgttgtagtccatcggattatgactggccgtcacttcgataccgccgtccacgcccaggtggaaggtggcaaaatagatctcttcggtaccggaaagaccaatgtccagcacgtcgacgcccgcgtcctgtag

SEQ ID NO: 122133 - DNA, 1362 bp, Enterobacter cloacae; identical to SEQ ID NO: 114635

SEQ ID NO: 122134 - DNA, 288 bp, Enterobacter cloacae
atgtccgagccggactgggcaggtggcaagccttacagtgaagccttccgtcagaaagtgcgcgagcgcttccacggcgtgattatcggggcgggtgcgtatacggcagagaaagccgaggatttgataggtaaaggcctgatcgacgccgtggcctttggccgtgactacattgctaacccggatctggttgcccgtttgcagaaaaaagccgaactgaacccgcagcgtcctgaaagcttctatggcggcggcgcggaaggttataccgactacccttcactgtaa

SEQ ID NO: 122135 - DNA, 1833 bp, Enterobacter cloacae; identical to SEQ ID NO: 114301

SEQ ID NO: 122136 - DNA, 741 bp, Enterobacter cloacae
atggaaaatctattagacgcgtacaaacggatattacaggaggttgacgcccagtcatttaacctgagtgaggataaatactcgggcgtctttttacctgtaccctttgaagaatactggcattcaccggcaaaaatcatgctggttggacgtgaaaccgctggctggaatacgctgaatggtaagaatacgatgtcgcgggtgctgggactcatacctgacgtcaccatcgggcaagtggttgaagaggctgtagctcgttacaggaatcatcttccggtacaaaatgaaggcaccaccaacctcaaatcacgtagccgcttcacgcaatatcatttccaactggcccgggagcttaatatccctccacaggctatcgtgtatgccaatctactggcgtgggattacgacggactgacccctctcaatcgccctcaaaatgaagtgcaggaagtcatattagcctcgctgaaacttctgacggtacaaattaaacaccttgaccctgatttcatcatctttgcatccggagcacggagaacagactacatcataaaacaggtgcttactgagctaggcggctatgagacttcttcagtcatttcggggaagctatgggagttcaaaacaggtaatacaatctgtttcagaattgcccatccaagggctatgcgcgggcaccagaagcacagagaagaggtgattgcacgaattcagcaactttgtactcagggtggctag

SEQ ID NO: 122137 - DNA, 1218 bp, Enterobacter cloacae
atgcagaaatccttccgattcaccaattcatccatcaaagcccttccggcaaacacagatacccgatctacagagcttgaggtgtctgataccgaagtcatcggccttaaatgtctctcaggccgaacgggtaacaaacgttttctcttgcgctacacattccacggtaccaaaaaaagtatcagtattggcagattccctgaaattgatgtggggacagcccgtcagatagcgcgtcgtcacaaagagtcaattgcattgggtaatgacccgaaagcggagcgcgataattatcgggcgatgcccacacttagtgagtttttccaccagacctatgttccgttcatcaagcgccataaaaagtcctgggataaggatgtgcagcgtttcacgcaatacattgaatcccgtctggggaagattcgttactgtgaccttcgggcccgggagatccagcaggtgcttttcgacatgcttgaggggcgtattcacggccagcagtatgccccgtctacctgtaacagggcactggctattctgaaaacgatggggcgttatgcgctacgacaggatgtcctggagaagaatgaagccgataagatccctttgctaaaggagaataatcagcggacgcgcttttttgacgctgatgagatcaggaggatcctcgatgctgcggcacgatatcccaataaggctgctgggggactgatagcaatgctgttgttaaccggtacccgcaaatcagaaatgcttaacgtcatgcacaaacatgttgatcgggataacaggtccttgtttattccttatacaaagaatggtcgcagcaggacggtgtatctcagtgatgtcgcattatcgattattgattcgatcccaagggttggcagtaacccctatctgtttgccgtaaaagataatggaaagccgatatcagaaccacggtgggcgtatgaaaaaatactggccgaatgcggtatagataagagtgaagtctgtttccacaccacgcgacattccgtcgcatcattacttgtctccagtggtcagtacagtctgtatgacgttaaagctcagctggcgcatgccagtattcaaagcacggagcgctatgcgaaattgacaccagagcgtatgcgtcagaccgggcagggcgtaacagatcttcttttgaacaccgttactgtcggtaacaatgatgattttagcaccccttaa

SEQ ID NO: 122138 - DNA, 252 bp, Enterobacter cloacae
atgccgttaaaatgtcctaagtgcgatagccgaaacacagtgacgggaacagctggaaagatagctgagttgactcgtgatgatcggttcctgacaacgcctgctggttatatcagcccggatcaaatggcagaattgctcaaagacatcatcagggcaataaaacgcctctttggatttatggagcagcgagagagaaataatgcgccagtgctggtctgtaaatcgtgtggatattatgagcgtatatag

SEQ ID NO: 122139 - DNA, 372 bp, Enterobacter cloacae
atgaaatttgtctcgaactggcaagacctgccgtcgctccttcttcccgattcagttatgactgtcctgagaaaagagctgatactcccatttgatgatgaatcttctgcaatgaatttctgggaagaggtcggtgtaacattaatatacattgaaccctatgatgttcctgaagatattaagcgacacgtattggatgtaattcatcatttaattgcaacccccgagttcgtggtccgtctgacagaagagtattacttgatgctatcaattacagaagataacgggaatggtatttatctgttgtttcatcccaattgtcctctgggcggtattgatacattaatgtctatggcggaattccgtctgtaa

SEQ ID NO: 122140 - DNA, 483 bp, Enterobacter cloacae
atgagaaaattaaagtcaggaaaaaataataatgaaaacgatgagctggagttaaataatgatttaagcgatgttgagaatggtatcactgaagatgagaaaacattacctgaagagagttataagctgctcattgaatcagggcaggcggaaaaaatcagtcctaaggccagtggtatgctgacatggcaactggcaatgtctgaaacagataatgagctttatctgcgcctactggcaaatggcagcggaggattgttctctaaggactggatttcactttctaaaattgaaagtgtactcgaagtacaaccgataacgggtttcacatccggcgtattcagacccttatttaaagggctagtgccaataattctggttttctggctgctgttctgcgctcgccagatatatgtctgctggaggcgcatccggagaagttatttacgcatgttttatacgccgactggcgtgtgcgcctga

SEQ ID NO: 122141 - DNA, 435 bp, Enterobacter cloacae
atgcaaacccagtatgccttaaaacaggcaggattaacgctgcctgttaccaaattatttcagcagcacatcactgcgcttctgacagaacaatctcagcaaacatcggtcagggcagtggtcattaattttcgtgacccagactacagtgcagaatccggcggatttcatccggttgaaatgcgtttcatccgtaaggataacgagtggtatttcgattatgtcacagactttagttacatggggcgagtctatcctgaactggaaaaggaaatagacttttgctggtcgggtcattacgtcttccattatctgattggcgatatttcgataacaacagagatgaatgagctctggtctttatgggagagtaattttattgaatacctggcaatgggggtttaccaggtaacggtaactgaggaaagttgttga

SEQ ID NO: 122142 - DNA, 321 bp, Enterobacter cloacae
atgaaaagaacgataatggcggctctgttattcacaggttttctgtcgcaggcgcatgccgggcttgttcaggtaaataaccgtgtagcctgttatcttgcgatggacagtataaacaggcaactcatggagtcagataaaaaagtcactgctgaaatatataaatatttggagggagaactacaacgttatggcgttgacgaagaatctattaatgaaaacaccatcgccctggagaatgaactgcctcgggcataccagcaggcagcgtttgcagataagtgtgtgacattttaccgaaaaccatcaaacagacagtag

SEQ ID NO: 122143 - DNA, 393 bp, Enterobacter cloacae
atgaaaaagataattgccggatgtgttgcggccatcgtgcctgtcacctcaatagccgcttctgtttcacttgatacagcagggcgttgttatgaagcaactcgccagtcaactcaaatggcgatgttgctggatccaaatgctgcggaatacaaaaatctcaacagtaatgccaaagagctatttggcacactctccggtggagtaggtgaaaaggactcaaagaaaattcgggatgcctggaagaccattctggataatgccggaatggaaggccgcatggctaaatctgatgggtatcgagaaatgaacagatatccccaggatgtgattatgcaggaggccaataaatgtgtccgtctggcaattaaagcagggttagttaaactttga

SEQ ID NO: 122144 - DNA, 396 bp, Enterobacter cloacae
atgaataaagatgaaaaagcgctcgagaatttttttgaaacaatggcaacggatttactcagcggccttcttgacgccaatgataatgaacagaatgcacatcttaaagcctggcttgacgcgccattcaatgtggttcccgaacatctcctccagcatgcagagatgatttgcaatcacttcaatgccggtgaaaacggacatttgttaatgcacggtattgatgatcaactggcagcaatgaatctttcccgcaaggaacgctttagccctataaaaaaagggatcgttggttatgctgcaccccgtgacctggagaaagtaaattcattgttaaaagtgattatttcttattacgagtgtgcattaatcaaagcgaagatgggtgctgattaa

SEQ ID NO: 122145 - DNA, 927 bp, Enterobacter cloacae
atggataagcatgacaaacttgggtatcgccttggattgatactgactcgccttaacaacggtgaatcggtcacggtgagtgggctcgctgaagagtttaatgtctgtgataagaccatccggcgtgaccttacgcagcgactggcttatctcaaccttcttcgcagtggtaagaaatatcaccttcccgttggcgttctgggacagcgcagcaatacggacttgcgccgctttacgcgtattctgggtattgacgggctatttccacgctgggatgaccgcctgttaggcatattgctgggcaatgccgaaaataatccgtttctgatcaaacagcgtccctatgaaaattgtggggtttttatgtctacgctgaacacattgtcagacgcgattcgcggcagcaaaaaaataagctttatgtataaaacgaaacgttacagcgccattgaaccctatcgtctcgtcagtgacagagggctctggtatctcgctgccattgagggaggtgtgctgaaaagtttcgtcatttcagcgatgaaacaggttctccccagtaacatgtcatttgccatgtcgctggaaattcatctgcaaatcgagaatgctgaaagtatctggtatggagcagagcttactgaagtactgatgtcagtttctgcacgtgtagccccatggttcttgcgccgtgcgctgttaccgggccaggaaattattcacacttccgcaaccggtgatttgctcgtgatttcacgggtggctcacttcggccaaattatccctctaatcaaatactggatgcccgaggtcgaagttctaaaaccagcatcgattcgtaatcaggtgacgcaagacatacgccttgcactgaaacgatacgagctgaatgaaagtacggaatcaaccggagatagccctaatgaataa

SEQ ID NO: 122146 - DNA, 2688 bp, Enterobacter cloacae
ttgctgagattcgtacagcccttgcctgatttccccttaattagcggtgtcgatattgacaccgctcacctgaataagaaaacacttatgtttgacatgaatgcactgctcgcagatgcggcgggagtgacgcaacctgtcgcccgctctgctaaaactcttgataactttccgttaataccgcaaaaatcaaaaaatcgactggacgtcagcagcgagctacatcttgatatcggctttgatactgaatatgtctataacccacatacaaagcaaaacgacattctgtcttatcagagctatgtcgtgctgcctgatggaacgggtgttcccggaatcctgtaccccgccagcgcccacaaaaaagatcgcctgtcgctgaaaaactttctcgcgaaaaccctgacgccactattgaagaatgagcagattaacgaatggccgggttcgattacgctgtatgctcatttcctgcgggctgatgttgcctcgtttgccgatttctggagcgatcacaaaatattgctgaaaggaattcgcagtacagtcagcagttttaaaaaccgctacggtattgattttgatgaagtcgaaactcgtcgtgaaaaaaacagcctaatcatgtttgataagcggaccagcccgtcccgttgcagcaatgtaacgtttaccgataccttgttgatcactccgggcggtatgggactgacggaatgtggtgaattacttggcctgccgaaactaaccattccagcaccttattcaatcagcgatatgcgccagtatttaaaaggcgatcgacgcggtttcgaggcctatgcagttcgtgatgccgaaattgccgtgcgctatgccttacaggtgaaatcgttctgcactgaaagtctgctgattgagcgcgtccccactacgattggtgcgatggctgtttcccggtttctcaaaaccattaaggaaagcggccagactcctgaagtctgtatgggaacctggacggaatcgcgccagcgctggaacccggacactcagggattcagaacgttaaaatcgacgcagagtatacccgcaagggaactctatgagacgttcgccatcaactgctatcacggcggtcgaaatgaatgcttcatgatgggcattacccctgaaagccaatggtatgactacgatttagcaggcgcttacaccaccgggctgttagatattttgcagcctgattacgataatatttaccagagccaaaatcctgaggaattttgcgggcataccatgggatttgggctggtcagttttcgattccccgacacggtactctacccctgcctgcccgtcagaaccgaccagtacggattgtttttccctttgacgggtgagtcatgggcgaccgccccggaaatggccctcgctctgtctctgggtgcggaaatgactattcagcacggtattatcatcccctggcgtcagtataaatctaatgattcctcatcaccggcagaaccagcatgctccgtgtttttaccctttgtgcaacaggtacgcgaaaatcgtaatcgccatgataaagggtctctggaggagaaattctggaaagagatcggaaattcactgtacggaaaactcgctcagggtcttcacgcaaagactgcatttgataccgcccgagggctgaacagccctctgccgccttcgtcagtcacccagccattttttgctgcacatgtcacgggatttgtccgcgcggtggtgggcgagttgatgaatgcactcccgccgaatgcaacagtggtcagtgtgactacagatggttttctgacggattccgctatcgagaatatcgatatgtctggcccgttatcatcacgttttcaggcgttatgcgacattgcggatccgggctcgtctatgctgacctgtaaacatcaggtccggcaacttgtcgccatgaaaacccgggggcagttgacctataaagaacttgcaggctacccaatcgtacacgcccgtgcaggagttaaaccccctgctgatattccccgcgacgactataaccgctatatggtggacctctatcttaacagggctccgggtcagaagcttcgcaggggatctctcatttcaacccgtgatatgtggttgaatgaaagcgaccttgtcgcagttgagtcggatatccggttaaatctggagttcgactttaagcgccaactgatcgcccccaccatgaatgatggacatttgttgatgtattcccgtccgtggaatgatatagcccaggcacttaagcaacgccaacttttcgatgactggcggcagacacacagcctgaaagatgaagctgactgggaagactggtgtgattttctctattgcagaaacgtttttacccctctgaaactgaaagtaggacaaaatcgaagcgatgacgtccttgttcgtcttttcctgcgggccctggctcaacatcaatgggggctcacgccggacgacagaaagcgacaaaccagtgttgagatagctgcatggctggtcgaagcaggctactctgtgacatccagtgatgttaaaaatgcaggccgggctaagctcccacccattatctttggttctctgacttcccgaatgactcgcctgatggaccatataatgctgaaatatcctggcttctcattgccctcggtaattttgtaa

SEQ ID NO: 122147 - DNA, 603 bp, Enterobacter cloacae
atgaaaacctcaaaaacactcagctttgactacttggttaacgccagcgacatacttatccctgtctctgatgtcatcagcatcagtctcgttgaaaaccgcctcaattttattagtcgggcgtgccgcctgctgcacaccgagtcttttgatacggatgaagcagcgaaaactgcgtttaacacctatgcccgcaacttcgaaagtaacctgcctgaagaggcagtctaccggggtaataactgcattgcccgacttaagttcgtctacggcgtcagcctgttccagaacgcagagcgggctatcctgacgctcactaaccgttatggcggaacactagtcagtgaatcagccaaatctgacactcttgatgaggcatttcaggaactggctaccactcttggtggtcgcgaatttgaaggaatgggctttcgttggttgcatgctaattgtcttctctcctcgcgactcttgccgatggtcgaaaagaccccgaacggcgtcgtcattaaagtcaacgataacttcgtatctttcgtagcaacgaaagacgatgctctaaaagagcaactgtttgctgagattcgtacagcccttgcctga

SEQ ID NO: 122148 - DNA, 189 bp, Enterobacter cloacae
atgtatctcaactgtaaagaacttgcacaacgctggagaatttcgcccagcacgatcgccagcgatatcacccgaaatccggccaagctccctccgttcatccggctgggacgtgctatccgttttcccgtggctgaggtggaagcctgggaacagcagcaactcacaaatacgcagacttcgcgctaa

SEQ ID NO: 122149 - DNA, 1122 bp, Enterobacter cloacae
atgtccattattgatctgcgtttcagcactaaatcacttcagcaactgccgcatccgacgactggttgccaggaataccgcgatattcactgcccccatctgagggcgctggtctatcccaatcaaatcacgctcgcgtttcgggcgaccatcaacaatcagcgtatttatgaaacgctgggcactttcccgcatcttgatattgaagatgcccgcctgaacactatgattcggcttggtaataaaaaacgccttgccatacagtcccgccgtcataccgtcgagcaggctatcaacgagttgtggattcctgatatgcagttatataagaaaagtccacagtctgaactatcgaagctcaatcgccatatccgtcccttctgggggaagcgtcgcctctgtcatatcaccccaggggaaatcgaaaaattcgccgctggcctacgaccgaaattaagcccggcaacaataaaccgccttctggctctgctctcaaagatatgctctctggctgtacgcgctgaatggataaatcattctccgatgacccacgttcgttatctgaaagagaacaacgtccggtatcgcacactttctgccactgaaattccattatttattgctgccgctgaggccctgaatacgcccgctgctgatgccatattgcttgcactctataccggtatgcgtattggtgaagtttgtacgctgaaatgggattactggcatccagatgcacagcaattacttcttccggatacgaaatcagggcacccattcacctgcccgcttgcaaatcccgcagtggtcattgttcagcgacaggcacaactggcactcagcacgacctggattttcccgcgcattaccgacacgactcgccagttgagctatccgcgtgaaacctttacccggatttgtcgggatgctcgcatacaaaacctgcgcatgcatgaccttcgccggacgtttgccacccgcgtgctacaggcaaccagcgatatcgccatggcttcccgtttactgaatcaccattcactcacggccacccgccggtatgcctttcataatgcagcagactctcaggcggtagtatcacaagtggttgatagttataaataa

SEQ ID NO: 122150 - DNA, 1128 bp, Enterobacter cloacae
atgtttgaaaactatcttgaacatcctgaccgacatcctaaaaatgctcaactgctctctaagtatcagaatgatattgataaattatccgaaattttcactgaggatgatttgctacatctgatgacacaagaacaaccggatggaacgcgtaagatgcgcccttcattagcctctgtcgagatattcgcgccctctgcatcaacatccaatcagattaatttttttcagcataccgattaccttgaaaaatggtgtgcgctacaacgtaaggagttcgagatattggctattaatatctatggccgtaaatcgattaaacaaaataaaatcccagttaaaaccctaaaggaaattgacgcatttctggagatattgctggataaggcatccaaggactcgacacatccgtttttctcatttttaaattccctcaatactcttgtggatgaaaaaatatatcaaaataatgaatctgaccattgggatggaaaggcttcaatgcttagccataacagtaccctcaaggaaacatgtgaaagcatcactaaatatatcacctcgtcagatttcatcaaatctctcccggaagtttcaaacctagaacctctggataccgcactcctattctttgcacgactttgtgatgagttttattttaccttcctgtttaaaacaataggcctaatgaaaaatactgggcttattaaaaacaactatctcaaccatcctacaatgattcaattgattacgcttgcaatgataccctgtgaggttatgcgacctgttattaatgaaaatggctacacagccactttaaccaaccctgacaagtttatttttaatgaaaccatcccccgagataaagaaaacatgacagggatacaaaaaaacataaaccagattttacacaagacctatatttacattgcactacttttatttcccacatggaaacccacagccaaagaaatcatcctttttcttgaaggcaaaagtaaaaccgttaaaggattattagatctaaaatcgactgctctgggactaccttcaaagattaacgatgtaggtcgtctcagcaaagaggaatatgtcacccgattactatcacctgctcagactaaatga

SEQ ID NO: 122151 - DNA, 1524 bp, Enterobacter cloacae
atgaacgacaaaatcagtcaggacacgatcaacaaagccctgtgggccgcgtgtgatacgttccgtggcaccatcagtgctgatacttacaaagactttatccttaccatgctgttcctcaagtacatttcggatgtctggcaggatcactacgacgaatataaagagcaatatggtgatgcgccggaactgattgaagccatgatggcgaacgagcgttttgtgctgccgaaaagcgccagtttctatgcgctgtatgagcgccgtcatgagccgggcaacggcgagcgtatcgatcaggcgctgcatgcgattgaagaagccaacggcaccaaactgaaagatgccgggaaaagcgtgttccaggatatttcgtttaacaccgatcgcctgggtgaagaaaaacagaagaacaccatcctgcgccagcttctggaagactttgccggtgaagatcttaacctgaagccaagccgtgtaggtacgctggacgttatcggtaatgcctacgaatatctgattaaaaactttgccgccagcggtgggcagaaagccggggaattctatacgccgcctgaagtttcggacctgattgctgaactacttgatccacaaccgggtgataccatctgcgacccggcctgtggctctggttcgctgttaatgaagtgtggacgtaaaatagtttccgggcatgacagccgtaactatgccttgtttggtcaggaagcgattggttctacatggtcgctggcgaaaatgaacatgttcctgcacggcgaagacaaccacaaaatagagtggggcgataccattcgtaacccgaagctgctcgataaaaatggcgacctgatgctgtttgatatcgtgaccgcaaacccaccgttcagcctggataagtggggacatgacgaggccgagaatgataagtttggtcgtttccgtcgcggtgtaccgccgaaaactaaaggggattacgcctttatatcgcatatgatcgaaaccctgaaaccgggaacgggtcgtatgggagtagtggtgccacacggtgtgctattccgtggctccagcgaaggcaaaattcgtcagaagctgattgatgaaaatctgctggatgccgtcattggcctgccggaaaaactgttctacggtacaggtattcccgctgcgattttgattttcaaaaagcagaaagtcgatgataaggtgctgtttatcgacgccagccgtgaatttaaggcgggcaaaaatcagaaccagctcagcgcagaaaatatccagaagatcgttaacacctatcgcggtggcgataacgtcgagaaatacgcttatcttgcgagcctgaaggagattcaggacaacgactataacctgaatattccgcgctatgttgatacctttgaggaagaggaagagatcgatttgctggcggtgcgtgctgagcgtgagctactaaaagcggaactggcgaaactggaaacggagatggcaggttatcttaaggagttgggttatggtgcctaa

SEQ ID NO: 122152 - DNA, 1311 bp, Enterobacter cloacae
atggtgcctaatacttttaaaatcaaggctatccaagatttttgtcagattattgattgcgaacataagactgcaccctacgttgaaaaatccgattttctggtagttagaacaagcaatgtaaaagacggtcgcttgatctgggatgatatgaaattcaccactcagaatggttatgaagagtggacgcagcgggcgatcccagagtacggcgacgttttatttacgcgtgaagcacccgcgggtgaaatctgcctcgttcctaaagatataaaaatgtgtatgggacagagaatggtattattgcggcctgtccctgaaaaaattgatcctttgtatttttctttggtgctgacatcaaaaaaaataaaacttgatattctcaaaatatcaattggttcaacagtatccagaattaatatagaagatattaggcaactgaaagtaccggtcccccccctggacgaacaacgaaaaatctccaaaatgttaaatgcttgggagcaggcaatactcattacagaaaagcttctcaccaatagccagaggcaaaaaaaagcacttatgcagcaattgcttaccggaaagaggcgctttgggtgggaaggtggctatgcctactcggtacctcaaggttatgcaaaaagcaaactgggagctttacctagcgcctggaaagttgatcttttagaaaaacacttgtggtttcaggaagggcctggggtgcggaaccaccaatttacagaaactggaattaaattattcaatggtacaaatatccagtttaataaaattgacctcactaatacaactacgcatatttcaagtgaggaagcattcggaatatacaaacattttctcattgatgaaggggacttgctaatagcctgctctggtatttcagtggacagatttaatgaaaaaattgcatttgcgttaagcagtcatttaccactatgtatgaacacgagcactatgcgttttaaagtactcgataaccatatcttagatataaggtatttccagtactttatgcagtcacttcttttcaaaaatcaaattagaaggcaagcaacaggttcagcacagctaaattttggaccatctcatgttgggaagtgcttcgttgttattccttcaattgaagaacaacaaaaaatcgctgccgtcctgtctgctgctgacgctgaaaccttcacgctcgagaaaaaactcgcttgcctgaaagatgagaaaaaagctctgatgcagcagttactgacagggaaacgtcgtgtcaaagtagaagctgaagaagccgttagcgcttaa

SEQ ID NO: 122153 - DNA, 3285 bp, Enterobacter cloacae
atgaaccagacgtacacgccaaagttccaggaagaatacagtgccaaaattccggcactgacgctactgtccagcctcggttggtcgtttttatccccgaaacagattatggattatcggggctataaacaggatgaggtggtgctgcgcccggttcttcgtgaggccttgtcgaagcgttcctttatggcaggtggcaaaacctgccagttatcggaaaaagcgctggataacctgatatcgcaggtctgttctccggcgctcaatgaagggctgctgaaagccaatgagcggatgtataaccatctgctctacgggatcgccgtgaccgagtttgtcgatggtaagaaggtcaaccccaccattgcgctgattgactgggaacatccggaaaataatcagttccattttactgaagaatttacggtattgcggtcaggcggtattgaaacccgcagaccagatattgtctgttttgttaatggtatcccgctggccgtcattgaagcgaaaagcccggctggtcacggcaagaaagggccaaccattgacgaggggatatcccagagtatccgaaatcagctcaatgatgaaatcccgcagctgtttgcctacagccaggtattactgtcgattaacgggcatgacgggcgctacggtacctgtcatacaccaatgaaattctgggcggcgtggagggaagaagatattaccgatgcgcagatgtatgcgctgcgcaaccataagttatcgacggaacaaattcatgcgttgtttgatcatcgtccttcagccgatctcgactggtatcaacagctaatcgccgctggtgaactggctgtcagtggacaggataagctgcttatcagcctgctttcgccggaacgtatgctggagatgactcgcttcttcaccctgtttgataaaaagaccggaaagattgtcgcccgctatcaacaggtgttcgggattaaaagactgctggaacgcatcagtactcgcagaccggatgggggcagggaaggtggggtgatctggcataccacggggtcaggtaaatcgtacaccatggtgttcctcagtaaggcgctgatccttcatgacagcctgaagcagtgtcgcattgtggtggtgacggaccgtgtcgatcttgaagggcagctcagcggtactttcgcttctggtggagaactggccgggaaggatgataaggccaaagcgatggcgacctcaggtcagaagctggcacagcagattggctctggtaaagaacgtataatctttacccttatccagaaatttaactcagcgacaaaattgcctgaatgcgtcaataccagccccgacatcatcgttctgattgatgaaggacaccgcagccagggtggtgagaaccatgtgcgaatgaaactggccctgccgaacgccgcctttgtggcatttaccggtacgccattgctgaaagaagataagaccaccaataaattcgggccgattgtccacgcttataccatgcagcgggcggtagaagatcaggctgtgacgcctctgctctacgaggagcgtattccagaccttgaagttaacgaccgggcaatagatgcctggtttgaccgtatcaccgatgggttaagcgaagcgcaaaaagccgacctcaagcgtaaatatgcccgtaagggtgaggtttacagtgcaaatgaccgcatccgtctgatcgctctcgatatcgccacgcacttttcgaagaatattaatgacgggctgaaaggacaacttgcctgtgacagcaagatatccgccattaagtataaaaagtatcttgatgaagccgggttgtttgaatcagcggtggtgatcagtccgcctgatacccgtgaagggaacaccgaggtagatgaaagcaaactaccggaagtgacgaaatggtggaaggataacatcggtacgcaagatgaatccgtatatacccgtaatatcatcagtcgtttcgataccgatgataagctcaaattgctgatcgtcgttgacaaactgctcaccgggtttgatgaaccgaaaaataccgtactgtatatcgacaagccgcttaaatcccataatcttatccaggctattgcccgtgtaaaccgactgcatccactgaaaaagtttggcctgctgattgattatcgcggcattctggctgaactggacacgacgatcggtaaatatcaggatctcgcctcccgaacgcagggaggatatgacatcaaggatattgacgggctgtacagcgccatgagctctgaatataagcgtctgccgcatctgtataaccagttgtgggccatatttgccggtgttaaaaacaagaatgatactgagcagttgcgtgcagttctggtgccaaaaatggaagaacgtgacggagagatggtcgatatccatcagaaaacccgtgatgatttcttcgaggcgttaacggcctttgctggatgcctgaaagtggcactacagtccgccaccttcttcactgacaagagctttacggaacaagaccgaaatctctataaagaaaccgtaaaacagatgtccagtctgcgccagtgggcgatgcaggtcagtggagagcaggtcaattatgacgactacgctgagcaggtgaaaaaactgctggataagcatgtcaccggcgttgaggttcgtgaaccggatggcgtgtatgaagtcggtaaaatgggcaagagcgaaaagcccgaagagtgggataacaataaaacccgcaatgaaaccgacatcattaaaacccgcgtgacgaagatgattgagcaggaactgcgtgatgacccgtatgctcaggaggctttttcaaaacttctgcgtatggcaatcgaagaggctgaaaaactgttcgaccatccactgaaacaatacctcttattccgtgagtttgaagaacaggttgaagcccgtaagctcagcgatatcccggatgcactggcggtaaacaagcatgctcaggcgtattacggtgtatttaaaaaagagctgcctgaggtttttgcggtgaacgacactcaggtgcaggagaagtggacgaagctggcttttgaagtggacaacattatcgtcaaagcagtggcagaaaattccctgaaccctcaggatattgagaaggttgttaagacgagtttgttaccgctgctgtttacggcctgccgggaaataggggctggaatgatccaggtaaatcgtattgtggaaaccatcatccaaatcctgcgcgttggtttgatgaaatcatga

SEQ ID NO: 122154 - DNA, 732 bp, Enterobacter cloacae
atgaaagcgctccgcattgtttatggtgatgaggtcatcgtcgtacagtgtgttccgcgtcaggtcgtaaagggcagggtgctcatcaaggtttatccagactgccgggttgtggcctctgtaccgccagaaacacctgagcacgaggtgctgtctgcgctgaaaaaacgagggcgctggatatttcagcaactgcgtgatttcagggagcaacagacacacattgtcccgcgtcagtatgtcagcggagaaagccattactatcttggcaagcaatatcagttgaaagtgacagaagacgctactgcaccgcaacgagtgaaaatgttgcgtgggcgtctggaagtgatggtcagacacaaatcgacagaaaaggttaaagcgttgctggctgaatggtatcgggaacgcgccagagatgtcttccaacgcagactagatttattgataccacagaccctttgggttagtgagcgtccgccgatacgtttgcgggcgatgcaaacgcaatggggtaactgttcagcaaaaggctgtctgacactgaatccatggctggttaaggcatcttcagaatgcatcgattatgtcttgttgcatgagttatgccatgtggctgagcacaaccacagcgaggagttttaccgtctgatggggcaagttatgccgggctgggaaaaggttaagaagcgactggatggtatggcggggatgttgttggctgatatgtaa

SEQ ID NO: 122155 - DNA, 1839 bp, Enterobacter cloacae
atgagtaagttagataataaaattgaagcacgccattgtaatttgtttgatgttctaaatgcgcaaaaatataccgttgattactttcagcgcgagtatagctggggtgagaaacatattgaagagttggttacagacttaacatctgcgtttctcaatgaatacacagtcggtgattctcgggagcagggtgaaaactacaataattattacttaggaccatttgttgtgagtagtaaagatggaaaacggagtattattgatggtcagcaacgactgacttcattaactttatttctaatttacctccataaccttcagaaagaacttaaatatgaagagaaaatagaatcaatgattttctccgagctacgtggcagcaaatcattcaatatagtagttgaagacagaattccttgcatggaagcattgtttaattttggtagctatagtttagttgatggggatgatgagtcaacccataacatggtggagagatatcagaatatcacagatgcttttcctgatgaattaaaaggtcaggcttttcctttttttatcgactggcttaagtataacgttattatggttgagatagttgcctattcagatgaaaacgcatataccatctttgagactatgaatgaccgaggattgaatcttactccgtccgaaatgcttaaaggttttttactttcacgctttcatcagggagataaacgccaaaaggcaaatgaactctggaaaaaagcgatgatggatttaaaaaactatgacaaagatgaagaccaacgttttttccagtcatggttgcgtgctcaatatgctgatacaatacgcccgggtaaagctggttcaaaaaatgaagactttgaaaaaataggtacgcgttttcatagctgggttagagataatcttcaggcagtgggattggacccagataatggtgagacattcgaacgatttatacaaaaaaactttttgttttatttgaattcctataaacaaatactgaatgctgagagagcattaacgcaccaactggaatatgtattttatatccaccattggggtattgcacctactttaagtttccctttgatgttggcttcattaaatgtaggtgacagtcctgaggctgtgatagccaaaataaacctggtggcgcgctatattgaaacgtttgttgttcgtcgttctgttaatttccgaaaattctctgccagttctattcgttacacaatgtacagtcttgttaaagagattcgtggtaaaagtattgaagaattaaaagatttgttatctaagaagttatccgaaatgtcagatacttttgcaggaatggaagagtttcgtctccatggtcaaaactatcgttttgtaaagtttttgctttctcgtataactgcgtgggttgagcaacaagccggaatgagtacaaccttcattacatattatcagccagaacacggtaagccatttgaagtcgagcatatttgggccgataaatatgaacgttactctgatgagtttgaacaagagcacgaatttaacaattacagaaatcgcttaggtaatttggttttattacctagaggctcaaaccagtcatatggtgatttgtgttacgatcaaaagcaacctcattacattaaagagaatctcctggctaaatcgttatgcccattggcatatatgaataaccctaatttcaatcagttgagaaatgtattcggagtgcctttcaaatcacatgattcatttaaaaaacaagatgtcgatgaacgacagtcgttgtataaaataatttgtgagaatatttgggctgataatttatag

SEQ ID NO: 122156 - DNA, 1182 bp, Enterobacter cloacae
atgatttatcagtgtgatacttgcagtagaacgacttttgagattaattgtccatggtgtagcggcgtttcacctgtgaaaacgtctgcatggggttcagcatcatcgactgcacaagcaatagatatacaacgtatgacgccattgaatccatctttttatcccgagtttcagtatcgttctaagggtatgctgaaagatctgtttgggaaaaagaaagaacaaactcagcttaatcaattgcttgaaaatgttctcgaaaaatactccagtttaaaagatccatattttactaacttcatttacacttccagattctcacataataataaatcggaagcagattactcaacagataatggtacatactccgaattacaacttttccgtgaggtgttggtcaggaaagggttcaatgagcttgagcagttacctgagctattagataaattactccttaccacgtcatttaacgctctttattatggtttcgctaaggaagttaaacggcatattaaatccacactgactgaatcgttgaagtcatggattgaggaagcaggcaccacttttcgggcagatctttcattatttctattctatatatggagtaataatatagagttctcatcagtagagttcaatgaaaaagcggaggccacgcctggtgtccctttggttttatttgatgaagttaaaaaatacttggctgtgtgcgaacgtatttattttgatattctggttgatagattagctacacgccttgagcattttaaccctaataaattcgtcaccatgtatttagttgatgcgatggacggtttccagttcgaagatttccttgtggaaatattccagactatgggttatgacgtcaaagaaaccaagagaacgcaagatcagggtgcagatctcttcgtcactcgatttggtaaggatatggttattcaggcgaaaaattattctggttctgtaggtaactcggcggtgcagcaggtgatctctgctaaaacgttctatggttgtgatgaggcgatggttgtgactaattcctacttcacacgctctgcgaaagagttagctgaatcagccttggtacgtctgatcgacagggatgaactgcaaaagtatctggatgattacaatcaaaagataatcgaagatttccagtcaaactcataa

SEQ ID NO: 122157 - DNA, 1770 bp, Enterobacter cloacae
atgttgaaattctctggtacttttcaagagcttagtggaaaattagcttcactcaatggtgagtgggatgattcacaaccgaataaaaaagttttaagactaaatggcggtgtgatgaactggtttgaatcaacgggttctatcagttttcagggaagagaaccggggaaattagcccttgaatctgaagtacctaaattactatacccaacagaaccaatggctataaggccacaatcctcagcattatctcctgatgcgttgataaagtctcaatgcaatgatgaaaaagattcttcagtagagcgccaatatcttactactgggatcaacgatggcgaactcgtcattggtattgtgagtgctgttggaacagaatataaacgagttactgaaccattaatcgaccgtttgaaagggtttggttattcggttaaggaaattagggtgtcgagttgtttgacaagtacttcacaaacggatgagtatgaacgtattcgacactacatgcagttaggtgattctttgcgaaaaagtatgggtaataatgccatattagctgcaggggtagcaaagaagatttcagagttaagatccccgacagatacaaagcgagcctatatagtcaactcacttaaacatcctggtgaagttgagttcttaagaaaagtatatgggggaggattctacttaataggtattcatgcagatgagaaacggcggcatcagcatttaaccgatgataagggaatgactcaaagccaggctaatgatctaattcgtattgatgaagatgaatcaattgatcatggacaaaaaactagagatacttatcaccttgctgacttttttttaaatcttggcagtaataatgaccaggttaagaatcgcttgcaacgatttttagaattaattttttcacacccttataaaaacccgacatttgatgagtttgccatgtttatggcttttaatagctcagttcgttctggtgatttatcacgccaagtcggtgcagtgattagccgagatacacaaataattgcaactggcgctaatgatgtacctaaatctggtggaggcctttactgggctgaagtgaacgaagaaactggaaaagttgaagatcaaccagacggaaaggactatacaagagaaggggactcaaataaacatgcgcagtcagtcattatccaagaaattgcgacgaatcttttaaaccaaggcctagtagatagtttgcgtgaacttgatcttaaaaaagcacttaaggaaagtaaaatatctgatttgactgaatttggccgtgttgttcatgctgaaatggatgcattgttatcttgtagtcgtgctggtattcctaccacaggttcaacactttattgtacaacgttcccatgccacaattgtgcaaaacacattattgctagtgggattaaacgcgttgtctacgtagaaccttaccctaaaagtcgtgcgttagatttccattctgaatcgatccatctaagatctgaattggaacgcacacttaaagataataataatctagtcagttttgaaccgtttattggggttggaccacgtcgtttcttggatcttttttcaatgagtcttggcagcggttctaaattacgccgcaaggataagggcggtggtatccttgattgggataaagcatctgcccccattaggacacctttaatatcaaagtcttatatagaaattgagaaagctgctgctgagatgtgggatgagtgctcattttga

SEQ ID NO: 122158 - DNA, 630 bp, Enterobacter cloacae
atggttgaggatgtcctgccctgggagcagatgaagctgcggatgctgaacggcagccactccttcctcgcgtatctgggctaccttgccggctacgcgcacataaatgaatgtatgcaggacgacagtttccgcgaggcggccggcaggctgatgctgaaagagcaggcccctacgctgcgcatcaccaacgttgatctgacagcctatgctgacagcctgcttgaccgcttcgccaacccggccctacagcatcgtacatggcaaatcgccatggacggcagccagaagctgcctcagcgcatgctggaagggatccgcatgcatcttgagcgtaacaccgcctggccattactggcgctgggggtggcgggctggatgcgctacgtcagcggtacggacgaacagggcaacgccattgacgtacgcgatccgctgagcgacaagtttcaggccattgtcgctaccagcagcgacgcagaacgcgttagcgccctgctgacgctaaatgaaatctttggcgacgacctgccgcaaaaccctgtctttgtcgaggcaatcaccagcgcgtaccagcgcctcgtccggctcggcgcgcgccaggccgttatcgaaacgttaaaaatttaa

SEQ ID NO: 122159 - DNA, 1092 bp, Enterobacter cloacae; identical to SEQ ID NO: 115972

SEQ ID NO: 122160 - DNA, 300 bp, Enterobacter cloacae
atgaaaatagtaagtaagctcacctttttaggtatcatacttttcttttctataaatgcctatgctggtcaattagatagtagcgggctacttgatactttattagataagtttcaacaaatagccagtacatggacagcagtaattgctgactatgcaaattggctcttctgggggctggtattaataagtatggtttggacatttggtatgatggcgatgcaaggggaagggttgacaggggtacttgctgaaatagttcgcttttttgccgtcattggtttttttattatcttttaa

SEQ ID NO: 122161 - DNA, 1866 bp, Enterobacter cloacae; identical to SEQ ID NO: 113939

SEQ ID NO: 122162 - DNA, 990 bp, Enterobacter cloacae
atgtcggtggcgaaagtgaaatcgcttccctggttaaaaatgacggtaccgttgttggtgagcccaccgctgagggtcgcggttttttcgccatcgcccagttgcaacgaagcatctttggccacccgtgtattaccggtattcgataccgcgcctgacagggttaacgcgcccgtgtctatcagcaaggaatcgccagagccaataatatcgagatcgcccgacagcgcccaattttcgcccatcatttttatactggcaaaaccgtcgccttcgttcagacccacaaagttactgtcttccgtaccggtgccgatcagggtgagagtgtttcccgtggaattggtggaaataacgtcaccgataagagtggaacccgtatcaagcaccagggtgttatttttattgctggcaaacataacagcggctgtatcaccactaatcgttccgctattcgtgatatctacttttgcattattcgttacattaaaaccgtattgcgcaccctgcacgttaccagtatttatgaccttagtgttaccctcgctcagagcgattccatcattcgctgtgccagtgatcgtacccgcattattaatggcaacgcctgcaagtgcgttcaggccagttttacctttaataactccggttgtgctatttgaaatacttacagccgatgagttttcactaacgaatataccatcctcaaaagcggttatattcccacggttgctaatttcaccttgcattgattcaatactaatagctgtagccgatttcgatgtgatggcggcaccttcctcgttattcaccacaacacgttgcgcggcagtatttatatccaggccagtttccctaccggaaatattcccttcgttagtgatattattgatagtaaacccagtgacagataccgccgcttcactatctgcggaagatatcgtcacgtctttattaataacatattcagcatcggctgagaaatcttga

SEQ ID NO: 122163 - DNA, 153 bp, Enterobacter cloacae; identical to SEQ ID NO: 114632

SEQ ID NO: 122164 - DNA, 219 bp, Enterobacter cloacae; identical to SEQ ID NO: 114627

SEQ ID NO: 122165 - DNA, 561 bp, Enterobacter cloacae
gtggcgcgcctgtgcgggctcagcatctggatcctgatccgcatcctgaaggatgagctgattctggcctactccacggcaagctccgagagcgtactgccgcgtatcattgagaagatggaggcctacggtgcgccggcgtccattaccagcttcgtggtgccaacgggttactcctttaacctggatggttcgacgctgtatcagagtattgcggcaatctttatcgcgcagctgtacggcattgacctgtcgctgtggcaggagatcgtgctggttctgacgctgatggtgacttcaaaaggcatcgcaggcgtcccgggcgtctccttcgtggtgctgctggcgacgctgggcagcgtcggtattccgctggaaggcctggcgtttattgccggtgtggaccgtatcctagacatggcgcgtactgcgctgaacgtggtgggtaatgcgctggcggtgctggtaatctccaagtgggaacacaagttcgaccgtaaaaaagcgctagcgtatgaacgcgaggtgctgggtcgttttgataaaacggctgaccagtaa

SEQ ID NO: 122166 - DNA, 234 bp, Enterobacter cloacae
atgaaaaatatgattctttgcctggcggtagcggtattgctctccggttgcgctggcgttattgagaagcagcaacccgtatgcaccggaacagccctggtcggcggacaggaaagcagcgtccagatctacggagtccgtaaacaaaacaatcagacgcagtaccgcgccggttatccctttaactggtcatgggtgagcgccaacacgttcaccagcaccacctgccactaa

SEQ ID NO: 122167 - DNA, 315 bp, Enterobacter cloacae
atggcggaatatggtgttcagacatgggacgcctcaggcaatgttaataattatggcgttaagcctgtcagcgtttgtggctatctccagctggcccagaaccagaaaacaggctcttacaccgtagcgcttccaccgggttgcaggctgacctattttcagagcatgaacggcgaccagtttggtacgagtcggaggaagatcaccatttcagggggaaccgcaacagtgtcagcagtaggcgataccgactactcagcagggactgagcctgcggcagcggcttatctcattttccagatcgagagggcataa

SEQ ID NO: 122168 - DNA, 198 bp, Enterobacter cloacae
atgtcagaattgaaattaaacgctattgactttatttcttttgcggtcgctggaaatacatttaaattaaaagctaatttgattggccctaatgaccaatttcattcggtaaacctagatatagcgccagatgagataaagaataaaaccatcggtgagattgaaaaacttgctattcaagccttgcgttcagcttga

SEQ ID NO: 122169 - DNA, 156 bp, Enterobacter cloacae
atgactttagaacaacgtgttgaagagttagaggctatggttgattcaatgaaagcacagatggaagaagttattagcgctcacacctgtgcttataatcaaatcactgcgaaattagatcaaattgccgtaattcaagctgaacgcaaggcttga

SEQ ID NO: 122170 - DNA, 3174 bp, Enterobacter cloacae
atggccgagaacgtaggcgatattgaatatgtaattaaggctgatacggctcagttgctacgcgctgacaagcaggtgcggaacgtaaccgacggcatggaaggtgggttcaaccgcgcagacaaagctgcatcatcgctgagctcctccttcggcagcctaagccgggttgccacttctcttatggcaattttgtctgtgcagcaggtggctcaatacgctgacgcatggacgactctgaacaacaaactggcaaacgcccttcggcctagcgagcaactggttgacgttactgagcgagtatttaatatcacgcagcaaactcgcggcagcctcgacgctacagcttctttgtatgcaaggctggagcgagcaaccagggaatatggaaccagcgctgatgatctggctaagctgactaccatcatcaaccaagggtttgttgtctccggtgcgaccgcgcaagaggccgaaaacgctattatccagttgtctcaggggctggcttctggtgcgctgcgcggggaagaattcaactctgtgaatgagcaggggaaccgcctgattgtggcgcttgctgactctatgggggttggcattggacagatgcgtcagatggctgcggccggaaagttgactactgatgttgtggtgaacgggttactttcacaaggggtgacgatcggcaatgagttcgccaatacaaccacaactatcagtcaggctttgcaggttgccggaaacaatatcaccaagttctttggtgaaaactctacggttaaaaccggtacagcgattttcaacgacgccgtaatcagcgtcagtgagaacatcggcgctttaagcgccattctgactggtgtcgcagcggtaatgggaagtcgttacgttggcgctctgactatggcgaccgctgcaaaagttaaggctgctgtggcttcaagaaatcagtcagccgctgaaatgcaggccgcacaggcggcggcaaacaaagctacagcagatctccgcgctgccgccgtcgcaaaagaacgtgcgctggatgaaatccgccttgcggaaatgatgcagcagacagccgttagtgcaacgaacgctgccgctgctgagcagcgtttatctgcggcccgtatagcagcagctggagctgttgataattacaatcgcgctctggcagcaaataaggcggcacaggctggattgtctaccggggctggtttggttagccgaggattgtctctcatcggtggtcccgctggcgcagcgatgctcgcggccagtgcgattctatatttctctcagcgagccaaagaggccaaagacgacgcaaataacctggctgatagcgtcaatgatctgagcgccaaattccagaccatgtcgcataccgagcttgcagcaaccattggcaagttgagccagaatctgccaacccttagcgatgcggtagccgacgcacagaaagaatttaacgacgctacagctgctgttcagaggcaagaaagggagatcgcaaactggggaacgaacactactcgaggccgtcaggccgctgaagcattaggtggtgcccaggataaattagcgattgcaactctcgagcttgaacgtgcgcagaatcgccttagccagacgcagaacgctattaacataggacgcgccacgctcaatggcacgatgaggcaagggattgacctgcttcgccgggatggtgaggaagcgggtgtcgccgccggaatgatgggcaagcttggcgatatgatcattttcgccgccaaagcgaaggagaaatataactcttccagtctgatggttatgcgcagcgaggatggagataaactcctgtccagccttgaaaagcaaaacaatctgctgtccataacagacaaaaaagaaagggctgtagccgaggccagacaagcggccctggatgcgggggtggatgcgcattcaaatcagatgaggcagattgaagaggctgcggcaaaaagatatgaccttcaggaggctgattcagcagtaacaaagtctacaaaagagggaactaaagctgttgatgaggctgcgcagtcactttcaaggcaacaggctgctctcgatcgcctgaacactggttacgccgatggctcgctcgaattagcgaaatacgatgctgttgttgcgcttggtaacaaagcatcagcagagcagatcgccaaagcggaacagaaagcggagtccatctggaaagtacagcaggcaaccaaagcggcggcggaagaggaaatgaagcgcacacaggcgggtcaaaactttaccgggctacaggggcaggtatcaccagttgccgcagtagataacatctacgcacagcaaatggcgcagcttgacgagtatgtgcaactctacccacaaaaaattgcagaagcagaagccgtccgtgcaggaattgaagatcagtatcatcagaaacgcatggccgcaatgtgggaggaatggcagaagcaaagcgagattaatagcatgcttggcgcggctgtagattcgcttcagggcggggcgaccaatgccataaccgggctgattaacggcactcagagccttcaacaatcactggctaacatcggcactaccatccttaacagtgttgttggcagctttgttcagatgggcgtggagtgggttaagagtcagctaatggggcaggctgctgccgcggcatcgctggcatcgacaatggctcaagcgactgccgctgcttcagcatgggcccctgctgcaataagtgcttctatagcaacaatggggagtgctgctgctgttggtcagacggcctatgctggctcactcctggcggccaaaggaatggcggttgctggtgctcgctacaacggtgggccagtcgatgccggttctatgtatcgcgttggtgagaagggtaagccagagatatttcagaccagcaacggtagccagtacatgataccgggtgacaatggtcgggtgattagcaatcgggatatgcagggaagtggcagtggcggcggcagtgtggttcagcacatcacttttgaaatcaacaccaccggcggcatagatgatgccactatggcgaagatgtcacagatgatgaagcaggtcagcctcaataccatccgcgaccaacaacgccctaacgggttactacggaggtaa

SEQ ID NO: 122171 - DNA, 522 bp, Enterobacter cloacae
atgaagaggttggtttcgattgctattttggcgatggcgctatcaggctgcgggcaagatactgcaacagacaaagtagagaagttcataaaaagcaaagacataagtatgctttcaaaaagcaagatttcacagtgttcagaaaatttcgtcaagaattttcattactttgatgaaaacaccttaccatcaaccaataagtattacgaactgagtgaatacgtatacggaaaagtgaaatttgaaccagtgagtgagaagtcagtcggtgatgccactgaggtaatgatgaaggttagtattccaaagccaatagaggatgcaaaatcattcatttttgctgatgaaagtaacgcttccagtgaagaaatatcagtactaaacaatttgcttgctctctataaacgaggcgacttgaaagatatgcaatactcaaccttcgatatgaaatgggtagtgctttcagatgggatagatccgaactttacacccgaacagataaaaatctgctcacaaaaataa

SEQ ID NO: 122172 - DNA, 276 bp, Enterobacter cloacae
atgaaaaaactaccaattattgcgatctgcgttgcactcctcgctggttgcgcaggaatcatggagaaacaggaaccgatctgtgaggctgtggcaatgctcggcgggcaagataccaccgtgcagatttacggagttcgcaaagtagccaaccagacccagtatcgcgccggctatccgttcaactggcagtgggtatcaaagaacaatttctccagtaccacctgcgataagaagccagaggttcgtaacgaccttccaaccaaatctgcctga

SEQ ID NO: 122173 - DNA, 531 bp, Enterobacter cloacae
atgcactatccaaccgtatctgtaaacggagtttccgttcgcgttgatgacgaagggcgctacaacctcaatgatcttcacgctgccgcagtggcaaacggagaggcaacagaacagcagcgcccaagtcagtttttgcgtagtgctcaagttaagcgcttcataaaagcactaaaagccaaagtgcaaaaaagcactctggaacaaattcaaccacttaatgttattaaaggtggggatgaaccaggcgtttggggtgttgaactgttggcgatccgttatgccgcatggattaagccggaatttgagattgaagtatatgaggtgttccgaacggtggttcgcctcggcatcagtgccatgtcccgcctgaacaaaattgaccacatcatcaatactgaaaccaagcagatcagccaatgcgccagccagatggccagatggggttccggcggccgcaagcaactactgaacgcagcgcgtgatcgcgttgctgatgaggtgcaaatgtatttgccgggtatttactga

SEQ ID NO: 122174 - DNA, 654 bp, Enterobacter cloacae
atgaaagcaataaccgatatcggccaggccattgtccgctctgggggcaaagagatattcctcaacccgtcattcctcgccatgtctcgtattgggtcgccggaacagattgttgatgctttcgtgaaggttcatgccgggcattacccgaaacaccgaatctccgatactcaaatcctgaaggcggccaatgcccgatgctttgctgaaatggcagcatctgcggcaaacgtagtacggaattgctctgagggtgatattgcagaggtgattggttcgtactcggtgaacgcagaaggacggctgctgttcaagcctggggttatcccaatcgaggatgttatccagcttgcccgccacctgattctgcatggcgtaatgggcgatcagccgccggaggatttcgaaggaaaaaaaggcgaatacagtgacaaattcgatgtacggtcattcgtctacaccgctgttgctcacctcggcatgagcgagtctgatgcctggaacatgacgatgaccagcttccgggctgccatgaatgccaagttcccgcaaaaggataaaggcaaggtgccaacccaggagaaatacgacgaagttatggactgggcagagcagatgctggcaatggatgcacagaggcatggtccgcattaa

SEQ ID NO: 122175 - DNA, 735 bp, Enterobacter cloacae
atggcgtgtgaatcgggcgcttttaccgggcgcgacgtcgtcgtttattacgcgattggatgccctgaagtacaacccgccaacggcgactataagcgccttggcatgatgcgcgggaagactgtttccgccgaatgggataccgcagacgctaccgctgatatgagtgcggcgtatacgcaggaaaatctcgtaacctacaagaacatttcgttctcaggtgacggtgtgacccgcaaagaggatgtttatgcgcagaacgcgcttaagcgtcacgtctacaacccgccagcagagaccagcaaccagccgtatgtgtggttcaaaatcatctctccgaacgatatcaccgaagggccgttcatggtgacatcatggggcgatgaggcgccgcacgacgacgttgccacctggtctgtcgaagcgtccagtgccggtcaggttgacgtgcgtgatgttggcgcggtaatcaccattaccactcagccgcaaaaccgcacactgaccgtaggtgacgcgctgaacctgtcagttgccgcgacggtttctgatggttctacgctggcttaccagtggcagaaaaacggcagtgatatctcaggtgcaacatccgcaacgtacaccaaagcgagtgtgattgctggtgatgctggctcatacacctgccaggtgtcatccaccacggcgggtaccgtcacatccggtactgcgacggttgttgtcaacgcagcctga

SEQ ID NO: 122176 - DNA, 387 bp, Enterobacter cloacae
atgacgcgtagcgaggtgtatgacgctctgagagcgtggctgcagtcccacggttttgatgtcggctatcgcgtccagaaacgcttctggaacgagcttgaaggaactgaaggggaaagataccttgtcatccagcagaacggtggcggcaagccagaagaagcgataacccgcgattatttccgcatcctcctcctgtcatgccataacgacagcaatattaacgagattgaagatcgcgccgacgccatccgccaggcgatgatcgacgactacaaaaccgaatgcatcatttcgatgcagccaataggcggcatcaccgccatccagaccgaagaagggcgttacttcttcgatatttcctttcaaaccatcatttccagataa

SEQ ID NO: 122177 - DNA, 198 bp, Enterobacter cloacae
atggcggtggctgacctgccgacgtatggttatcgccgtgtgtgggcgctgctgcgacgggagtcggagcgggacggcctgcctgtggttaatgcaaagcgggtgtatcgcattatgagaacgcataatctgcttcttgaacgtaaacccgctgatccttgccgtaagcgggcccataagggggtcggttccggctga

SEQ ID NO: 122178 - DNA, 615 bp, Enterobacter cloacae
atgttcatcggatatattcggatgtcaaaagcggatggttcgcagacgaatgatttacaacgtgatgcactgatcgccgcaggtgttgatgccgcacatttttatgaggaccgggcatcgggcaaacgagaagagcgtcctggacttacagcctgtctgaaagcactacgacccggagacacgctggtcgtatggaagctggaccgcctcggtcgtgatcttcgtcatctcattaatacagtgcacgacctgaccgcgagggggaccggtctgaaagtgctgaccggtcacggggcgactatcgacacaacaacggccgctggcaagcttgtcttcggtatctttgccgcactggcggagtttgagcgcgaactgattgctgaaagaacgactgcaggtctggcatcagcaagagcccgtgggcggaacggcggccgaccttataaaatgacgccagtcaaactgcgactggcaatggcatcaatgggacaatcagaaacaaaggtcagtacgctatgccaggaacttgggataacccggcaaactttgtacaggcatatttcccctgttggtcaactgcgggcggacgggatcaagctgttcaaccgtggataa

SEQ ID NO: 122179 - DNA, 258 bp, Enterobacter cloacae
atgcctactaaaaataagctcctcagtattctttcggacgccgagcaggaagcgctctatggtctacctgatttcgatgatgcacagcggctggagtttctggcgctgaatgaatatgaactggcgctggcctgcagtcgccgggggcttcacgctcaaatttattgcatcatccagatcggagagcatgaaaaacctcggggcagccatcgaatgatgccatctacaggggttaaaataaccaccatcatttcataa

SEQ ID NO: 122180 - DNA, 1257 bp, Enterobacter cloacae
atggcgctcactgacgcaaaaatccgtgcagctaaaccggatgaaaaaccttataaacttgccgacagtggcaacatgtttttgctcgttcaccctaacggctcacgctactggcgactccgctaccggtttctgggcaaagagaaaacgctcgctctgggggtctatcctgaagtctcgttatcagaagcaagggaaaaacgcgatacggcgaggaagctgatagctgagggaactgacccgtgcgaacagaaacggatcaaaaagtctgtacctgaaacagctcagacattcgaaggcatcgcaaggcagtggcataagagcaacaaaaaatggtcagcctcacatagtgagaagatactgaaaagcctcgaaactcatgtgtttccctttattggctcacgtgatattaccaccctcaggactcccgatttacttgttccagtaaaggctgccgaagccaaagagatctatgaaattgcagcgcgccttcagcagcgtatcactgcaatcatgcgctatgctgcccagtcaggcattatcacctataaccctgccgtggatatggctggcgcattaaccacggtgaaacgccagcaccgccctgccctcgccttaaatcgcatttcagagcttcttgaacgactggatgcatacagaggacaacctctcacccgactggcaactaaactcactctgcttatcttcatccgttccagtgaactacgctttgccaggtggtctgagatcgactttaagaaagccatgtggaccattcctcctgagcggaaacctattgaaggggtcaagtattcccatcgtggctcaaaaatgcgaacagagcatcttgtgccactctctactaaggcgctgaatatactacagcagatccacacgatcagcggagaacatgaactgattttcaccggcgatcacaatccatggaaacccatgagtgagaacacggtgaataacgcactgcggctgatgggctacgatacaaaggtcgatgtctgtggccacggtttcagggcaatggcttgtagctcattgattgaatcagggctttggtcgagggatgctgttgagcgccagatgagccatcaggaacgtaatggtgtccgcgcagcttacactcataaagcggaatttctggatgagcgcagactgatgctgcaatggtgggctgattttcttgatgccaatgaggggaaaccagtgagcccatttgacttcgcaaaacttcagtctcgatag

SEQ ID NO: 122181 - DNA, 354 bp, Enterobacter cloacae
atgctgtttcgctttacgtacacgatcgaaacccttcgggcaatggactggatcgacgggctggtgtccgcaaaagaatggaaagaaaaagctaaactggcaggtaatgtctgtgcgatctacacgccgaaagacgagctgcatcaggtgttcagtggcacgggtgaactcatcaggccgatggagctacggcttaccggcgatatcagcggtattcctgcgctgatcgcccagtgcaatctgaacgcttgcctgatgacgagggattttttcgtttatcggctgttacctgacccattccgtgagcgtaagaggctcatgcccaacgagatttcggatgaaaaaagaatatag

SEQ ID NO: 122182 - DNA, 1557 bp, Enterobacter cloacae
atgacaagcacccaacaacgcgccgcactgcaacgccagatctggcagattgccaacgatgtacgcggtgcagtggatggctgggattttaagcaatacgttctaggcgctctgttttaccgcttcatcagtgagaattttgccaattacattgaaggcggtgatgatagtgtcaagtatgcaacactctctaggagtgtcattaccccggaagtcaaagacgacgccattaaaaccaaaggctatttcatttacccagacgatttgtttgttaacatcgctgctagtgccagtactaacgaaaaattaaataccgatttggctgacatcttctcggctattgaaatgtcagccagcggatacccttcagagaacgatatcaagggattgtttgctgattttgacaccacaagcaaccggctcggcaatactgtaaaggacaaaaatacacgtctggcggcagtactcaaaggggtggcagaattagattttggcgattttgagggtagtcacatcgatcttttcggtgatgcttacgagtttcttatctccaactacgccgcaaacgctggcaaatccggcggtgagttttttaccccgcaaaacgtgtccaagctgattgcacaactggccatgcacaagcaaaccagcgtcaacaagatttatgacccggcatgtggttctggttcgctgctgctgcaagccaaaaaacactttgatgcccacattattgaagacggtttttggggacaggaactcaaccacaccacctacaacctagcgcggatgaacatgttcttgcacaacatcaactacgacaagttcaatatccagctcggtgatacgctgcgtaatccgcattttggcgatgacaaaccttttgatgccatcgtctccaacccaccttactcggtgaaatggattggctcagacgatcccactctgatcaacgatgaccgttttgccccagccggtgtgttagcgcccaaatccaaagctgattttgcctttgtgctgcatgcactcagttacctttccagcaaagggcgtgcagccatagtttgctttcccggcattttttaccggggcggcgccgagcagaaaattcgccaatatctggtggataacaactacgtcgaaaccgtgatttcactcgcgcctaacctgttttttggcaccaccatcgccgtcaatattctggtgctgtccaaacacaaaaccgatatgaccacccagttcatcgacgccagcgggctgttcaaaaaggaaaccaataacaacacgctcactgataagcacattgagaaaattatgcaggtgtttgatagcaaggcagacgttgatcattttgctaaatcggtgagctttgaagcgatcgtcgccaatgactacaacctgtcggtgagtagctatatcgaagccaaggataaccgcgaagtagtcgatatcattacactcaatgccgagctaaaaatcactgccgctaaaatcgaccaactacgtatggagattaatgccattgtggcggagattgaaggcagcgaggcgcaggtatga

SEQ ID NO: 122183 - DNA, 1215 bp, Enterobacter cloacae
atgagcgagttgagttatctggaaaagttgctggatagggctgaggtagagtggaaatcattgggggatgttgtagatcttcagcgcggcaggcggcttgtaaaatctcaattagaaaccaatggtaagtatgcggtttaccagaacagcatgacaccactaggttactatcatgactgtaatgtcgcggcacaatctacgttcattatctgtgcaggtgcagccggcgaaattggttatagcgaggataaattttgggctgctgacgatgttcatttcgcaatcacaccagaatacataaatggcagatttttgtttcactttttgttgacgcagaaaaataaaatttcagggcaagtacgccgtgcaagtattccgcgcctctcaaagtcagtacttgaaagacttgaattcccaattccctgcccgaacaatccagagaagtccctcgccatccagtctgaaatcgtcggcattctggacacttttacctctcttacagccgagcttacagccgagcttacagcccgtaaaaaacaatacaactactatcgcgaccagttgttgagttttaagaaaggggacgtagagtggaaagctttgggggagattggcaaatttattcgtggaaagcgctttacgaaagctgattatgttgaagatggcattggtgttatccactacggtgagatatacactcggtacggcgtctttacaactcatacgctttctcaagtcagaaatgatatggaaaagtcacttcgctatgcggaaccaggagacgtagtgataactgatgtcggagaaaccgtcgaggatgttggtaaagccgtggcctggcttggagatgataaagtggctattcacgaccattgttatgctttccgacattcaatgaatccgaagtttgtttcctattgcatgcaaacagcatctttcattgccgagaaagcaaagtatgtggccagaaccaaggttaatacattattgatcaatggatttgctaaaattgcaattcctgttccgtatccaaatgaccttgaaaaatcgcttgcagaacaggcccgtatcgtcgccattctggacaaattcgatgctcttaccaattccatcagcgaaggtttgccacgtgaaatcgcattacgccaaaagcaatatgaatattaccgtgatttgctgttgagctttcccaagcctgaagaggtagtggcctga

SEQ ID NO: 122184 - DNA, 1191 bp, Enterobacter cloacae
atgagaaagacgctagcagaaatcgcccagcagattcaaggctccaataaaaaggtacagttgatctatgcctttaatggcacggggaaaacgcgcctgtcgcgagagtttaagcagcttgttgcccctaggaatgatgaggatgaagtcgaacaatctgagctgtcacgcaataaattcctgtattacaacgcttttaccgaagatttattcttttgggacaacgatctggcgcaggatgccgagcccaggctaaggatccagcccaattcgtttactgattgggtgctgaaagatcaaggacaagatcgaaacattatcaccaactttcagcgctatgctaatgagaagttaaccccacgattcaatgaagaatataaagtcaaaggcaaggacgacaaagaaatcactgtaaaggcgttttcggaggtgactttttcccttgagcgcggtgatgatgaacactctgggaatctaaaaatctccaagggcgaggaaagcaatttcatctggagtattttctatacgctgatcgagcaggtgattgacattctcaatgttgctgaaccctccgagcgtgaaaccaacgcatttgaccaattggaatatatatttattgacgacccagtcagttcgctggatgagaaccatttgattgaattggctgtagatttggcccaactgatcaagtcaaacaattctgatgtcaaattcatcataaccactcacaatccgcttttttataacgttctgcataatgagctcaacagtgacgacggtggttacaagaaaaaatggcttgataagtatcggatgaccaggcttgacgacggcacatatcagttagtccagcaatccaatgactcgccattctcatatcatctttatttgaaatcagaactcgaaaaagctatcgagagtggtcagttgagcaagtatcactttaattttttaagaaatattctggaaaaaacctccacgtttcttggctataagaaatggggtgatctgttgccaaaaactgatgacggaaaaaccaatccgtatgaggctcggattattaatatctccagccactcgaagcatgcgggcgaagaagtggccgatctcactgaagacgacaaacgtgttttgcggtatctggtcaatgaaatcaatacgatgtatcgcttccagcagattgaaaactaa

SEQ ID NO: 122185 - DNA, 3099 bp, Enterobacter cloacae
atgtacgaatacaaggctgtagccgaagcaaatagctttatcgttctcgataaatacgccagggaatggcagcttaatgaaagctaccagagcgaagctgacctggaacgggagttcattcaggatttgcacaatcaaggctacgagtatgagcctagtttaaatacgcctgagaagctgctggccaacgtgcgcgagcagttgcagaccctgaacaacatgcagtttgctgacggtgagtggatgcggtttgtggagacctggctggacaagccgagcgatggcatcgtcgataaaacccgcaaaattcataacgactatatccatgattttgtgtttgacgatggtcatatccagaacatctacctggtagacaaaaaaaatattgcccgtaataaggttcaggtcatcaagcagtttgagcaacagggtagtcatgccaatcgttatgatgtcaccattctggtgaatggcttgccgctggtacaggtggagctgaaaaagcgcggcgtggcgatccgcgaagcctttaatcaggtacatcgctacagcaaagagagttttaacagtgaacattccttgtttaagtatttgcagctatttgtgatttccaacggcaccgatagccgttattttgccaatactacccagcgcaacaaaaacagcttcgacttcaccatgaactgggcgaaatctgataacagcttgctgaaagacctgaaagattttaccgcgacctttttccagaagagcaccctgctcaatgtactgctgcattattcggtgtttgatgtgagcgatgcactactggtaatgcgcccatatcagattgctgctaccgagcgtatcttgtggaagatcaacagcgcctatcaggctaaaaactggagcaatacggaaagcggcggttatatctggcacaccacaggttccggtaaaaccttgaccagcttcaaggcggcgcgcttagccactgagctggagtttatcgacaaagttttcttcgtggtggatcgtaaagatctggattaccagacaatgaaggagtaccagcgtttttccccggatagtgtgaacggctctgacagcaccgctggcctcaagcgtaatctggataaagatgacaacaaaatcattgtcaccaccatccagaagctcaataacctgatgaagagcgaaaacgagctgcccatttacaataaacaggtggtgtttatctttgatgaatgccatcgtagccagtttggtgaagcccagaagaacttaaagaaaaagtttaagaagttttatcagttcggctttaccggcacaccaatttttccccaaaacgctctgggggcagacaccacggccagcgtgttcggtcgagagttgcactcttatgtgatcaccgatgcgattcgagatgaaaaggtgctcaagttcaaagtggactacaacgatgtgcgcccatatttcaaagctattgaaagcgaacaggacgagaaaaagcttagcgcggcggaaaacaggcaagccttattgcatcctatccgtataaaagaaatttcgcagtacatcctgaataactttcggcaaaaaacgcatcgcctgcacgcaggggcaaaagggtttaatgcgatgtttgccgtgagcagcgtggatgcagccaagctgtattacgaatcgttcaaagacttgcaaaaagacagcgataagccactaaaaatcgccaccatattctcttttgtggctaatgaggaacaggatgctgtaggcgatattctggatgaaagttttgacgtatcggcaatgaacagcagtgccaaagagtttttaagtgctgccatagctgactacaacgcactgttcaaaaccaacttcagcgtggaaagcaatggttttcaaaactattaccgagatctggccaagcaagttaaggctaaggagatcgacttactgattgtggtcggcatgttcctgaccgggtttgatgcgccgacgctgaacactttgtttgtggataaaaacctgcgctaccacggtttgatgcaagcctattcacgcaccaaccgtatttttgacgcaaccaaaaccttcggcaatatcgttaccttccgtgacctggagcaggcgacaattgacgccatcacgttgtttggcgataaaaacaccaagaacgtggtgctcgagaaaagctacaaggagtatatggaaggctttaccgacgtagtaaccggtgaggcaaggcgtggctttatggatgtggtgacggagctagagcaacgctttccagatccctctgccattgagaaagagtccgacaaaaaagcctttgcaaaactctttggtgagtatttacgcgttgaaaacgtgctgcaaaactacgacgagtttgccagcctgaaggccttgcagaacattaacatcaatgaccctgaggcggttgaggagttcaagaccctgcattatttaagcgatgaggatctggcgacgctgcaaacgattaaaatgccgtctgaacggaaaattcaggactaccgttcaacttacaacgatgttcgcgactggctgcgtcgggaaaaatcttccgctgaaaaagaaaaatcgactattgattgggatgacgttgtctttgaggtagatctactgaagtcgcaagaaattaatcttgattatattctcgagctgatttttgaacacaatcttaagaataaaagtaaagcaggcttaattgatgaagttcgtcgattaatacgtgccagtcttgggagtcgggccaaagaaagcctagtcgttgatttcattaatcaaaccgacctagacaaaattagtgacaaggccagtattatagatgccttctttgcttttgcacaggtagagcaactacgcgaagcacaagagctaattggatccgagaatctgaatgaagaggcagctaaacgttatattaccacttcccttaaacgagagtttgccagcgacaatggtacggagctcaatgccgttttgcccaaaatgagcccactaaatccccaatatctcacaaaaaagcaaagtgttttccaaaaaattgcagcgtttgttgaaaaatttaagggagtgggtgggaaaatatag

SEQ ID NO: 122186 - DNA, 216 bp, Enterobacter cloacae
atgctctgtgcgttgcacggtattggtgtgctcctcttggatccgcatgatttctctaatagccagacgttaatcccagcgcgtgaaagtaccagcgtggattggcagtcagtaaaccgtctggtggaagagaatcgggattttaaagattttattgagctggtaggggaataccatcagactgggaaaattcataaaacgctatggaataaatag

SEQ ID NO: 122187 - DNA, 924 bp, Enterobacter cloacae
ttgaaaaaaaacatcatctatgaattgctctcgggaaggttcgttcctgctcctgtatggagaaagaagagctttcgtgcaaagttcttacttcgacttattttatactattcagcgactaaaaaagtactatccattttaactcaaaaaagtgagttaaaatgggtgttgtataatcaacacacatttccttgtaagccgcatcgacaatatttgacgcgtaacctcaatgcaaaacaacgcgcatcagcaattgttagccattaccagtatgtgtcatctcttaatagcagaatactgtccaacgcattgataaaacgagaagaaacagttttggtcgaactcatcggcagagaagagacccattttactatttcagtatcctgtgcgcataaagctgaacgagaaggtgagtcaacgttatggttacgtggcgacaataaagagctacttgccagcatgaccttttcggccgtgtctgaagaaggtgaatggcatttcatcattggtggtctacaaggtcctggtcagcacgtaccccgcgaggctatcaaagaagctacccgtgctctgtcaggcattttcccaaaacgtgttttgatggaatttattagccgcctcgctgagttcacctcagtgcatgctatttatggcgttagcgataatgggcatgtctttcgctcactgcgctatcggctgagcaaaggtcagcatttgcatgcaagttatgatgatttctggtcgctgataggtgggataaaacagaattcgtggcgctggcaactacctttgacgtttgaaaggaaatcattggaacatatccctagcaaaaagcgagcggagtatcgtcggcgattcaaaattttagatgatatagcagagcaagttcgcacacttaatacggcgtgcctatgcgcgaaataa

SEQ ID NO: 122188 - DNA, 999 bp, Enterobacter cloacae; identical to SEQ ID NO: 34924

SEQ ID NO: 122189 - DNA, 195 bp, Enterobacter cloacae; identical to SEQ ID NO: 34923

SEQ ID NO: 122190 - DNA, 393 bp, Enterobacter cloacae; identical to SEQ ID NO: 34922

SEQ ID NO: 122191 - DNA, 330 bp, Enterobacter cloacae; identical to SEQ ID NO: 34921

SEQ ID NO: 122192 - DNA, 1464 bp, Enterobacter cloacae; identical to SEQ ID NO: 34920

SEQ ID NO: 122193 - DNA, 471 bp, Enterobacter cloacae
gtgactgacaacaagggcatttccgtcatgtcgtcgatgtcaaactcctcggccagcagtgaaatagacgatgcgaagagagctgtgaaagccttcgcaaatgcgctgggggatcatcgtgacattgtgggctcactgcaccactcaatggcaactgagtttatcgatctgggtatggactttgccggtttgaatgatggtttcgactttgggagcgtcttctcgctgttcagcttgtcgtctgccagttcctctctggacaaagtagagtctcgcgttgaatctctgatgccagatctaagacgagccgcctccaattcggcagcagagtatgcccgtgttaacgaagagttctttggcctgaaacaacaggcctgttgccaagtgcatgagttgctggtgacaaatggtatagacgtgtcagtcaagcgcgttgagtccgccgtgaacagctacagagttggaaggtga

SEQ ID NO: 122194 - DNA, 498 bp, Enterobacter cloacae; identical to SEQ ID NO: 25003

SEQ ID NO: 122195 - DNA, 489 bp, Enterobacter cloacae; identical to SEQ ID NO: 25004

SEQ ID NO: 122196 - DNA, 336 bp, Enterobacter cloacae; identical to SEQ ID NO: 25005

SEQ ID NO: 122197 - DNA, 471 bp, Enterobacter cloacae; identical to SEQ ID NO: 25006

SEQ ID NO: 122198 - DNA, 372 bp, Enterobacter cloacae; identical to SEQ ID NO: 25007

SEQ ID NO: 122199 - DNA, 195 bp, Enterobacter cloacae; identical to SEQ ID NO: 25008

SEQ ID NO: 122200 - DNA, 549 bp, Enterobacter cloacae; identical to SEQ ID NO: 25009

SEQ ID NO: 122201 - DNA, 351 bp, Enterobacter cloacae; identical to SEQ ID NO: 25010

SEQ ID NO: 122202 - DNA, 303 bp, Enterobacter cloacae; identical to SEQ ID NO: 25011

SEQ ID NO: 122203 - DNA, 294 bp, Enterobacter cloacae; identical to SEQ ID NO: 25012

SEQ ID NO: 122204 - DNA, 273 bp, Enterobacter cloacae; identical to SEQ ID NO: 25013

SEQ ID NO: 122205 - DNA, 528 bp, Enterobacter cloacae; identical to SEQ ID NO: 25014

SEQ ID NO: 122206 - DNA, 189 bp, Enterobacter cloacae; identical to SEQ ID NO: 25015

SEQ ID NO: 122207 - DNA, 858 bp, Enterobacter cloacae; identical to SEQ ID NO: 25016

SEQ ID NO: 122208 - DNA, 228 bp, Enterobacter cloacae; identical to SEQ ID NO: 25017

SEQ ID NO: 122209 - DNA, 519 bp, Enterobacter cloacae; identical to SEQ ID NO: 25018

SEQ ID NO: 122210 - DNA, 447 bp, Enterobacter cloacae; identical to SEQ ID NO: 25019

SEQ ID NO: 122211 - DNA, 360 bp, Enterobacter cloacae; identical to SEQ ID NO: 25020

SEQ ID NO: 122212 - DNA, 429 bp, Enterobacter cloacae; identical to SEQ ID NO: 25021

SEQ ID NO: 122213 - DNA, 861 bp, Enterobacter cloacae; identical to SEQ ID NO: 25022

SEQ ID NO: 122214 - DNA, 960 bp, Enterobacter cloacae; identical to SEQ ID NO: 25023

SEQ ID NO: 122215 - DNA, 855 bp, Enterobacter cloacae; identical to SEQ ID NO: 25024

SEQ ID NO: 122216 - DNA, 294 bp, Enterobacter cloacae; identical to SEQ ID NO: 25025

SEQ ID NO: 122217 - DNA, 474 bp, Enterobacter cloacae; identical to SEQ ID NO: 25026

SEQ ID NO: 122218 - DNA, 522 bp, Enterobacter cloacae; identical to SEQ ID NO: 25027

SEQ ID NO: 122219 - DNA, 522 bp, Enterobacter cloacae; identical to SEQ ID NO: 25028

SEQ ID NO: 122220 - DNA, 609 bp, Enterobacter cloacae; identical to SEQ ID NO: 25029

SEQ ID NO: 122221 - DNA, 1116 bp, Enterobacter cloacae; identical to SEQ ID NO: 25030

SEQ ID NO: 122222 - DNA, 435 bp, Enterobacter cloacae; identical to SEQ ID NO: 25031

SEQ ID NO: 122223 - DNA, 1065 bp, Enterobacter cloacae; identical to SEQ ID NO: 25033

SEQ ID NO: 122224 - DNA, 288 bp, Enterobacter cloacae; identical to SEQ ID NO: 25034

SEQ ID NO: 122225 - DNA, 540 bp, Enterobacter cloacae; identical to SEQ ID NO: 25035

SEQ ID NO: 122226 - DNA, 984 bp, Enterobacter cloacae; identical to SEQ ID NO: 83936

SEQ ID NO: 122227 - DNA, 420 bp, Enterobacter cloacae; identical to SEQ ID NO: 25038

SEQ ID NO: 122228 - DNA, 552 bp, Enterobacter cloacae; identical to SEQ ID NO: 25039

SEQ ID NO: 122229 - DNA, 609 bp, Enterobacter cloacae; identical to SEQ ID NO: 25040

SEQ ID NO: 122230 - DNA, 534 bp, Enterobacter cloacae; identical to SEQ ID NO: 25041

SEQ ID NO: 122231 - DNA, 273 bp, Enterobacter cloacae; identical to SEQ ID NO: 25042

SEQ ID NO: 122232 - DNA, 3615 bp, Enterobacter cloacae; identical to SEQ ID NO: 25044

SEQ ID NO: 122233 - DNA, 1434 bp, Enterobacter cloacae; identical to SEQ ID NO: 25045

SEQ ID NO: 122234 - DNA, 246 bp, Enterobacter cloacae
atgtctcttcctgagctgaatcacaggattttggtcgcagcaaaacgcaatggttgggtcacagacgaagagtttaaccgtacacgtccggtactcaacctggaaaacaacatagccgaacgcttggcctcaccagagctgggctctgacctcaaacagctatctcaagcgagcggtgataaagacaactttgtgccaccggaacaactcatgaagtacatccgggacaaattacaggagaactaa

SEQ ID NO: 122235 - DNA, 1512 bp, Enterobacter cloacae; identical to SEQ ID NO: 25047

SEQ ID NO: 122236 - DNA, 279 bp, Enterobacter cloacae; identical to SEQ ID NO: 25048

SEQ ID NO: 122237 - DNA, 1041 bp, Enterobacter cloacae; identical to SEQ ID NO: 25049

SEQ ID NO: 122238 - DNA, 876 bp, Enterobacter cloacae; identical to SEQ ID NO: 25050

SEQ ID NO: 122239 - DNA, 492 bp, Enterobacter cloacae; identical to SEQ ID NO: 25051

SEQ ID NO: 122240 - DNA, 870 bp, Enterobacter cloacae; identical to SEQ ID NO: 61217

SEQ ID NO: 122241 - DNA, 1011 bp, Enterobacter cloacae; identical to SEQ ID NO: 25053

SEQ ID NO: 122242 - DNA, 537 bp, Enterobacter cloacae; identical to SEQ ID NO: 25054

SEQ ID NO: 122243 - DNA, 282 bp, Enterobacter cloacae; identical to SEQ ID NO: 25056

SEQ ID NO: 122244 - DNA, 603 bp, Enterobacter cloacae; identical to SEQ ID NO: 25057

SEQ ID NO: 122245 - DNA, 453 bp, Enterobacter cloacae; identical to SEQ ID NO: 34917

SEQ ID NO: 122246 - DNA, 273 bp, Enterobacter cloacae; identical to SEQ ID NO: 34916

SEQ ID NO: 122247 - DNA, 1236 bp, Enterobacter cloacae; identical to SEQ ID NO: 96875

SEQ ID NO: 122248 - DNA, 456 bp, Enterobacter cloacae; identical to SEQ ID NO: 25798

SEQ ID NO: 122249 - DNA, 366 bp, Enterobacter cloacae
atgtctgaaccacaaaagtctgaaccacaaaacgggcgcggcgcgctcttcgccggtgggctggccgccattcttgcgtcggcctgctgcctggggccgctggttttgatcgccttggggttcagcggggcatggatcggcaacctgacggtgctggaaccctatcgcccgatcttcatcggcgcagcgctggtcgcgctgtttttcgcctggcggcgcatctaccgcccggcgcaagcctgcaaaccgggtgaggtctgcgcgattccccaagtgcgagctacttacaagctcattttctggatcgtggccgcgctggtcctggtctcgctcggatttccctacgtcatgccatttttctattaa

SEQ ID NO: 122250 - DNA, 276 bp, Enterobacter cloacae; identical to SEQ ID NO: 25796

SEQ ID NO: 122251 - DNA, 426 bp, Enterobacter cloacae; identical to SEQ ID NO: 25795

SEQ ID NO: 122252 - DNA, 363 bp, Enterobacter cloacae; identical to SEQ ID NO: 39670

SEQ ID NO: 122253 - DNA, 237 bp, Enterobacter cloacae; identical to SEQ ID NO: 10330

SEQ ID NO: 122254 - DNA, 708 bp, Enterobacter cloacae; identical to SEQ ID NO: 10331

SEQ ID NO: 122255 - DNA, 1680 bp, Enterobacter cloacae; identical to SEQ ID NO: 10332

SEQ ID NO: 122256 - DNA, 240 bp, Enterobacter cloacae
atggtgttcgtggcggccatcggccttgatctgctccaccacttttttaacgtcctgcacggcattacggtcggcaatcagcaccgcgtctttggtctgcacgaccaccagatccttcacccctaccgtggtgacgaggccagattcggcgtagacgtagctgttttccgttttgtggctgatcacatccccgtgatggacgttaccctccggggtatgcgcgctgatctcccacagtga

SEQ ID NO: 122257 - DNA, 705 bp, Enterobacter cloacae; identical to SEQ ID NO: 8686

SEQ ID NO: 122258 - DNA, 885 bp, Enterobacter cloacae; identical to SEQ ID NO: 48589

SEQ ID NO: 122259 - DNA, 1476 bp, Enterobacter cloacae; identical to SEQ ID NO: 48588

SEQ ID NO: 122260 - DNA, 129 bp, Enterobacter cloacae
atgaaagcccaggcatacccaccatcagtcattcgtaaaggcgctgtgttgtacgcagccctttattacatctctgaggcactgttgcaaatagtcggtggtgataaacttatcatccccttttgctga

SEQ ID NO: 122261 - DNA, 312 bp, Enterobacter cloacae; identical to SEQ ID NO: 49818

SEQ ID NO: 122262 - DNA, 507 bp, Enterobacter cloacae; identical to SEQ ID NO: 83874

SEQ ID NO: 122263 - DNA, 675 bp, Enterobacter cloacae; identical to SEQ ID NO: 83875

SEQ ID NO: 122264 - DNA, 282 bp, Enterobacter cloacae; identical to SEQ ID NO: 83876

SEQ ID NO: 122265 - DNA, 144 bp, Enterobacter cloacae; identical to SEQ ID NO: 25134

SEQ ID NO: 122266 - DNA, 636 bp, Enterobacter cloacae; identical to SEQ ID NO: 25135

SEQ ID NO: 122267 - DNA, 273 bp, Enterobacter cloacae; identical to SEQ ID NO: 25136

SEQ ID NO: 122268 - DNA, 1182 bp, Enterobacter cloacae; identical to SEQ ID NO: 25137

SEQ ID NO: 122269 - DNA, 786 bp, Enterobacter cloacae; identical to SEQ ID NO: 25138

SEQ ID NO: 122270 - DNA, 312 bp, Enterobacter cloacae; identical to SEQ ID NO: 25139

SEQ ID NO: 122271 - DNA, 450 bp, Enterobacter cloacae; identical to SEQ ID NO: 34925

SEQ ID NO: 122272 - DNA, 1035 bp, Enterobacter cloacae; identical to SEQ ID NO: 34926

SEQ ID NO: 122273 - DNA, 1521 bp, Enterobacter cloacae; identical to SEQ ID NO: 34927

SEQ ID NO: 122274 - DNA, 756 bp, Enterobacter cloacae; identical to SEQ ID NO: 34928

SEQ ID NO: 122275 - DNA, 213 bp, Enterobacter cloacae; identical to SEQ ID NO: 34929

SEQ ID NO: 122276 - DNA, 243 bp, Enterobacter cloacae
atgtcatccacatgggttaaagaaaagtttggcctagaccttggtgcaatgtgccgttatgacaaaccccagcatgtcgagttcaaagtccttcctgatcagacaatccagttccgctgctcatggtttgaaggtggcggattaacctggtggcctttctacaccgagcatgatgtaaagagcgccgaggcgacctctgtgctcaatgacatcttccagggtacggaggggcatgatgagtag

SEQ ID NO: 122277 - DNA, 243 bp, Enterobacter cloacae; identical to SEQ ID NO: 34931

SEQ ID NO: 122278 - DNA, 249 bp, Enterobacter cloacae; identical to SEQ ID NO: 34932

SEQ ID NO: 122279 - DNA, 198 bp, Enterobacter cloacae; identical to SEQ ID NO: 34933

SEQ ID NO: 122280 - DNA, 939 bp, Enterobacter cloacae; identical to SEQ ID NO: 34934

SEQ ID NO: 122281 - DNA, 546 bp, Enterobacter cloacae; identical to SEQ ID NO: 34935

SEQ ID NO: 122282 - DNA, 570 bp, Enterobacter cloacae; identical to SEQ ID NO: 34936

SEQ ID NO: 122283 - DNA, 282 bp, Enterobacter cloacae; identical to SEQ ID NO: 34938

SEQ ID NO: 122284 - DNA, 429 bp, Enterobacter cloacae; identical to SEQ ID NO: 34939

SEQ ID NO: 122285 - DNA, 348 bp, Enterobacter cloacae; identical to SEQ ID NO: 34940

SEQ ID NO: 122286 - DNA, 843 bp, Enterobacter cloacae
atgtcagaacttactctcaccgaatccgaagtgttaaccgacaataccgatgtaatttgctcgaccagcattgaacgtatcgtcaccggacgcaacgcggcgctggctcaaattgaaacgctgatacagcaactcgacgatatctcgacactgactagcaacatcggcggtggtaaagcaaatgaatggggagtacggcaataccgttacgactgctggttgatggataaaccagaaacagcgataaaagccatcacccaaaatatcgatcgcagcatctggaaagacctgatgaataagtcgggaatgctggcgctcatggacgcacaggcacgcgacgagtggtacaacagcctggaaaaggacgatattcccgctatcagtgaagagaatattctcagcacctttgagcaactacatcagagtaaagcagaggtgttcgagcgagggatcattaacgtgtttaagggactaagctgggattacaagagcaacagcccctgcaaattcgggaagaagatcatcgttgatggtctggtacaatatgaccgttggggatttcacttccgtcatgggcgtagacgtgagcagttagcagatttagatcgtatgctgaatctgctggatggtaaacctgttccggagaatcgcaacgatctttccgtcaggctcgatgctcatatctccaaacagcacgcttccgtttacgaagacgagtatgttgagatacgttacttccagaaaggcactgggcacatcatctttaaacgctctgatttgattgataagatgaacgaaatagttgcccgctattttcctgcaaccctaccacctcgtacctga

SEQ ID NO: 122287 - DNA, 492 bp, Enterobacter cloacae
atgaagctgtccctgacggtggaagccgataccgttaatgtactggcccttaatgggggccggatcgccgtcgatatcgatggtattgagctggctgcgctgattgatgtggtcagtgataacgggtattcgcttcgtgttgctgataccccagggaggttggttgttgaagatcagctaccacgtaccgcccgtctgaatgggatccagtgcagtaccgctcatatcacgtgtgaggataacgctattctcgaccaggtcactcttcaacgccacgacggcggcaacagtgactggatactgtgcaccggctacggttacctgctcagacttaatgctcgcttatacccagtgctggaactaaagagattggggctttcaaagggctgccgtcggttagtgaccacactgatacgacgttacgggatcgatatgctacatctggatgcagcgggtgacctgttgccgggttttagcaccttcaactggtag

SEQ ID NO: 122288 - DNA, 378 bp, Enterobacter cloacae
atgcaaaccttacccaccatcccgacgaggaaggtatcgtcacacccgtcgccggtagaaatctggcagcaacttcttacttatctgctggaaaggcattacggcctttcgcttaacgacacacagtttggtgatggcaatgtgatccagcagcatattgacgccgggatttcactggcagatgcactcaattttctcgttgaaaaatctgaactggtacgaattgatcgccccggtttctccattcagcatcagtctccgttcatcagcgctattgacatactccgggccagaaaggccaccggcctgatgcaacgtaccggctataaggcggtgacttgcgccatcagtgggcagtcatccagggggcagcaatga

SEQ ID NO: 122289 - DNA, 231 bp, Enterobacter cloacae
atgcaacacgcctgtaaaatcagcgaggtcattgaactgctgaaacaacatcaaaatgacgacttcgtattgtgttcactctggtacgaagacgatgtacacaatgtggatgagtctgttacgacagaagaggccagagcggcattatgccatgcagccagccatcacgacgcagaacagggcattaactggttcacactggaggccgcacttgacgccatcagacagtaa

SEQ ID NO: 122290 - DNA, 372 bp, Enterobacter cloacae
atgcaaagctcaacaaatgtagcaaaccacgatattgccgcctcctggtggggacttaagcctgcagctatcccgtgttttggcgcacgactggtacaggagggcaaccggctgcattacctggctgatcgcgccagcatcaccggcaccttcagcgaatcagacctgcgccatctgaatctggtatttccactgctgttgaaacaacttgagttaatgctcaccagcggtgaactcactccccgacatcagcacggcgtcacgctctacgcaaaaggactgacctgcgaggcagacaccctcggctcctgcgggtacgtttatcttgcgatttatgcgacgccacctgcggcacaacccggaggagaatag

SEQ ID NO: 122291 - DNA, 222 bp, Enterobacter cloacae
atgaagattatcagcaaacgccaggcgatggcgatataccgccagcatccgcagtcccggctgttccgcttctgcacagggaaataccagtggtccggcagcatctgccactatgccggacgggaggtgcaggatatcagcggtgtgctcgccgtattcgctgaacgccgccaggaccgcaacggcccgtatgttgtcctgcgcagcgttaccctgaattaa

SEQ ID NO: 122292 - DNA, 480 bp, Enterobacter cloacae
atggaaacacagttaccactgtttgccgccgaattaccggcatccgcacaacacaccatccgtgaggcactaaccctgctggagcgtcagttacgcgaacccggtgcgtcatttacctccagtagctcagtacgtgactggctgcgcctgcagcttgccacactggagcgcgaagagtttaccgcgctcttcctcgataaccagcaccggctgattgcgcacgaaactctcttcaccggcaccatcaaccatacgcaggtctatccacgggagttggtaaaggctgcactgaaatataacgctgctgccatgctcgtggcgcactgccatccttcagggcacgcagagcccagcgattcagacagacggatcacagaacgtcttaagcagacgctggagctggtcgatattcgcctgctggaccacctggtggttggcgggatggatatagtgtcttttgccgaacgaggctggctttaa

SEQ ID NO: 122293 - DNA, 465 bp, Enterobacter cloacae
atgaataacgctacaaatctgcaaaccctttcagacctcgaaaataccaacactctcatcgtcacgttgttgcccgatgaacagcgtatcggcttctggccacagcactttggttccatcccgcagtggatgacccttgagccgcatatcttcgcctggatggacctcttctgtgcagactattgcgggggtatctggcagttttacacgctgagcaacggcggtgcttttatagccccggagcccgatggtgatgacgttgaaaaatggacgctgttcaacccgatgaatggcaacgatgtggaaatgagcgcagaggccgcgggcatagcagcctgcctgatggcttacagccaccacgccatgcgcaccgaatgcgacgccatgacggagcactattaccgtctgcgggactacgcgctcaaccacgcggaatgcagcgccatcatgcacatcattgactga

SEQ ID NO: 122294 - DNA, 819 bp, Enterobacter cloacae
atgcgcttagccagccgttttggcgctgccagcctcgtgcgccgcgaccgcccattaacccgcgatgaactggcgcactacgtgcccagcgtcttcagcgaagaaaaacatgaatcccgcagcgaacgttacacgtacatcccgaccatcaccctgctggataacctgcagcgggaaggcttccagccgttctttgcctgccagacacgcgtgcgtgacctgaataaacgcgaccacacaaagcacatgctgcgcctcaggcgtgaaggccagattaccggtaaacaggtccccgaaatcattctgcttaacagtcacgacggctccagctcataccagatgctgccggggttgtttcgtgcagtctgccagaacggacttgtctgtggcgaaacctttggggaggtgcgcgtgccgcataagggtaatgtggtggagaaagtcattgaaggggcttatgaggtactggggatatttgaccgggtcgaagaaaatcgggatgcgatgcagtcactgttactcacgccaccggcacagcaggcttttgcaaaagccgcgctgacgtaccgctttggtgaagatcaccagccggtgacggcatcccagatactgacgccccgccgctatgaagaccgtcaggacgatctgtggtcagttttcaatcgttgtcaggagaacctgctgaaagggggtctgccgggacgtactgccaaaggcaagcgcagccatacccgcgcggttaaaagcatagacggagacgttaagctcaaccgcgccctctgggtaatggcggaagaactacagcaggcactgagctga

SEQ ID NO: 122295 - DNA, 543 bp, Enterobacter cloacae
atgacagatatcacgattaataccctcagccagcggctgaatacccgtacgctgcattttgtcctgctcagcatggtcacctgcggcgtctggcccctgctctggctctacaaaaagcaggatatcatcagcgagaccacgggctacccgctttacggcaatctgtttattatctggctcaccgtctgtttcgggctcagtcgtcagttgggtgccatggcagcacctgacccgtacggttacgactcaaccggcgatatcctgctggccatcagcgggctgctctcaatagccagtggtgtgatgtatgtggtctgggctttcaaggccagaaccgcgctgcgtcactttgcgctgaacacgtttcgctttgacctgaagatgaacgtcttttataccgtgctgtttaacgtcttctacatcacgtactgcatcaatgacatgcagcaggcgctggcgaaacaccagattattcacaggaacaccacaacaccgggtgaacatgctccggcccaggcggcagaacagacgaaccagccctga

SEQ ID NO: 122296 - DNA, 468 bp, Enterobacter cloacae
atgcgtaaactatctgccgttctgctggtaacaacactggcattcactggcgtcgctcacgctatccccaatatgtggaccagcggcttcggcatgggagtgaccgaatacatcatcaccagccccgaaaatgtgatgtttaacctcaattgcacaggcaaccccgatgagcagaacatcctgcagcatcacgtcatgctcacctttcccgatggttccggggcagactcacatgacgaccataccgccatcacgctggtaataaacgatcgacaattcccgctcccttcgtctctgggatggcgtaatgcggacaatgcctggtcgcagtttattacggctctgggacaggctgcacattttgatgtgtatgtgaatgacaggaaagccggcagttttaacccggggatcaggaatacacagcaggagctgaaaaatatcagcgactgtgaaaatacggccggttaa

SEQ ID NO: 122297 - DNA, 312 bp, Enterobacter cloacae
atggggcttgttattaagtatttcgcaattgcctttggcatcgcgcttgtggttgtcctgtttaacgtgttcggaaatacgggcgaaatccgcagtttcgggcaggggatggggtatctgttctggatgacgctcggccccggtgccggtatgactatcggcgcgttcctgcgccagtggctgatgccggatgcggtatacaccagcgaaggtatgaccgggctgctcaaagcccgcttgttctggcttgtggggcctcagtgcatcggctggctggccggtctgataactgttggcaaacagcttatgtaa

SEQ ID NO: 122298 - DNA, 267 bp, Enterobacter cloacae
atgacgacggcttcccggggcgcgttactggccgtcactctgctgtcagctctggccgtgagcggctgtggtgacaaaaacgaacaagagtttatccggggctgtaagtccggtggcggaaccaccgcggtctgcggctgtatctgggatgagctgaagacgaaatatacccacggggaactggagaaaatgaaccagcagtacggctatgtccccccgcgttttatggacaacatgctgagtgccgctcagcagtgcagaaaataa

SEQ ID NO: 122299 - DNA, 504 bp, Enterobacter cloacae
atgaaacacggtacagccctgctgctgagcgcaggaatgatgctggcatcgctgtcagccgtaaatgccgctacgcccgatgcccttatacaggcataccaccagcgttgcggaaagcccgtcttctatgcgcagaccgttaaccacaaaaaggaagtcgagatttgcatcatcaccccgtcggtatcgtactcattcggcaggaccggcgcagaacataaggaaatggacctcaccgtaccggcaaacaccaccacgtacgcttaccagagcaatcaggtaatcagtctgcaggaattcacagtcagaaacggagacacctcataccaggtatctgccgggacaaacgatgaaggcagaccgttcgcgtccctggacgtttacaagggaacacctgagtcgggccagcatctggcggaaatccggctcgacccgaacacggtggtgaacaacatcagccatgcccttgcacaggaaggcgtggtgcaatcggacagcctctga

SEQ ID NO: 122300 - DNA, 615 bp, Enterobacter cloacae
atgcgcgccacgaaccctgcgccccgacacgacaggctggcactcaggctgtcagttattattagccggctttttgctggtgaatccctttcactaaaagcgctgtccggtgaatttggcgtatctgaacgcaccctgcgccgggatttctctcagcgtctgctgcatctggatctgactggcgataacggctgctggcggttacgaacaaacccgatgcgcgaccatactcctggcgcgctggcgtttgcccgcaacaccggaatagcccgtctcattccctcacagagccgccatctgatgcagctgttgatggatgaaaacggcacatctccatgcctgataggccatgcacagcagcccgcggggatcctcccggactgctttgagcgacttgctgaaggcatttaccaccaccgtctggtcagcctgttggttaaggggattcgtcacgaccaccttgagccctaccggctaattttctcacatgcagactggtatctggtggccagccagtatggtgcgatacgggtattcagggttgaggaggtaacgtcggtctcttgtctgaacgctcttttcaccggcacagtgaaaccagcgcactcattgtag

SEQ ID NO: 122301 - DNA, 237 bp, Enterobacter cloacae
atgatactcaggacactgacatggtccctgttacgcatgctgctgcgctatatccgaagacgggtggttaacaggatcctggattactgccggcgcgcaggctggccggagaaagagatccacagcgtccgttgggctctcatccttctgtttcgcctcttactgcgtttactgagggcgagattaataaaacgcaatactacagccaccttcagccctgacaacgcctcctgctga

SEQ ID NO: 122302 - DNA, 885 bp, Enterobacter cloacae
gtgtccgataaaactgaacagggtcttgatgccctgaagcaacagctgtatctcctgcccgaaaccctctcccgcacaatactgaaccgcatccgccagcacattcattacgagccagtcatcggcatcatgggtaaaacagggagtggcaaaagttcgctctgcaatgccctctttcagcagccccttagtccggtcagcgatgtccagggttgtacccgcgaaccgcttcgcttcacgctcgatatcggcgggcgccgcatgacgctggtcgatttgcccggtgcaggcgaatctctggactatgaccgtgaataccggcagctgtataaggagcagctaccgacgctggatcttatcctctgggtgatgaaagcggatgaccgggcctgtgccaccgatgaggtgtttcaccggttcctgctcaagtacggtgtctcaccaggcagcattgtcttcgtcattaaccaggccgacaaggcggaaccctcgctggattgggacagggaagcatgccagccctccactggccagttgctgacgctgaccacccgaagcgcagccatctcacggcagttctcctgtccttatccggttcatgcggtgtcagccaaaacaggctacaacctggcccgtctggtcgaaaccatgatatttgccctgcccccggaggccagcagcggcgtttttcgtcaggtcagggaagagcaccggactacggaggcagagagtaccgcccgacaggatttcggcgatctgctgggtgagttattcagccggatagtggacgccattccgctgccaaaggcggtccgtgaagcgctgggaacgatccgcgacggcattgtgaatgccgcttctgcgctgtggcacttacttttttga

SEQ ID NO: 122303 - DNA, 630 bp, Enterobacter cloacae
atgagcattaatatcaacagctacggcacattaaaccagaactacgttaagcgtattcaggatactatcactaaagccctgaatgactatccccgtgtaatggtcctgagagtagatcttcgtttgcctgagattgaaacaggctcatataagcacgattcaggtatagtcacccgttttattgtttccctcaaagcccagattgaagctgacttactgaaaaaatgtcaagcaggtaaacggattcacccttgtcgtgtccgtcatatctgggcaagggaatttaatgaatacggtaaaaagcattatcacgtggccttgctctttaatcgtgaagtgtatgcttatccaggcagctataccagcacggacggagaatatacccacaatctggccctgatgattatggaggcctgggtacgggctctgggactgaatactgcggttaatcatcagcaatattatcccctggtagagtttcctgccagttgttactaccacctgagtaaaaaccacaatgactatacggctcagttatcaaatgtcactgacaggcttaactatctggccaaggactacagcaaagataattcagacagccagcgtaactttggctgcagtcaatactga

SEQ ID NO: 122304 - DNA, 210 bp, Enterobacter cloacae
atgacagatacaacccgcagcctgctcagtgataaaatggttgatatggcattcattatggaatttaccgggtgcagcgataaatggttttacaagttgattcaggaaggtttgtttccaaagccgattaaactgggacgtagttcgcgctggcttaagagtgaggttgaggaatgggttcagaaacgtattaccgagtcccgtgcataa

SEQ ID NO: 122305 - DNA, 1593 bp, Enterobacter cloacae
atgagtaaccttaacaactatccgacagatgtatttccttcagttttacgtaatgtcattacgacgctacatgaagacacccttatccccatagaaatgattggcagtacggtgctggcggcattatcactggctttgcagcctcttgttgaagtggcctctcccttcggaaataaaaagccagaaccctgctctctttattttctgacgctcgcaaaatccggtgaggggaaaagccccctccgtgaattgcttatgactcccttcgatgaatttgcttctgagatgcatgaggaatatgaagatttacttgatgtctacaaaaaagatcatgctatctggtcatcaaaagaaaaagcactaaatcgtaattatcagaaagcagtaaagaatggcggggaaggtgaagttgaagaacttcttctgcgcgagcatcaggctgctgagccgaaaaaacccagagcatttgaaatgttttatgaagatgcaaccccagaaggtatcattcagggactcagtgaatacccctatgcaggtgtgtttgcagatgaagctattactttctttaccggccagctaaaaaacaatctggggttgctcaacaaaatatggaaaaacgaaccccttcaggtctcccgaaaaaaagaaggtactgtacgcattaatgcctacctgacctttcttctaatggttcagcccgaagtatttgaagagtatctggaacggcatggaaaacgagctgtatccagcggatttcttgcccgttttttatttacagaaacagtaagcactataggtcagagaagaatcaacctgaaccaggataattcaaggcaagcactggacaatctattcactcatttaaataaatttctgatagagcaaaaggaacatttttacgataccagcaaatcccaaaagacactaacattaactgaggatgcgaaaaaattatttgaagggaaagtaagtcagcatcaattaaatatagcccaaaaccagtgctgggagcacatcccggaattcgtgtctaaagcaggcagtcaggcaatacgcatagccgctatttttgattgttattctgaaagtgatatatcagaacaatatttaaagaacgcatttgcgattactgaatggcaccttaatcaggcagctaagtatttttataaactaagtgcgcaatatcaacttcagcaagatgtataccagttgttcgactggataaaaaatcactttgttaatccgactggtgtaatgaaagtcactaattttcaagcagggcaagtgactgatgtaagacttaatccctggcagccgttctcaaagaatgaactggagacgcatggtcccgccagactcagaagaattgaacgtttaacgcctgcactcaatcaactcattcagctcggtctgattgtcacaatatgctacccaccacaacgtgcgatttatatcgcggcagcacaaccagatgcatatggtaatctttatcccctcaaaccatttttcactccatttaacatggtagactacagaaataatgccactccaccactgagtggatacgattccaacagactgcaatggcaataa

SEQ ID NO: 122306 - DNA, 243 bp, Enterobacter cloacae
gtgaagctactgacaacggtggtgatgtttatcgtcacttccattgtggtgttcttaaacccggacgtgatcaatatgattgaaaccgtctgcgggccattaattgccatattcctgtttgttattcctacctggctagtgttaatccgcccggtgctcaaaccgctgcgcggcccaaccgcagtgatagtgctggggtgcggtttattgacagtttccgcactgctttacggtatgttttaa

SEQ ID NO: 122307 - DNA, 1017 bp, Enterobacter cloacae
atgaataaagaaactgctataacacgcccgcaatggacaaaaaatgataccatctggatgatgggtgtttatggcgcaaccgtcggtgccggaacgctatttctaccggttgagattggtacccatgggccgatggtgtttatttcgctactccttcttgctttcccgctttcgcttgttccgcacgtgcttatctgccgcgtttttatgcgcgacaagcagggccaagaccagactgatcaaaccttacccctgttcggctctttcttcggttccaaaggccgtcaggcgatgaaactgtttttctgcgtggcccattatccggtgactctggtctatgctgtttcattggtaaatgcgctgagtcactttttcaacgagcgtctgcacatcaacggcattagtcgtgctcccctgacgctggttgtactggtgattttgcaccctgtattgagcaaaggtcgcgacaaagtggtaagtactatgagcgcgttggcgttgccttttgcgattgctattattgtcgtcgcaacgtcacaaattccggcctgggatatccataatatcacctacgcgtggcgacagacgcataccactgacatcgcaagctcactgaaatctctgtggctgaccctgccgctcatcgctttctcactctgttctgccccgctaattcctgcacttgcatcctggtatcgcgagccggggcacggtggtgagacacaatcagttcgcgttatccgtcgagcttattggctgattttcatcagtattattttcttcgtgttgagttgtattttaagtacccctcgttcaacttttgagatcgcgaaggctcaaaatttaaacgtactgtcggtgattggtgagcagggcggaatgagtgccatgctgtatctggcgccgctgattgctattctgggcatgacgaagtcgtttttggggatctcgatgccggtggcagaaacttttaacgtgctcgccagtgatctgttcaaccttaagcgcaatagttaa

SEQ ID NO: 122308 - DNA, 795 bp, Enterobacter cloacae; identical to SEQ ID NO: 34941

SEQ ID NO: 122309 - DNA, 258 bp, Enterobacter cloacae; identical to SEQ ID NO: 34942

SEQ ID NO: 122310 - DNA, 948 bp, Enterobacter cloacae
atgagctatcagcagttgaccgaggggcaacgataccagttatcggtgcttcgcgcacaggggatgtccatccttgccaccgcacgcgccattggcgttcatcgctccaccctctaccgggagctgcgtcgtaacgccgggccgcagggctaccagccagacaatgcgcatcagcacgccacccaccgacgggccagtgcggccaaatctcggctatctgccgatgtcatccagtttgtcgagctgacactcgcctggtggtggagcccggagcagataagcgcggtgggcaagcagataggcctcatggtgagtcacgagtggatataccgccatgtggccgccgacaaagcccggggtggccagttgtaccgccatctgcgccagggccacaagcgctaccgcaagggggcgagcagcctgcgttctcccatcaaggcagcccgctctattgatgaacggccggctatcgtcgatagccgggagcggctcggtgattgggaggcggacacggtgctgggcaagcaaggcacaggtgcactggtcaccctggtggagcgcaagagccggctctatctggtcaagcgggtcgcgagcaaacaggctggggtggtgcgggatgcgataatcgagatgttaacgccctacatcgagcaggtgcataccatcacctttgacaacggcggcgagtttgccgaacacaaggcgatagaggaagcgctgggtgccgagacttactttgcgcacccttactcttcgtgggagcgcggtctgaacgagaacagcaatgggctgttgaggcagtttatcccaaagggaacagacctgagagaggtcacggacgaggatgtcaggagagcggagcagtggctcaacctacgacctcggaaatgtctcggattcaggcagcctgtcaaggtattcgaagagtaccgtcaggcggcatag

SEQ ID NO: 122311 - DNA, 1149 bp, Enterobacter cloacae; identical to SEQ ID NO: 34944

SEQ ID NO: 122312 - DNA, 1173 bp, Enterobacter cloacae; identical to SEQ ID NO: 34945

SEQ ID NO: 122313 - DNA, 963 bp, Enterobacter cloacae; identical to SEQ ID NO: 34946

SEQ ID NO: 122314 - DNA, 948 bp, Enterobacter cloacae; identical to SEQ ID NO: 34943

SEQ ID NO: 122315 - DNA, 285 bp, Enterobacter cloacae; identical to SEQ ID NO: 118664

SEQ ID NO: 122316 - DNA, 282 bp, Enterobacter cloacae
atgataaatattttctatagtccggaacgcttcgtgcagtccgtcatagaggatcgcggcttcctctgtgagctccaggctgcgggactgtcgtctgaaaagcgtgatacccagacgctcctcaagaattcttatttgctggctgacggcggctggggtaacgaacagctctttcgcggcccgggtaaagctgaggtgcctggcggcagcttcaaaagatttgagggctttcaggggagggttttttcgcatagcacatcctttagattttctttaaattaa

SEQ ID NO: 122317 - DNA, 1161 bp, Enterobacter cloacae
atgaagagaaaatcactgtttctggccgtggccactctgctggccgccagttatgtcaatgctggccagctgaccaccgagcagcaaattgctgagaagtctgcacagatatttcatgacactaatcctccggctatggtcatggccattattcagaatggtcaggtgacgtatcacgcctatggtgaaacggctaaaggcaaccataccagccctacgcccgactcgctgcttagggtcggctctatgtcaaaaattctggcctcagagctgctggttaagcttgccgataagggagcgctcgggctgaccgacccgcttcagaaatatgctcccccggggatgacggtccctgaggtgagccatggaaatcccgttaccttgctttcgcttgccacacataccagcgggctgccgcggcttatcccgggccaggctcctgccggcgcagctccgttcacgtggccggacaggcctgcccgctggcgctggctgaatcagaagccgaccctgaccgcgccgtgggaacaggcgcagtactctaatgtcggatacgatctgctggccgatgctatggaagctgccggtaaaaaaccctacctgcagcttatgcgggaaaatgtgacgggcccgctgggtatgaaagacaccaccacccagcctgacggggctcagtgtcagcggctcatggaaggctctggcatcgatcctgccggtccctgcacggacacgacggcagccgccggcaacggcgggatgtattccaccgcaagggacatggcgagctggatgcagcatctgttgaatatccgtcatcctgataagccagcgctcagggccgttcagcaggccatgtatgtacagagacagcaacttaaatccattacgggtctggatttagccgggaaagcgcaggggctgggaatgggctgggtctttatccggccttcggttgactccccggtaatgatccaaaaaaccggcggcggcggcggttttatgagttatatggttctggtgcccggcgagaaaacggggatctttgtctctgtgacaaaagtggatctggatatgttctcaaccttaacgcgtgaaacgaacagccttatcccgctcctgttaaaagcagctcacggggaacgcgtcagtccggcttcataa

SEQ ID NO: 122318 - DNA, 1749 bp, Enterobacter cloacae
atgataaaaaactccgcgatgaaaaataaacaaagtattcgcacgtcatcacctgagaagggattcagcaacgtcagatataatattcttcttgccggtatcgcattaatctttatcgtgctggttgccaggctcaccggacttcagctttttgaccacgctgtcctggaaaatgcggctgaccgtcgatccgtacggacacttgcactgccagcacagcgcggaaccctgaccgatcgttacggcgttgtcctcgccatgagcgtgccggcacgtgacatcattgctgatccaaaacgcatcgctgccgctcatccggacttcgcggaagccagatgggcttttctggccgacttgctggatatcacgcctgaggaacttcgcagaactattcaagataattcggacaaggaattcctgtttctgaagaaaaagtcgcccctgtcattgtccagggccgtgtcacagctgcatctgccgggcataagtcagaaatacaatgaaaatcgctactatccgctgggtgaggcatcagcctcgctcattggtgtgaccggtgccgaaaatagagggctgagtggtattgagcagagctttaacaccgttctgagaaaggacttcggggtgaaaaaaatacgcaaaaacgccagggggggcgtcatcagcgtgatccagtatgacgctccggaaactgcaccggcgatcaggctgagtattgacagtgtgcttcagtatattgtttacagccggttaagggagggggtcgagcaacatcacgccgagtcaggcgctgcggtgcttgtcagcgtaaacaccggcgaaattctggctatggcatcctatccgtcgtttaatcccaaccgtttttccggtgccacttccgctgaaatgcgtaacgtggcgattaatgacagctttgagccgggttcaacggttaaacccttcgtcattcttgaaggcctgcgccgccatattatcagcagcagcacgcttcttgacacaaggccgttcagggttgacggccatcttatccgggacgtgggatactggccggcgctgacgccgaccggcatacttcagaaatccagtgataccggagtttcacatattgccctggcgatgccttcggatgcgctggtaaaaacgtattcatccttcgggctgggaaaaccgacagggctgggccttcccggtgaaagtactggttactttccgttcagtcgccatcgatgggctgatattgagcgcgccaccttcgcttttggctacggcctccgggtaaccccgctccagttagccagagcctatgccactctcggggcctgtggcgtttatcatccgttatccgttacacggttatccgcgccggtgtacggtgagcaggtggcggacccgaagcttgccgatgctgtaatcagaatgatggaaagtgatgtgttacccggcggaagtggcgtaagggcagctgtaccgggctaccgtctggcaataaaaaccggaaccgcagagaagttaggtgccggtggaaaatatgacggggggcatattacctatacggcaggcgtcgcgccggcgagccgtcctgaagtggcactggttgtggttattaacaatcccaaagcgggacagcattttggtggctcagtggcggcgcctgtcttcggccagattatcggtccggtgcttacccggctgaagattgcaccggatgctttacgtgctccggtggtacaccgacagtccggctga

SEQ ID NO: 122319 - DNA, 501 bp, Enterobacter cloacae; identical to SEQ ID NO: 83644

SEQ ID NO: 122320 - DNA, 786 bp, Enterobacter cloacae; identical to SEQ ID NO: 16905

SEQ ID NO: 122321 - DNA, 1515 bp, Enterobacter cloacae; identical to SEQ ID NO: 52478

SEQ ID NO: 122322 - DNA, 429 bp, Enterobacter cloacae
ttgcatggccagctcggtcagcaactggacagcctgccggtagtggccaatcgtgaacggctggaagccgaacaccgtttgcagctcgaccaggtgctcgcgtcgggtctgctcacgctgcccgtactcgtcccagctttcgatgccgaccttgagctggttggcgaccagtctcagcaatggcgggaacggtggctcatcagcgccaaggatgacgccgggaaagcgcaggtagcagagctgcaccgcgaagcccagccgattggccgggccgcgccgctgccggatgatggagaggtcgctttcgctgaacgtgtagtgacggatcaactcatccttggtgtccggcaacgccagcaggctttcgcgctcggcggcggagaggatcgaacggcggggcatgcggtttccttcttcttgaaaacgtag

SEQ ID NO: 122323 - DNA, 492 bp, Enterobacter cloacae; identical to SEQ ID NO: 118624

SEQ ID NO: 122324 - DNA, 324 bp, Enterobacter cloacae; identical to SEQ ID NO: 118623

SEQ ID NO: 122325 - DNA, 279 bp, Enterobacter cloacae; identical to SEQ ID NO: 118679

SEQ ID NO: 122326 - DNA, 279 bp, Enterobacter cloacae
gtgaaacgcatcaccgtgaagccgggagaagggctgtcggtgcagatgcaccatcaccgcgccgaacactgggtggtggtggcggggaccgccaaagtgaccatcgacggtgaagtgaagctgctcggtgaaaacgagtccatttatattccgctgggggcgacgcactgtctggagaacccggggaaaattccgctcgacttaattgaggtgcgttccggctcctatctggaagaggacgacatcatccgcttccaggatcgctacgggcgcgtgtag

SEQ ID NO: 122327 - DNA, 228 bp, Enterobacter cloacae; identical to SEQ ID NO: 10398

SEQ ID NO: 122328 - DNA, 1545 bp, Enterobacter cloacae; identical to SEQ ID NO: 23311

SEQ ID NO: 122329 - DNA, 186 bp, Enterobacter cloacae
gtgaaaatcggtgaacgggtgcgcaattcagtgcgcggccgtgaggcgatggcggggtgtcggggcgcagccctgacctgggtatttgtgatgccggcgcgtgcgcggtattacaaatacacatcctgtcctgagtggttccccgggaacaggcaaaaaaaaaccggggagctgcccggaaggtaa

SEQ ID NO: 122330 - DNA, 186 bp, Enterobacter cloacae
gtgaccagacaggaatccgccgccctcaacatggccaaatttatccgctcacagacactcctcctcctcgagcggctcgaacagatggatctggatgaggctgccggctgctgtgagcacctgcacgatcaggccgaagcactttacaccatgctgaacgcacagacaggcgaggaagatgcgtga

SEQ ID NO: 122331 - DNA, 228 bp, Enterobacter cloacae; identical to SEQ ID NO: 10398

SEQ ID NO: 122332 - DNA, 228 bp, Enterobacter cloacae; identical to SEQ ID NO: 10398

SEQ ID NO: 122333 - DNA, 186 bp, Enterobacter cloacae; identical to SEQ ID NO: 122330

SEQ ID NO: 122334 - DNA, 186 bp, Enterobacter cloacae; identical to SEQ ID NO: 122329

SEQ ID NO: 122335 - DNA, 480 bp, Enterobacter cloacae
atgaaagaaaacgcgtcaggagaaaatgtaatacaggatatattccgcttcctcgctcactcactcgctgcgctcggtcgttcggctgcggcgagcggtacgggcttacgggtggagcagaaatttcctaggggatgccagctaggggatgccaggaagatacttagcgaagaaggcataaggccgcgccgaagccgtttttccataggctccgcccccctgacgagcatcacgaaatctgacgctcaaatcagtggtggcgaaacccgatgcggcttaaagataccaggcgtttccccctggtggctccctcgtgctcccccgcattcctgcctttcggtttaccggtgtcactccgctgttatggccgcggtttctcattccacgcctgacactcagttccgggaaggcagttcgctccaggatggactgtatgcacgaaccccccgttcagtccgactgctgcgccttatccggtaa

SEQ ID NO: 122336 - DNA, 228 bp, Enterobacter cloacae; identical to SEQ ID NO: 10398

SEQ ID NO: 122337 - DNA, 228 bp, Enterobacter cloacae; identical to SEQ ID NO: 10398

SEQ ID NO: 122338 - DNA, 228 bp, Enterobacter cloacae; identical to SEQ ID NO: 10398

SEQ ID NO: 122339 - DNA, 186 bp, Enterobacter cloacae; identical to SEQ ID NO: 10399

SEQ ID NO: 122340 - DNA, 228 bp, Enterobacter cloacae; identical to SEQ ID NO: 10398

SEQ ID NO: 122341 - DNA, 312 bp, Enterobacter cloacae
atgtgtatttgtaataccgcgcacgcgccggcatcacaaatacccaggtcagggctgcgccccgacaccccgccatcgcctcacggccgcgcactgaattgcgcacccgttcaccgattttcacgcattttcctcgcctatctgtgcgttcagcatggcgtaaagcgcttcggcctgatcgtgcaggtgctcacagcagccggcagcctcatccagatccatctgctcgagccgctcaaggaggagaagtgtctgtgcgcggataaatttggccatattgagggcggcggattcctgtctggtcactggtga

SEQ ID NO: 122342 - DNA, 837 bp, Enterobacter cloacae; identical to SEQ ID NO: 34951

SEQ ID NO: 122343 - DNA, 246 bp, Enterobacter cloacae; identical to SEQ ID NO: 81405

SEQ ID NO: 122344 - DNA, 186 bp, Enterobacter cloacae; identical to SEQ ID NO: 10399

SEQ ID NO: 122345 - DNA, 228 bp, Enterobacter cloacae; identical to SEQ ID NO: 10398

SEQ ID NO: 122346 - DNA, 228 bp, Enterobacter cloacae; identical to SEQ ID NO: 10398

SEQ ID NO: 122347 - DNA, 321 bp, Enterobacter cloacae
atgaatgcgaacggattcaagaaattcgagcatgaccgtccttacggccggttcagtttcagacaaaatctgccggtatgcatccagcatcatggctccggcatccccccggcacgccggagccagcccgaaacaacagacacaaacaggtgtcgctcatcatcaagagtcatcaggtctccggaagaaaaaccaaacatggcttacctcctgttaacggcaacgcagaagaaaggtttacagggtagcgggcaggaaaataaaaaaattgcagtcagcccggaacggctgctgaaccggtacaggcgggttccgggctga

SEQ ID NO: 122348 - DNA, 186 bp, Enterobacter cloacae; identical to SEQ ID NO: 10399

SEQ ID NO: 122349 - DNA, 522 bp, Enterobacter cloacae
atgtctactcgtcgttttaccactaccgctctggcagtagtgttgtctttaacatttgctgcagctccggtcatggctaacccgggtaacgggaatggcagtggtcacgggaacagtggcggacaaggtaatggcggcagtcacggcaattccggtagtcatggcaacggaaattccggtacccacggtaataaacaaaataacggtcaggaaaatccaggtaaatcgaataaaagcgtcagtgacgatgtcgacgcccgtgtgagcttcgatcatgcccgtcacctggcactcaattacggcttaacaggttatgagtcactgcctccgggtattgcgaaaaacctcgcacgcggtaaaccgctccctccgggcattgcgaagaaaaccgtgccggcttctatgctgggccagcttccttcctatcctggctatgaatggcgtgtcgtcggtgacgatctggtcttaattgcgctgagtactgcggttgtgaccaccattattaatggcgtcttcagataa

SEQ ID NO: 122350 - DNA, 693 bp, Enterobacter cloacae
atgaaagcatttgatctccagcggatggcgtttgataaagttcctcccgaatttttgggcgaagtggccctgcgcagcctgtatacctttgtattggtctttctgtttctcaaaatcaccgggcggcgtggcgtccggcagatgtccctctttgaggtgctgattattctgacgctgggttcagcggcgggggatgttgccttttacgacgatgtgccgatggtgccggtctttatcgtttttgtctcactggcgctactttaccggcttgtcatgtggctgatgtcgaaaagtgaaaagctggaagatcttctcgaagggaagccggtggttatcgtcgagaacgggcggctggcctgggaaaatgtacagagtgccaacatgaccgagttcgagttttttatggaactgcgtctgaatagcgttgaacaactcgggcaggtgcggctggcaatcatggaaacgaacgggcaaatcagcgtctattactatgctgacgacgaggtgaagccggggctctgtattctgccggatatgcttattgagcgtttcacgaccgtgcctgagtcaggcgaatatgcctgtataagatgtagccatgttgtggcgatgcagccgggcgatcatcaattatgtccccgctgtacaaatccggaatggacgaaggttagccgggccaaacgccttacctga

SEQ ID NO: 122351 - DNA, 2265 bp, Enterobacter cloacae
atgggcattcccgcgataagtctttgcgccattctggcgatcatgccgttactctggttacccgtcctgcctgaacgtcataccgtgtgggtaatgatagccggtgggatagcgctggccgcccagcgacacaacgtcctgaagtatatggggatcatggtgttattttgtgtctggggtcttcttgctgcgcaggaaagcgtctggccgatgcaacatttaacgacgggagcagtgcaggcagagatagaaatcacggccactgatggtgcaacaatgcatcagggcaacattctgcgtatcgatggtcagcgctggtgggcatccacgggcgtgacgctgtatggcaattacctgccgcaaaaggtatgtgccggtcagcgctgggctatgtcgctcaggctccggcctgtgcatggcgagctaaacgacgggggatatgatccccagcgaagcgcctttgcccggcaccagacgctcagcggacgttttacgcaggcgaaaatcgtcgatgaaaactgcagcttgcgtgctcagtacctgatgtcactgcaacaccggctttctgcttttcactggggcgcggttatgcttgggctggggatgggagaacgtctggaggtgccccgggaaattaaagatctgatgcgcgacaccggcacgctgcacctgatggcaatttcgggtctgcatattgcgctggccgcatccatcatctggttacttgcgcgtgggcttcagttcttgatgccgggccactggatccactggcagattcctctcctggccgggttgctctttgccgctttctacgcctggcttaccgggctgcaaccgcccgcattgcgaacggttatcgcacttgccgtgctggcggcattgcgcattggcgcccgtcagtggtctccctggcaggtgtggtgttgctgtatcgcggcaatcctgataagcgatcccttagccgtgctttctcaaagtctggccctttcagcgtttgccgtcgccgcgctgattttctggtttcagtggctgcctcttccccgcgggcaccgggttcgctggttacagcctctggtgaatctgctctatctgcaaactggcatgttgcttctgctcatgccattacaggtgctgatttttcatggattcagcctctcttccctggtggctaatctctttgccgtccccctggtcacttttgtctgcgtaccgctgatcctttccggaatgttgcttcatctgttgccgctgacggcgctggaaagtgccctctggtttgcagccgataaatccctgggggggttgttctggatgctgatgcgcttgccggatggctggcagaatgtagatgaacggtggcaatacctgacgttattgccctggcttgccattattggctggcgctttcatgcctggaaatccgttcctgccgtttgtctggcagggagtgtcttactggcatttccactctggcgaacggtgagaagtgagggctggacactgcatatgctggatgttgggcagggactggcaatggtcattgaacgccacggtaaagcccttctttatgataccgggctcgcctggccgggtggtgatagcgcccggcagttaatcattccgtggctacgctggcaccatttgcaaccagaaggcgtcatcctcagtcatgagcatctcgaccatgcgggcggcctggcgacgctgcaaaaaacatggcccacgttatggataagaagcccgttaggccgggcggaacatcggccttgttttcgcgggcagagatggatgtgggaagggttaaccttcaccgtccactggccacctgagggctattccgaaagggggaacaatcgctcctgcgtggtaaaaatcgacgatggtgagcagagtgcgttgcttacgggggatattgaagcgccagcggaacagactatgcttagccattactggcgtcatctgacgtccactgtaatacaggtaccccatcatggcagcaatacgtcttcatcattgccactggtacagcgggtagaggggaggatcgcgctcgattctgcggcccgctataacgcatggcattttccgtcggcaaaagttatcagacgttatcgaaaagagggctatatctggcacgataccccccattctggacaaatatcggtgacattctcgcaacatcgatggcaaatacagcgcgtacgtgatgaatatttaccgcgttggtatcatcagtggtttggcgcgcccggagataacgggtag

SEQ ID NO: 122352 - DNA, 978 bp, Enterobacter cloacae
atgattgcacgcatctggtccggtgaatcaccgctgtggctgctgcttctgccgctttcctggctttatggcctggtgagcggcgtcattcgtctgctttaccgtctggggttgaagcaagcatggcgcgcgccggtgccggttgtcgtggtgggtaacctgacggctggcggcaacggtaaaacaccggtggtgatctggctggtggagcaactgcaaaaacgcggtatacgcccaggcgtggtatcgcgtggatatggcggaaaagcggcgcagtatcccctgttgttgaccgcggaaactacgaccgctgaagcgggtgatgagccagtattgatataccagcgtacaggtgcacctgttgcggtttccccggtacgcagtgatgccgttcaggcacttcttgccgaacacacggtagacattattattactgacgatggtctgcagcattacgcgctggcgcgtgataaagagattgtggtcattgacggggttcgccggttcggtaacggctggtggctacccgccggaccaatgcgcgaacgtgcttcgcgtctcaggtccgttgatgcggtgattgttaacggtggagaggccaaaccgggtgagatccctatgcatctcaggccgggaatggcggtgaatctattgaccggagagcgccgtactgtctcgttgttacccgcgctggtggccatggcgggtatcggtcatcctccgcgtttcttcgcgacgctggaacagtgtggtgcccggcttgaaaaacgcgttccgctggccgatcatcaggcgctggtgccagatcaggtcgcggctctgactgctccggggcagacgctaatcatgactgaaaaagatgcggtgaaatgccgtgcctttgcgaaggataactggtggtatctgccggttgacgctgaactcagcggtgagcaaccggaacaattgctcaaggaactgattgcgttagtgcagtaa

SEQ ID NO: 122353 - DNA, 780 bp, Enterobacter cloacae
atgcgggatcgcaattttgatgacatcgcggaaaagttttcgcgcaacatttatggcaccacgaaagggcagttgcgtcagacgatcctctggcaggatctggacaacatcctggcctcgtttgaggggcaaacgttgcgcgtgctggacgctggcggcggtgaagggcagacggctattaaaatggcccagcgcggtcatcacgtaacgctttgcgatctttctgctgagatgatcgcgcgtgcgacgcgtgccgcagaagagaaaggtgtgagcgacaacatgcattttatacaatgcgccgctcaggacatcgcacagcatttggaaacccaggttgatctgatattgtttcatgcagtgctggagtgggttgccgatccgcaaagcgtgttacgcaccctgtggtcgatgttgcgcccgggcggtacgctgtcactgatgttctacaatgctaacggcttcctgatgcacaacatggttgcgggtaacttcgactatgttcaggtcgggatgccaaaaaagaaaaaacgcacgctttccccggattatccgcgcgatccgcagcaggtgtatggctggctggaagagattggctgggagataaccgggaaaacgggcgtcagggtgtttcatgattatctgcgtgaaaaacacaaacagcgtgactgttttgacaccttaacagaattagaaacgcggtattgtcgtcaggaaccttttgtcagtcttggccgctatattcacgtcaccgcgcacaagccgcagatgcaaggataa

SEQ ID NO: 122354 - DNA, 1089 bp, Enterobacter cloacae
atgatgaagcgcaatattctggcagtggtaatccctgccctgctggtagccggtgcagctaacgctgcagaaatctataacaaaagcggcaacaaactggatctgtacgggaaagtggttggtgagcacgacttcgttacctctggtgacaacactgacagcaacgacgctacttatgctcagatcggtttcaaaggcgagactcaaattaacgaccaactgactggtttcggtcagtgggaataccgtgctctggcaagccaggcagaaagcaaccagactcagcgtacccgtctggcgttcgccggtctgaaagcgggtgatgcaggttccatcgactacggccgtaactacggtatcgtatacgacgtagaatcttacaccgatatggcgccatctttctcaggtatgacctgggcaaactactctgacaacttcatgactggccgtaactctggtctcctgacttaccgcaactctgacttcttcggtctggttgacggtctgagcctgggcctgcagtatcagggcaaaaacgagcgtactgacgtgagaaccgctaacggtgacggtttcggtacctctgtaggttatgagttcggtgaaggtttcggcctgatcggcgcatacagcaactctgaccgtactgacgggcaatccgcagacggcaaaggcgagaaagcggaagcatgggctgttggtgctaaatacgatgcgaacaacatctacctggcaaccacctatgctgaaacgcgtaacatgacccgtgaagacgacggttctttcgcaaacaaaacgcagaacttcgaagttatcgctcagtaccagttcgacttcggtctgcgcccatccgtgtcctacgtgcagtctaaaggtaaaaaccttgcacaacgtggcaccttcgctggcggcgatgctgacctgcagaaattcgttgaactgggtgcaacttactacttcaacaaaaacttcaacatctatgttgattaccagctgaacctgatcgacgacaccgactactctcgtagcgtgggtatcgtgaacggtaaagacgaccaggttgcaatggctgtgacctaccagttctaa

SEQ ID NO: 122355 - DNA, 627 bp, Enterobacter cloacae
atgaaaaagatatcttatgaacggatttataaatcccaggaatacctttcacccttaggtgaaatccaccatcgtgcgctgttcggggggtataccctggccgtagatgatgccgtcttcgctatggtctccgacggggaactgtatctccgggcctgtgaggaaagtgcaaaatactgtgtaaaaaatgcctcgtcattcttaaccctcatgaagcggggtcgtccggtgctgctcaattattatcgtgtcgatgacggactgtggcaggacagagaacggctgcttcagctctcctcgttcgcgctcaatgcggcacgaaaagagcgttcgcagcgtgatcggcgaaaccgcctcaaggacttgcccaatctcacctttcagcttgaagtgctgctctttgaagccggaatcactgatgaagagacgctgcgggagctgggtgcccgtgcgagctggctgaagatgcgggcgaagaataaagcgctcagcattaaagtgctcttcgcactggaaggggccatcgccggacttcatgaagcggcactcccggcgggaattcgccgggagttaacggagtggtttaatgcgctgcctgagccacaggagaatcactcctccaggtag

SEQ ID NO: 122356 - DNA, 810 bp, Enterobacter cloacae
gtgtacgtcaaagcgcacatctcaaccatgcatcccatgcagatgcatgagggcaaaacggcagaatatgtctatatgttagtaaacgtgattatcgaaatatttggatacattaccgcggccgagtcatttcaacaggagccctctatgaaaaccggcattgccactgctgtgattgcgttagtgatgccagtttgcgtctttgcgaccacgctacggcttacaacggatattgatctgctggtgctggacggaaaaaaagtgtccagttccttgttgcgcggtgcggacagcatcgaacttgataatgggccacaccagctggtattgcgggtagaaaaaaccatcggcctcgctaatcatgaacaacgcatgtatatctctgcgccgctgattgtcagttttaatacccagcgggtcagtcaggtgaacattaccctcccgcgtcttgaaaccgaaaaagagtcggcggcctttgacgcctctccgcgccttgaactgctggacggggattcaatgccgattccggtaaaactcgatattctggcgttaacctcgtccccgaaaggcaccgattacgaggccgcgaccgaaatctataacaaggcaggcaaacgcgcttcccttccacagtttgccaccaggatggccgacgacagtacgctgctgtccggtgtctcagagctggatgttattccgccacagtcccagacgctgacggaacagcgtcttaaattctggttccagcaggccgatcctgagacccgggcccgttttttacagtgggtaaagcaacaaccttcatcataa

SEQ ID NO: 122357 - DNA, 558 bp, Enterobacter cloacae
atgagaaagcgccttgcaatagcagtaaccaccctggcggtggtcagtgttcatgttttagcggcatcgtctttcaccatcagcagtcaggatctggccagtgaacgcccgttgtcgcaacagcaggtgtttgacgggtttgggtgtcacggtgggaatcactctccacaactggcgtggaaaaatccgcctgtcgggacgaaaagtttcgcagtcacggtatttgaccctgatgcccctaccggaagtggatggtggcactggacggtggtcaatattcccctccagacgctgacgcttcccgccgatgccggaaacccgaagggggagacattaccggccggggttgtgcaggggcgtaatgatttcggttattctggtttcggcggcgcatgtccgcccaaaggggataagccgcaccgttatcagtttaccgtctgggcgctggatgtggataaattgcctgtcgacaggaatgccagcggcgcgctggtgggttttatgcttaacagtcacgtcctggcaaaggccagcttaaccgttacctacagcagataa

SEQ ID NO: 122358 - DNA, 789 bp, Enterobacter cloacae
gtgcagggagtccagtttcaacataaacatttgacggccggtgaagtgagtgccagtaaaatgcatcacctgcaccaggttaaactctttcttcctgccatttgccatatcactcacggcagtaaagtgattgttcaggacgataaccgcctggtggcgacgaaagcgtcgctgatcattattcccgccaatacgccgctggagatcataaatcaacccgcgaatggtctctttcgctctgacttattgatgttgtcaccggagcttctggcggagtttaaaacgcattacctgaaatcctggccgcgcacagaattgcattccctctgtgctcccctgagtgaggggctggcatttatgtggagtaacctgctgcatgccgtgcgtcaggatttaccagaggcgttacaaaagcatcaggctttcggccttttgctggcattgctacatgacggcgtcgcagggccgttgcttatagagcgtaatagccacctgtccgagcaggtgcggcagttcatcatgctgtcgcccgccagggcctggactgcacaggacgttgccagccgcctggcattgagcgtgccgacgctacgcagacggttacgcgaagagtcgcagagttttcgccagattgttgaggaggtgaggatggccgttgcgctgtcacacttacagtcaacccggttacctattggtgaaatcgcattacaatgtggttatctttccagctctcgttttactgcccgtttccggcaacattatggctgtttgccgaaaacgctacgttaa

SEQ ID NO: 122359 - DNA, 282 bp, Enterobacter cloacae
atgtcaaaaatctgcacaattgcctgggtacacggcatggttcagggcgtcggattccgttacagcacgcagcgcgaagctatgcaactggggctcacgggatacgcgcgaaacagggatgatggcagcgttgaggtggttgcctgtggtgatgcggagcaggttgaaaagctggtggtgtggctgaaagcaggtgggccgcgcagcgcgcgggttgataaggttttaaccgaaccccatcaacctggccgggaatacgttaacttcggtattcgctactaa

SEQ ID NO: 122360 - DNA, 270 bp, Enterobacter cloacae
atgcataagggcgtacctgtgaagctgattcccttagatcgtgtggctacatccgataaccatgaaaatgtaaccagacgactgaatgctctcattgatgaaaacaggcactgcaatcgtgatgaagatgagatgtttgctattaactattttgagaagggaacgactcacgtcattaaacgaccagaacgggtggataaccccaatgacatcatcgctggcattatcctggaacaccaggagcaagatgtaacagatgccggttactaa

SEQ ID NO: 122361 - DNA, 501 bp, Enterobacter cloacae
atgtctaactcttcttttcagtccgaaatacccaaggcacgtattaatttaaagcttgatttgcatacgggcggagcgagcaagaaaactgagctccccctgaaattactggtggcgggagacttcagtaatggtcaggagactgcaccactatcggagcgtagaaaagttaatctgaataaaaacaactttgactctgtactttccgaatattccccaatcgtaaatattaccgttaaaaacacgcttgctggtgatggcagtgaagacaacatcaatctgacattccagagtattaatgatttctctccggagcaggtttcgcggcaaatacctcagctgaaggccatgctctccatgcgcaacttgcttcgcgatttaaaagcaaacctgcttgataaccaggctttccgaaaagagctggaaaaaattcttctcgaccctgcattaagtgcagaactcagagccgaactctcagccctggctccgaaacagccataa

SEQ ID NO: 122362 - DNA, 1350 bp, Enterobacter cloacae
atgaaaatatatcgtccactgtggaacgaggggactttactgtcccctcaacagttccagcagcaggctgaatgggagtcttttcgcggtgccggtgcatcagcgctagcatccccattcccctggggggtagaaaagattgagtttaatgacagccttctttcgtctggtctgatccagattacgcagttacgcctctggctggacgatggatcgctgattgattcacaaaggagcgatctgcctccacggccacgggagttagatgccagccagctggcaggtctcgattccgtaaccgttgtcatcgcactgcctcacatgcagccgggtattgccaacgtagaacaggaaggtgttaccgcagaccgcccgctccgctatcgcgaggaatgggtgatgttgcaggatgccttcgggtccgaagaagaatccatagccgttgcccggtataatttcaccatccggtttgcccatgaaagcaatgattcctggaaagtgtgcccggtggccagactgatccgtgatggacaaaatgcatggcgactggatccgtcctttattccgcccgttgcgtcttttgcggcaagccctgtccttcgcgaacgtctggtgctactcaatcgtcagttacgctcccggcgccagcgcctgatgacgatgcgtcgtgaaagcaacgaaaggctcgccgactttgccgtcgccgatgtttcccttttctggttgctgaatgcactgaattctcacgccagcgtgctgacagaatacgaacgttttccttcccggccacctgaacaggtgtgggcggagcttgcacgtctggcaggcagtatgctgaccttttccctgaaccatgatcttgacgccattccgggttatgaccacgaggaaccggccaatgcgtttcctccgctgtttgacctgatcacgggtttgctggaggccagtctgccatcccgggtcattgccctggaaatgtcccgcccggacggacagacatggaaagccaaccttcacgatatccgcctgcgtgaagaggccgacctctggctctctgtgcgctccgatatcccggcctggcaggtcgccgagaaattccctgcactctgtcaggcaggttcacctgatgatgtcagcgagatctatggcgcggcacttaagggtatcccgttgatcccggtgagcagggtcccggcagcgttgcctgtacgcatggaaaaccagtacttcgcactcgatatggaaagccctgctgcgcatgaaatgcaggagcagggcgtatgcatgttctatgtgcctgagttgcttggtgctcttgaacttgaactgtttgcggtattgcgctcatga

SEQ ID NO: 122363 - DNA, 690 bp, Enterobacter cloacae
atgagacaggatatcgacatcgaccagctgatggcggagacctggctcaccgtcactatgcttaaaaaaggtgccgttacgcttaatggcactgcgctttacaacaaatgcgttaaacaggttgaaagtgtgcgagaagcgctggagcgtgccgggtatgacgacgccagtgtggagcatatttcctacgcacaatgtgcattgctggatgaaacggtgatgagccgtaagtctgaaaaaggcgaggaaggagaggagccgaaagttgatgaaggccaagtggcctggcgtaaagcgccgcttcaggcccgtttttttggctcattccgggcaggcgaagcgttgtgggatcggattgcagaggttctgcgtcagccctcacctaacccggccgttttaacctgctatcacagggtgatagcgctgggttttcaggggttatacagcctgaaaacggtcagccagtcggagcgtgatgaggttgtgaaagccctttctgaacgggtttctccgcctgatgcagacctgtctctggttgttcaccggatggggaaacatcgctggagtctgatgcgctcagtctggttctggatagcgctcgccgtcattcttaccggcgttatctggtggggtggtcacctctggctccagtcactgttgtcggcacaaataccggagctgcatggctaa

SEQ ID NO: 122364 - DNA, 1680 bp, Enterobacter cloacae
atgcgtagaacagtcatcattccggtcgtcctccacgccctggtagccgttgccacgttgctgtggttgctgtggtatttcatcccgacaggcaacgtttttaaaggcctggccactctgctgatcctccttctggcaggctggactgtttttaaaaactgtcggagtgaagagcacacatctgacgttaccctcccggctgctgaactgccattactcgacacccaaggccccgttgtactggtgtgtggtgacatgctggaagcgttgttccagggaggccctctgcgtaaaacagcccagggatggtggcttcgggccggtgacgtcagccggttaactgacgttgtccgcagcatacagaagcaattccctcgacaggttggtcagctttcggtgatgtatcgctgcctgtcagatgaacatcaggatgaagcggtactgcgctccacactgaaaacgctccgccagcagtgtaaacaaattaaatccctgacgggtttaacactgccggttgtggtgaatgccgaattttccgggcccgaaacgccgtggatcatcgttcgcggtgacaagccgatagtctgtccggttaatgattcgcctcaggcgtttattgactggcagcaggcggaagacaatatcctgctactgccaacggtcagccaggcattttcctttatccgtaatacgctgactgatgagctagagaaaccggaccggctaacgccgcctgtacgtgttttttccgtggccatgcgcctcggcgtggtcaatcctgaggctcagtcagtctggtccacctggctttgtgcccggacctgcttgcagttttcccgccagcccggtcagtcagttctggcaacccttttcccggatgccgttctgccacttctggcaccttttgcatcaaccgttcagggggggcagcgtacccgccgcctggtgctgctgatgtggctgtgcgcgctgaccgcattgggtatttccgcgctcaataatcgtgacctcatccgtcaggtgagtgccgatttacagcgctggaacgcgatcccgatgaatcactaccgtcctaaagcagactcgctggctgctctgaaacaggatgcacttctgcttgaacgctggcaacggcagggagagcctttacgttacagcctgggctattacccgggacaacgcctgtggctggccttgcagcaggccattgatacctggacacctccaccagcccctgaaccaaaaccggtccctaaaatagttcgtctcgacagcatgtcgcttttcgattccggcaaatcagcgctcaaagaggggtcaaccaaaatactcgtcaacgcgctggtggggatcaaagccaaaccgggctggctaatcgtggtcagcggccacacagacaataccggtagcatacagctcaatcagaccttgtctttacaacgcgctgaagccgtccgtaactggatgcgtgataccggggacgtaccggagagttgctttgccgttcagggctacggcgacagccgaccgattgcttcaaacgatacgcctgatggccgtgcgcataaccggcgtgtcgagatcagtctggtaccgcaggctgacgcctgtcgtctgccaggctcaaaacatgcgtcacaggatgtacgtgacgtttcaactcaagaaatggagaagtaa

SEQ ID NO: 122365 - DNA, 2358 bp, Enterobacter cloacae
atgaccgattctttaataagcaaggcaaacagccagatacaacaactgctgggccagtcacgctaccgcgttgacgtgcatggctgcactgagtttctggatgtggtgagcttcagtgcggtggagtcactcagccagccctggcagtatgacgtggcggtgacctgcacctctggggatatcgcctgcgacacgttactgctgaaaccggcgtcatttactttccagacacccgtgtttgacgggacaccagcgctgccggtccggacgatattcggcgtggttaagtcatttcggcgcgtgtccacctcgaatgatgagacccgttacgcactgacgatcgttccccgtatcgcccttctggactatacaaaagggagcgaaatctacctcaatcagtcagttacagaagtggttgaacgggtattgcgtaagcacggacttgaaggtcctgattttgagttccatctgtctcgtgactatccggcccgcgaactcattacccagtggcgggaaaccgatctggcatttatccagcgcctgctggcggaggtgggcatttactggcgctatgaaatggacagccgtcttgagcaggacgtggtgatttttcaggacagccagcagcaatatgaatttggtgtcacgctgccattacgcaaccaggccgggatgagtgacagcgggcaggagagcatctgggatattcagaccgcatataacgtggtaagcggaagtgtggccacccgtgactacaactaccgtgatgcactgacgcctcaggacagcgccgaaagtattttcagcaaagaggggatcaccaccggggaaacgtatcattacgcggaacccttcctgacagcaggtgacgctgaaagtacagataccggggcatacttcgcccgtctgcgtcacgaacgcattctgaacgcgcagtatcacgtcaaaggtcattcctccagccctcatctggcaccgggtcaggtactggaaacggacggctcattacccgatgccgtaaaaggcggtatcgtcatcaccacggtacgcaccagcggttcacgcaaaagtagctttacgctgacgtttgagggcatcccctacagcgaaaccgtctgctggcgtccggcattacttaatcgcccggtcatatccggctcgcttccggcccgagtggaaagcactcagaaaggcgatacctactcctggctcgacccggaagggcgctaccgggtgaaactggacttcgaccgcaacagtccggaacagggctatgcctatttgtggcttcggctggcaaaaccctatgccggtgatacctacggattccactccccgcttatcgacggaacggaagtggccatcgtatttgacggcggagacccggatcgtccctacattgcttatgccctgcatgattcagaacatccggaccacgtcaccagtgacaatcatacgcggaacgtctggcgcactccggcgaacaataagctgcggatggaggataagcgccaggaagagcatatcaagctcgcgacggaatacggcaaaacgcagctgaacatgggacacctggtcaacagccagcgtgaaaagcgcggggccggttttgaactgcgaacggatgaacatggcgctgtacgtgcggcaaaagggctgttcctgacggcggatgcgcagtccaaagcccaggggccggtgctggaaatggcacctgcgataagtcagattaaccaggccaacagccagatgcaggccctgaacagcgccgctgaagcagccggtgccctggtatccgacatcagcacccagattagcctcgtaaccgacaaaatcaaagacctccagtctgcggtcctgctgggtagtgctccacagggcgtggcatttacctcaggtgaacaccttcagctctgcagtacccgcaataccatgatcaatgcagggcagcatcttgatgtcggtgcgatgaaaaatttgtccgtgagcgttgaaaaagcgcttggtctgtttgtgcataaagacggggcgaagttggttgccaaccagggtgacatcgagattcaggctcagcacaacacgatggccctgttttctgaaaagcagctgacggtgaccagtagtgaagacgaaattattatcagcacgcctgaaacactgacgcttaacggtggtgggtcttacctgaggctgagtaagaacggcattgaacacggctcatctggtgagttcattatgaaaacgtctaactatctggtgccaggtgcaggcgcaaatcttcccaacgaaacacctaatttcagcctgacggatatcactcaggaaagcaaaatcagcagtaaatcttttaatgattga

SEQ ID NO: 122366 - DNA, 540 bp, Enterobacter cloacae
atgaaatcattgactcataaactccgcattgcatttgttttcctattttcgctttcattttcaaatttttcactggctgatgaatcaaaaagccccgagagtatagtgcatgacttttattctgcatatcttcaggataaatcaggtggtaacgaagcattagtcaaaatatatttatctgatgatttagcaaaaagcataaatgactccgccatgtgtaattatgattctgatgattcgatttccgaatcagaattagccaagaaatgtgcgcagaagcacgagtgtaaacaggataaaggtaattatagctgcgattggtatggaatttggggtgagactgatgtcaactatttcacaaaatcacaagatgtgtttttatcgtggagaacaaatataaacacttttgatgttgcacaaaaaggaaacgattcattggttgacgttgttttgggtaatggctctgaacctaaagcaagatttaaagtgtcgcttaaaaaagataatggcaattggaaaattaccagcgtaacggaatga

SEQ ID NO: 122367 - DNA, 471 bp, Enterobacter cloacae
atgttgaaggtaatgtttctctcttgtcatttactttgtgtgccttatattgctttggcctcaggtgagaggactttgtcacctgacgaagttgtaagtacgttctaccatgattacctggtcgcagaagagatgtctgacatggaatcagctaatgatctctccctgaaagcaattgctaaatatacaactgcacatcttagaaatttacgagataatgatgattcaggtgcagattattttgtcgatgctcaagatatatgtgaggaatggaaaaacaacattagtacgaaaacagtgtcagccaatgaccatattgcactggtgaatcttaaattaggttatgggaaaggtacgtctctgtatgctgttagtttagtaaaagccgggggaaaatggatgctcgattctgttaagcctacattcaaaggcagtatttattgcccccaaaaggctgaaggagataactaa

SEQ ID NO: 122368 - DNA, 2814 bp, Enterobacter cloacae
atgcttaataaggatattgcagttggcgttctgaacacacaggcgctcgcgagagctaaaattaacgctgagaactttaagaaagggattgataaaaagcttaaatacggcgagtcgaaatgtgcccgttatgttaaaaaagcattgattgctggtggagcgtctgtaaaaaactctgcgattgagtcagctaaaaactatggtccatggctgattgaaaataactttaaagttgtagataacaccacaacagttagtagtggcggtgtattcacaatttctggtcagcaaacgggtgatgtagttgtcattcaggcggcaccacatcatgtacatggtcatatggcgatgtttaatggtaagcactgggtatctgattttgttcaggaaaaaggattttatcctgctcagatatatcgcgataataagattgcttatacgctttatcgctacgcatcatcaattaatgaaaagaaaaacgcaactactctttcgaaaggaaaaataaaaatagtctggccgatcccctcaaacagccggggaagcgagttcagcaatcaggaaagtatcctctctcatttagcaggcgagtctaccgggcagtacacgattggtcgcagcggaatgtggcatggcgggatccatatcaccgaagccacaacgccatggtgtgctctgagtggtaaagctccgctggaggcgatggatttcccggtaccctttaaaggcgaacaggcgatacgctgtatggcagatggtgaagttattgcctatcgcgtctgcaaggattacctgacgctggggtgggaatccggtccactgagtttttcgggctcattcgttctggtgaagcactatattcagccgggtgagaaagaaaccagtgggctgcatttctacaccctgtatatgcaccttgcgccttactcagcttatgaggccaacgcagaaaatcagtgggtcactcaggatacactaagagcatattctgaaatggactggctgacggcaaaactgacttcagataaaacttctccacaaattgcagggcacatgcctaaaggggctagagtggagtgggacccagcagacagcaatcttaacaccacaggaaataacaagcgacaatatggccttgtaacactgaaaggattaccagaagaaaccagcagtaccctcacacctggtcagcgctattgggttgttgtggataacaacaatattaagccagcgccgggggccggtccaggctggtggcggcatttgcttcctcccgcaaaggaagtcatggtattcgataagacagtaagcctcagttctccatttgctattaaggccggtgacccgattggccacatgggctactatcaggcaccaaaagacggtggttatgaggcacgataccaggtacatattgaatgcacgagcatggatgataatctggagaagttcctgaccaacccggaaaaagtgggggagaaaaacccgctctggttgaagtattctcctggccttgctcttttcacaaaagatgttgcgaagggctccttcgcaaagggctcgacgtcgacaacgcggacaggcattctaccgttgagtaaggtcacaactgaaactgataactcaacaaagcaagaatactggcagctacggctggaaaatgcctatgtgcccaaaggccaggcggagcctcaacttctgtcacagtatgatctggcgaaactaggcttcagaactgaaacctcagagcctaccagttttgattacctggatgggaaaaaccagcctgttggattcttccgtaacctcatcgattcgctctaccaggccgcgatagatgatacgcgaaccagtcatgctcttgtgaagcataattatcagcgtctgctggataaaattgacagcggaagtgaccgatattcgccaatggagtactggagagcacttcacaatcccgactatcgtgacgttattcagaaaacaatcgtaaaacatccaagcgactggtacttcaaaaaaggtgatgctatctggcaacctttcctcaatgcgctgaaaaaagaagccccagaatggaagaaatatagcgaagattttcttgataaaatggcctggatgcaggatgttacatccgaaaaactaggcccttcattatggcatatgcatccgattgcctttcttggtgcattaataaagaaaaatactggctgggcacatagcaagtttgcaaaccttttaggaagtgtcgagtcaaaaaatgattattcggcatacaatgttacaaagacaggtaaatccgtcccgcactataattctaacctcacaaaaatgacaatatctgaagtaattgatgcccaaagagaacgaaatatgttcgccacaggtcgattccagataatcccagagacgcttaaaagtgcagtaaaagcacttagtcttgatacttcgaaactatacgatgctgcgatgcaggatcaaatatttgagcagtttttgattaaattgaagcggccagcatttattaattatcttgagggtaacggaagcgctgaagatgcgatttatgcgtgggcgaaagaatttgcatcagctggtgtacgtaaaggaaagagtataagccccaaaaaagaaccagtgttggatgcaaacggattaccagtgtatgaaaatggtaaaaagaaatacaaattagtaccaagggtggcagaagtagagggtgagtcgtactatgctggcgatggattgaataaagctcacctattaccagacacgatgattaaagctcttgaggattctaaaaatgggatgcaataa

SEQ ID NO: 122369 - DNA, 579 bp, Enterobacter cloacae
atgggatgcaataaaaaatcaaacaaatttttgctttttgtgtcatgtatgctcttgtcttttggagcgtactcacaagacagttctaatcctcagtttactgactacctggttcccgtaagcaacggtccatttgaacaaaatattcactttaataaagagcagaaaaagtactcgccacactggaaaaatacagtccaagagcaactaaaaaaacctgttaactttgcagggcactttagaatctatacagcctttggaggtcatggtaaagaatgccttcgtgataattgggtatgtggctgggttattgataaactatcaggggaagttgtagcaacactaccatcagataataatggtagttataattatgcagatatttctgataatggtacccctgttggccttccatttgagatggatgcttataaaaatagttctatgattgcaataaccggtcaatctatctcaatcaacaagagtgatagtcctgtatgcaaaacggccttatttaattttaataatggtggatatgtgaaattaatagaatcattggaagggtgtaacagccaatga

SEQ ID NO: 122370 - DNA, 489 bp, Enterobacter cloacae
atggactttagaccaacacaattattgctctgtattttatttgcattcttcacatttaatagtcttgctattgcagatgaaacaccaaggataaacacgtcttcagaaaataatacatgtagcataaaaattaatgacgaacttgttgatagttacaagtgtgagttttatcgcgcaccatcagtatggtcgcattcatatttgtacgaagccagcaaacaaataatagtatttattgatagtccaatggggaatgcatgcgatggaggcccattacatgtgtttagcaaaacggatgatgagaaattcaaacatctgaagacaattgacttctgtggtgggcattacccatcaataaccaatggcccagaaacattcataataaaagtcccttcaatctctattgacggcacggataaaaagatcccaactgagacatgggaattaaagaatgatgtattagttaagagacaaggaagaggaatttaa

SEQ ID NO: 122371 - DNA, 264 bp, Enterobacter cloacae
atgctccagattatccgtaaaggcgataaaaccactcacggcggctcggtcctgaccgcttccgatacgatgaaattcggtggtatcggtgttgcccgtaaaggcgacaaagtgtcctgcccgtttccggggcatggccctacaaccatcgtagaaggaaaccctgattaccttgatcatggtatcccggtagcctttcacggtcacaaatgtgcctgtggttgcacattgatcagttcatttgccgcagcaaaggttgcctga

SEQ ID NO: 122372 - DNA, 1209 bp, Enterobacter cloacae
atgcccgtctggctggatgccatccctgaacaggcccctaaggtagcgcgtccttgtacctggcgctggctgctgttcctggcatttatcatgctgggaggcatagcactcacgctatggtgctggacatcagaaagaacaggatttgtcttttggttcactgcactgggtcttccattttgcacctgggggcttattttcggtttacgccggtttgcctataaagccgaacaggtgggagccgagtcccgaaatgtcgagcgagaagcgctcattgacagtgaaattctgcgcggtcagcgctgcgcatggatcctcggcacatacattcaggcccccgccggaaacaaagtcgatgacctgcttgaggcaatgaaagtcgctgcccccgctatcgacttctcccgcccaagaggatgtgacaaaccgatcagatacgcggcattaacagaataccaggttgatttaacaaaggccctgacagcagcggtggctaaactaaccacgcgtgtagaagggatcgttcagccgcttccgccggagttaccatgctggctggtgctggattgtgataacgacctgtaccccttgattgaagaacagcttaaggccgatctctcactaaagaccggcaggatttttcgcctgatggccggaaaagggctgggggcgtttgatacatggctggacaagcgatgggacaccccgggcattctggttgccatcacgctgtcgttaccaacgtctccccgggaagaagatgctgatgctgtatcaatggtggtattgagcaaccgcaaagcccatgcctggccggatgcgctccgccttcatcgccccgaaaggggaacagaaacaacgctcacaaagacgctcacccgggcgctgctctgggcgaagacccggcccaatgaactcaaaggaagctggatctccggtcccacattgacgtcgggcagcggctggaataatgcctgtgaagagagcgaagtggaatttagcctttcagaagacaattccagtatcgatcccgtgctgggctataccggccatggtgccccatgggtcgccatcacgcttgccgatgcagcctttgaacagcgcggagtgcaggttatcgccgcacaacccgccgctgacaaagacgacatctgggtagcggtcatcaccaaagaagaagttcgcaagggaacgcccaaaaatgtctaa

SEQ ID NO: 122373 - DNA, 3372 bp, Enterobacter cloacae
atgtctaaggtaaaagtaaaaacactcatcggctccgttgtgactgtcgccttttttctgacggtcatcgtggcatttctcttttatgcctttccggaaaatgtcgcctcggccacggggtttgggccgtatgacgggcaacggatcctcacgttcagtgccatcctggttgccgcgatgcttttattcggctggctgattgagaaggccttcgacttcgcaggtaaatcggggctgtatttccactggggtcagaaaaaggcgcagatggtcggcccggcaacaggcaccattgcgagcgaagatgatgaagaagaacctgtcttcagcgaagacgccgtgtccgaacacctgcgctttcgctatggacgccgctggcagcgtaaggtgcgaatcctgctggtgatgggtaatccggacgacgtccagaaagcggccccaggcctgtctcatgacctctggcaggaaggcgacggcaacgtgctgatttatggcggtgatgcgcagtcactcccggatgagatcttcctttcaaaactggtacgcctgcgatccgggcaaccgattgatggcatcattcaggtgatgagtacctcagcgctcccgacggacagcgagcgggatgccttcttgcgttgccgccagaaagccgaccatcagcttggctggcaggcgcctgtctggctgtggctgactgataaggctaccggtgttcatcaggacgcggaaacgactgcgacaggggtcatattcgggccggaaggcaccgtgaaaggtgcgggtgaagggttttctacactggcgctacacctgcaaaaagcaggtatggcacagataatgaataatccggctgactttggtcttcttcagttgtccctccgactgcggcaggagctgaaagccagtctggctgttttactcagcgggctgatgcagggatctgcggcctggcgtttacgtggtgtcatgttcagccccgaactggccgttgccggaacggtaccaaatacacgcctcgacacaccgacctggaaagccgtcattgatgactgtgatgccgtcagcggcagaaagctgggcttcgactggctgaagatgctgcggttaattctgctttccctgattgttctgtggggggccggtacactgctgtccctgatcgttaaccgtacccagatttatcaggcacaggaaacggcgagtcaggcagcggataccgcaaaacccctggcagaacgcctgcacaaccagctcgtactccagcaagccattgcccgtctgcaacaccgtgaggcgaccggcgctccatggtacacccgatttggtcttaatcaggacagcgacacgctggccgcactctggccgctgtatgcgaaaaacaacgcacagctgatgagggatgccaccgcagattatctcaggcagcagctgaatgcctttgtgcaactgcctcctgccagtgatgcccgtacgcagggcacacagcacacctatgacgtgctcaaaagttatctgatgctggcccgtccggataaagcggacgcgagctggctggcaaaaaacgtgctgaaagcctggccgaagcgtcagaatgtgccggatggcacatggcaggacctcgcaccgaaactgctgggcttttatgcgcaaaacctcccggcacatccggaatggaaaattaagcctgacgcggaattaatcagcacgatccgtcagatcctgctcaagcagattggccagcgtaacgctgaatccgggttgtaccaggacatgctgaagcgcgttgccagcaactggcctgatttaacgcttgccgatatgacaagcgacaccgatgcctcagcggtattcagcactgacgaagtcgtcccgggaatgtttacacgccaggcctgggaagagcaggttcaggatgcgattaatgaggtcgtcaaaacccgccgtgatgaaattgactgggtactgacggataagacgcaccagacagggagcgatatctccccggaggcgctgaaggcccgcctgactgaacgctattttaccgattttggcaatgcctggctgaacatggtcaacagcattcagtggcaggaagccacgtcactttctgaggcgattgcccagctcaacctgatcggcgatgtccgtcagtcgccgctggtggcactgatgaacacgctggcctggcagggcaaaacagggcaaaagggcgaggcactggccgattcgattgtcgattcggcgaaaaagctgatcggtcagaaaaaaaatgccagacagtttattgaacaggcacagggcccaaaagggccgctcgatgaggtgtttggaccactgatggggctgatggaaggtaaagagggcaccggtgccaacggtaacctcagtttccagtcctggcttgcccgcgtcacgcaggtacgcctgaaactccagcaggttaccagcgccccggatccgcaggccatgtcgcagatgctggcccagacagtattccagggcaaagccatcgatctgaccgatacccgcgactatggcagtctggttgcggcgagtctggggcaggagtggaatggatttggccagtcgttatttgtgcaaccgcttgatctggcctggcggcaggtacttgccccggctgcgggaagcctcaatgcccgctggcagtcgaccattgtcgaacagtggaataaggcctttgcgggacgctatccgtttaaagccaccggcagcgatgcctcgttgccgttgctggctcagttcctgcgtagcgactcgggtcgaatcacgaccttcctgaaaacgaatcttggcgggatcctccaccaggagggaaatcgctgggtcgttgacctttccgcaagtcaggggatggttgtcagcccggatttcctccgggcgattaatcagctggcggaactgtcagatatcgtgttttcgcagggcgatgcgggtgttcacttcgaactgatgacgcgtccttcacgggatgttgccagagtgcagtttaccctcgatgagcagaacctggattacttcaatcagatggaaagctggcaaagcttcacctggcctggaaatacttactatcctggcgtgtcgctcagctggcgtagtgtgaacagcggcatgcagctgtatgccagtaaccaaggcaactggggtttcattcgcctgctggacaaggctctcatcactccgcttgacgccagccgtacacaactggtgtggatcaccgccgatggcaaccctctgaagtttgtgatgcgtagcgagctcggtacaggtcccctggcattgctgaaacttcagggattcacgctgcccgacactatctttagcgtcgcagctggcggagaagagcgccagtaa

SEQ ID NO: 122374 - DNA, 1608 bp, Enterobacter cloacae
atgagttcaccggaagatctgttaaccgcctgcgccaccaggcaggaaaaaaggcagcgcctcatctcgcgggcaaatgatgccctgtcgctctgggataactggctgcacccgttcacctccggggcagaaaccggggacgatcccgcatatgatgataattttcagctgatgcgtgaggagatcaacaagctttcaggtaccgattcagcgttattgtgtgagctggcccagaagtgtctttgcgaatgcgccaaagacattcgtgtcgtgacctggtacgtgcaggcccgactcagccgcgacggtgaaaaagggttatccgaaggcttactgctgcttgtcgcgatgctgacccgctacgggcaggcatgccatccccggcgtcccgtagcccgtaaagctgcgctggagtggctgaacagtgcaaaagtgactgatgcactgctgttatggcccgaggtggacagcaatgatgccggtctgacggctggcgtcatcagcctgcttgaatccacagtggctgactggccggaagccgagaaaccgtcttttgcaggcctttgtaccgctcttgaaaaccgtctggcacgttcgggtggcatggaagcgctggtcccccagaacagcagtgcccaggagcacgggcgtgaacctgcccattctgattcaccgcagctgtcagccgtgaaatctggccgcgatttactcgaccaggcaaagttactttcccgctggctgagcgagcagccgcagggctggctggcttctcatcgactgataaataccgtgcggtgggatacggtcgatcagatccctccgctggacagtagcgggcgcacccgcctggtaccgcctaaacccgagtatcgagctcagttgaagcgcctttaccttcagaaaaactgggtcgagctggttgagcaggccagccagatgtattgcgaaggcgtgaatcatttctggctcgatctccagtggtatctctggcaggggctcagccatgcgggtcagccctgggatacctggtcagactccgtcctgttcgatctgcggttgctgcttaaacgcctcccgggccttgaagggctggcatggaatgacggcactccctttgccgacgaagtcactactgcctggattgctgaaaaagtgaatgaagagggcctgatgtacggcgatgaatccgctaccgtcgttaatggtcaggcggacgatgtgctgcttcttgagtccgaagccatggaaaagggagacaccgaagggcctgaagcagcgcttgcctggctccagtcccgaccggggatggataccccgcgccatcgctggctgatacgcctgctcatggcccgggtggcagagcagtatggccgaaacgatatggcgcttcatctgcttggtgaactcactacccgtgcgccactgctgacgctggaagactgggagcccgctctgttatttgaagtccaggctcgacgcctgaagctgctacgcatgaaagccggtcgcagcgaatctgataaagcccgtctgatgcctgagatggatacgctattggcaggtctgatcgccattgacccggcccgtgccatggtgctctgtggctaa

SEQ ID NO: 122375 - DNA, 1770 bp, Enterobacter cloacae
atggatgatttaaccctgcgctattacgaagcagagatgcgctacctgcgagaagccggtaaagagtttgcccgggctcatccggatcgtgctgcgatgcttaatctggataaacccggcgcccgcgatccttatgtggaacgtctgttcgaaggctttgccttcctgatgggccgtctgcgtgaaaagcttgatgacgacctgccagagctgaccgaaggtctggtgagcctgctgtggccacactatatgcggaccatcccgtcgctggccatcgtcgagttctcgcctgactggcgtagtctgcgtcaggccgaaaggctggctgaaggcttctccgttctgtctcgtcctgtcgggccgcacaaaaccgcctgtcagtaccggacgactcgcgatgtgccgctacaaccgctgcaccttgcagatgcccgcctccatactgaaaccgatggccgctctgctatccgtctgcgcttcgaatgccctgaaaaagtggactggagtaaagccgggatcgacaaagtcgccatcttcctcaatgcagaaagtccagttagctatgcgctgcatctggcaatgacccgtcgtgttcacgctatgtatgcccgtcacgccgggacctacatcgaacgccatcagttcgatggctggtgcaaacccatgggctttgatgacaatgatggactgtggaagaaagccgataccgcctttagcggttaccagctgctgctggagtattttagcttccgtccgaaatttatgtttgttgagctgcgcggtctcgacaccatcggactcactgaagccagctcctggtttgaaatcgacatcgtgctcagtgaagcctggtcatccgatctgccttttgaaacggaaaacttccggctgcactgtgcgccggtcatcaacctcttcaccctggaggccgacccgctgacgcttaacccgctggacaacgaatacctgctcaggccgttgcgtcttcaggatggtcacaccgagatttacagcgtcgataacatccacggtgcggtgaagaatggcaaacacccctatgtaccgttcaccagtttccgccaccgtggcggcatgatgcgccacgatgcccctgagcgttacttccatacccgcgtgaaacgcggcccctctggtctgtatgatacctggttaattctcgggggccgctcgttcgagctggagcagctgtccgataaaccggaatccctttcgatgcgaataaccgggaccaacgggcagcttccgcgtaaggcgctggaaagtacactgctggacagggccgtgaaagcaggcaaagtgcccgtcagggtactgaacctctcggcccccaccatgccactgtatcccccggcaaacgaccgtttccactggcgggtgatgagtcacctcggatcaaacttcctcagtatgatggataaccctgaagtcctgcgggggacgctggcgctctatgactggaccgacgatgaaatgaaccgccgtcggcttgaagcaatcgtctccgtgaagcacaccctgatccgccgttttgagaagggctttatgctccggggcgtggacattgaggtcacgctgaatatggataattttgcaggcgagggtgatgtgaatctcttcggggagatgctgcaccggttcttcgcgctctatgccgatattcacctctttaatcagctcacgctggtgctgcaaccgacagggaaacgactgagatggcgcgagaatcacagccagcacgtaccgggctga

SEQ ID NO: 122376 - DNA, 525 bp, Enterobacter cloacae
atggcaacagtaacccgctggtgggcgctgacgcttattgcctgtggtctgctcgcaggctgcggtctgacgcagaccgtcacggacggtacggtcagcatcacgaaatccatcttctataagaaaattaaaacgctgcatctggattttaccccacgcacggccattaacgccgatgccgcgcagacaccgctggcaacaatggtgcgggtttatctcctcagggatcggaaagcggttgatgccgccgattaccagacgctgctgcgcaatgccgatacggtacttaaggacgatgttctggcatcaaaagagctgctggtgatgcccaacggcagcgtttctctgaatatgcccatggatgaagaagcacagttcgtggcggtggtggggctgtttaaccaaccggatcagaaggacaaccgctggcgtctggtactgacccgtgacgacctcgatccggacaaaccccggaccatcgagctgggtgacggctggctcagcctcgtgccggtaaaggagtga

SEQ ID NO: 122377 - DNA, 2463 bp, Enterobacter cloacae
atggataactggctggcgctttttgacgggcagactcgctattttctggagatcaacgacagccaggtaaaaccggatgttctgcgatttcggggcagggaagcactgagcgaaccgttcaaatgggatattgagttcacgacccaacaggcgaatatcccccctgaacaggtcctgatgaaatatgcctctttccggatgcggagcggtaaaaatgtccacggcattatcacccgcctggaatggctttccacttcaaaggatcagtcccactaccggcttacgctcagttcccgcctggcgctcctgggatatacccggcagtgtgcggtatatcagaaccagtccgttcctgaggtggttgagcaggtgctgcgtaaacacgggctggagggacccgattttgagttcagactggagcgcacgtacccgccgcgtgaaattatcacccagtggcgggaaacggaccttgagtttatccggcgcatactgtctgaagtggggatttactggcgtacggtgatggacgacgtgcgcggtctggatacgtacatactggccgacaggcagttcaactaccagtttgatgtgcgcctgccctacagcgagccgtcgggtctgtttgacggtgcggcagagtcggtctgggatgtacgaacctggcacacccttgccaccggcacggtcgccacgcgggattacaactaccggacagcctccacaccgatggatgcgacggtcagcgtgcgtaacgacgcgatcaccaccggggagcattaccgctacgcagcgccttatcgtgacgcaggtgatgacaccagcccggagccggagaccgaatccggcgcgttctgggcccggctccatcatgagcgggagctgaacagaacggcccgcattcacctgttcagcaacgctgcccaccttgcgccgggacaggtgcttgagccgcagggcgatgtcataactgccctgaaagagggcgttatcctcaccctggtgaccttccggggcgccagggattcccgtctgcatgtgtcggtctgggggatgccttataccgaacgctactgtttccgcccaactgaaatcccgcgccctgaaatccacggcacacttccggcccgcgtcgagagccgggagaaaaatgatatctacgcgcacctggatgagcagggtcgctaccgggtaaagccggacttcgaccgcgaaggaacagagcagggctttgggtatctgtggctgcggatggcgaagccaactgccggtgacacgctgggctggcatacgccgctcattgacggcactgaagtggccattgcgtatagcaatggcgatattgacctgccgtacatcgcgtacgcactgcacgactccgaacatccggacctcgtgaaccgggataatcacacccgaaatatcctcagaacacccgctaactcaaaattgcggatggaggacaaacgtggcgaggagcatatcaagctcgccacggaatacggcaggacgcagctcaacagcgggcacctggtggacaatcagggcaaatcccgcggcaccggtagcgaactgcgcactgatgaacacggggttatccgcgccggaaaggggctgttcatcagtgcagatgcacaggcgaaagcgcagggcgaagccctggacatggatgccgcgctgaaggaaatagacaggcttaatcagcaactgcaacagctggaaatggccgccgaaaaagcgcaggccctgaaagcggacgtcgacagccaggtacaaatgtttgagcagcggctgaaaccgcttaacgaggcgttgcagttctcagccccggaaggcatggccctgaccagtggtgaagatatgcaactggccgcagcacgaaacgtggtcgtcaacgccgggggcgatatcagcgtcggaactatgggcaatctaaccacgctggccggagaaaaactggggctctttgcccgcaccggccaactgagcgtcaaatccggagaaggaccaatagatgtccaggcgcaaaacgccagtatgcggttgtttgctgagaagaagctgacgctgagctcagtgagtgacattttgttcgccgggaaaaaacgtatcacgctgatcggcggcggaagctatctgcgactcgaggccgggaaggtcgagtatggtacgacggcgtcgtacatacgcaaagtgaagcggactatggcagcaggaagcagtcctcagtttccagaacttccatttttaccagggccaggcgatgcttttcgcaggagctttattcttgttgatgatagaacacaagaaccaatatcaaatattggatatgaattaacatcgtctataggtaaggtagttaaagggttttcatgcgagaaaggtctcactggctttataagccatacagaagaagctgatatcgagttaaccatattaaagcaaaattcattatatataggatag

SEQ ID NO: 122378 - DNA, 984 bp, Enterobacter cloacae
atggttgatatgaaagttaaatcaaaacttactaaccaggatgaaaataaagaaatcatctccgttaagatattcaaaataacggacattcctgatgtaatggagaagaaaggttggaaaattgcagctagttttatgcgaaagtggttcaatgacccgtattatgaaatgagtaagcaggagaagcttaacaaaatcgacatcagcacaatacaaaaacagcacattctcgacgatttagaatttgaatggttattaacttcatcctcacgaataaaaccaatctatgataactttgtaatgaaagtttcaagcgtcattgagtatgacgattttctggggcgaaaaaagcaaattacaaatcagctttcgaatggactttgctatattttgaataggttggaaaaatctgggtttttggttaacaatgagctaaaaagctgttatgtgaactatgacaatatgtcagcaatcgaattggataagacaagtcagtttaactttataaaaattggtagtacattgtgggagaaggcgactgatagtctggatgatgtatacggtgctctgggctctttcataatcaaagttgcattcacaaatctaaatgtaacaagagatcaaagagggtttatgagattggagattagagaactgggactgtacgtcagggacacctacgaatttatgaatgatggtgatgatcaacctttgggatattggggagagtgtggggtcatcaaacccggggtgattagcgaacttatgaaaaaagaattcatcgatgaggacggttgtagatactttaggattacaaactcatcatttgtcaaatacagggggaaatacaagagcacctataaaactggagatttttttgtatactctacagtgaagaaaatccctacaaatattatcattcatcttagcaagatagatatggaggaatattctttctggaagagaaaaaacataaatgaataa

SEQ ID NO: 122379 - DNA, 216 bp, Enterobacter cloacae
atgcttagctcaattaagctcatagtgaaattgatactctgtttttttgtatcactatctattattcttctgtcaataaagacactgacttataagaaatctacatccagtgaaaaaatatggaatgaggtcaactcttgctatgctattacttacattcctgactacaagccttttggcggcgtaggacgggtattacgtcttttttcaaattaa

SEQ ID NO: 122380 - DNA, 450 bp, Enterobacter cloacae
atgaatcaaaaaacgccatctttatatgaaattcttaccggcaactttacaggggatcttccccttgaagttgtaaacgaagaagaccaggtcattttatctgtactggataacatccagcgtattttgaacgcccgagccgggaccatatcccatttaccagattatggtttgccggacatgaccaaaattctgcaaggcatgccgggtacagcccacgagctgatcgatacgctggccggtgtcctgctcaagtatgaaccccgtttgcagtccctcaatgtaactttactcgaacagcacgtgccaggagagttgcgttatgccattgatgctgagcttaagggcattggcctcgtacgttacggcaccgagtttatgcccgaaggacgcgtgatgctgaggcacctgaagcaacagcagtatctcgataccgcaattcgtatgtaa

SEQ ID NO: 122381 - DNA, 345 bp, Enterobacter cloacae
atggacgcgtggctggaaggtactggattgaacgaggagacgctgactacatccgttacggatctgctggtggagtacgggtctcttgagattaccgatctctttctgtgtgtagatgaccagtctgtgaaattgacaccagtatttttgtacggccagggcgtgaccggatgcgtggaagtgaccattcaggcagaaggttgcgtgatctctttggggcgcctgttcatacgggcaggtcatttcagtgactggacctttaatcccccggggatgttgctgcgcacagtacaaccttttgatcaaagtacttctttttgtctgatgttagcgcttcttccatag

SEQ ID NO: 122382 - DNA, 1392 bp, Enterobacter cloacae
atgaatgacatcattccacgaaaaatcaaaaccggtggcgatccgcgcacgctagcggattatgccaccctgcgtgatgaactgagtaaactgacacatccggcccgtccggatgtgaactggcattatgtcgaaaaactctgcctttcactgtttgagcaaaacggtgtggagttacagacggcggcctggtacacgctggcacggacgcaactggccggcttattcggcctcaatgaaggcctggcgatactggatgcgctgataagccatcagtggggcacactatggccgcagccggtacatgcccgcatggaaatcctcagcagtctgaaccagcgtcttcagcaacggatgcgctcgctcccgctcaattacagcgacctcagacaactgtatcgggctgagcaactgcttggcagtctgggggaggtgcttcaacgtctggagcttaagcatctgagccagctcgatacgttgcgttccctgatgcacaacagcgctgtccggctggaaaacagcaacgatacaaccagtaccgggtcgaatattcagtctggtattgtcctgcctgccaccgtaaagaatggtgcagtaatatcaacaggctctcataccggtagtctctctgaagagacccctgcgccagacagcccagtgaagtgggtattcgttgcacagccagaacaccacgctaatgtggaagtactgacggcaatgcccactcaggtaaaaaagtggaaatccttcactgccggaatgtgtaccatgctgataatgagtacgggcgcagtgtggagctggcaatttcttcaccggccagacccgctacagactcagcttgctgcctcactggctccgttacctgcacctctcgcgcctgaaaaactggatatgttgcgtcagcaatctccgtcatcacaaacaatgatagaacaaacacagcagcagcttgcccgactggataaattgcctcctgactggagtattacttacagccgaaaacttacagaacaggctcaggtgctgtggccggagcaagcaaaacccctgacacaacagtggcagcaacaccttaatgctgccgcattaccggtagaacagctcaatggctggtataaggggatgtcaacactacaaaaattgagtgatcggctgaacgggcttgatgagcagaaaggcaaatacatgacggtcagtgaactgaagtccgttgtattttccgtccggcagtcttttaaccagtccataccggctgaagagcaactgcgtatcttgtcagaaaatcctcctggtgtacctttacctgcagctgcgagatctcagctggagatgcatctgaaacaactggcagcccgatatgctgaaataaaatggaatgcatcagagtaa

SEQ ID NO: 122383 - DNA, 951 bp, Enterobacter cloacae
atgagcgaaatgttgagcgttattgtcgacggtctctggcgtgagggggataagagtctcgccgtcaggcttgtgtcagaatgcggtgaccccctgccgggctggcagccaggggcgcacattgacgtgcatctgccctgcgggctggttcgccagtattcgctgaccggagcaagcgacagcgagagctatcttatttgcgtaggacgtgaagccgcctcgcgcggcgggtcacgctatgttcacgagacgctacgtccggggcagaaactgcttatctcctcaccgcgcaatctgtttgcgctgcacgaggctgaacgcttcttgctgctggcggcagggataggcataacgcccttgtatgcgatggcccggcagctggaggcttccggcgccccgtttacgctgtactattacgttaaagagcatggcaacgcggcgtttgcgcatgaactcatgcaatttaaacacggcgagtgtgtcatccataccatcagcccgcgcactgcgctggcagagcacatgcccatgccagcgcccggtttccacgcctgggtctgcgggccggcaggttttatggagaaagtgtatcaggtcgccctcgcgagaggctgggcggagagcaatcttcacagcgaagcattccagcccgttatacccgccgactgtaatgaaacgggcgagatttttacagtcaagctggcatcaaccggcgagcgctggccggtgccggaggacaaaactatcgcgcaggtgctgctggaaaaaggcgtggcggtaccgctctcctgtgaaatggggatttgcggcgcctgtctgacgccggttatcgacggcgtagtggatcaccgggatagcgtgcagtcggaggcggagaaaagcgcggcagaccagcaggtggcgctgtgctgctcgcgaagccattcaggggaactggtgattgggttgtag

SEQ ID NO: 122384 - DNA, 1035 bp, Enterobacter cloacae
atgaaaatacaaccgactccacccgcccattgtacgtttgagccagaggactggctgcgtctggcaaaatgctggcatccggttgctcgcgcctgcgacatcggcgcggcaccggtcaaagccaccctgctcgacgaacaactggttatctaccgcgtcaaagaccaggttgtggtagcccgggacgtttgcccgcaccgcggcgtaccgctgacgctgggctttcacgatgaacacgggataatctgcccttatcatggcttacgctttggtgaagatggacgctgcaaccgcattccgtccagccctgaccagccggttcccgcgaagcttaacctgatcaactatgccgtggaggagcgctttgggttgatctggacctgcctggcgtttgatcccgataacccaatgccgctgcccaccatgccgcactgggataacgacggatttcagcagatcaactgcccggcgtttgaagtgaatggcttcgccggccgtcaggtggaagggtttctggacgtggcgcattttgcctggatccacactgacacctttgctgaccccaataatccgctggttccccactatcagccccaggagacgccgtttggctttgttgccgattactggagctcggtgagcaactaccccgccagctccgatgtccaggccccggaaggcttccagtggctgcgtcattttgaaatgcatctgccgtttaccgccacgctgacgatccattttccgggggaagccaggctggtgatcatgaacgccgcctcgcccgtctcttcacgggtaacccgcatgttcgcccctatcgcgcgcaactttgacctgcatattccggtagaggaagtgcacgccttcaatttgcgtatttttgaagaagaccgcctgatggttgagacgcagcgcccggaaagcctgccgctggatctgactctggaagcccacatccctgcggataaaagctcgattgcctaccgccgggggctgaaaaagatgggcttcggcgagtttttcctggtgtga

SEQ ID NO: 122385 - DNA, 1155 bp, Enterobacter cloacae
atgagagcaatcgttattggcgcgggcattggcggcctgagcgccgctgtagcgctgaagaaggcgggaatcgactgtaccgtgtttgaggccgtgaaagagatgaagcccgtcggtgcggccatctccatctggcccaatggggtgaaatgcatgcagcacctcgggatgggcgacatcatcgagacctacggcggccctatgcgctttatggcctataaggatcaccggcgcggcgataccctcacccgctttagccttgccccgctggtcgagcgcacgggcggtcgcccctgccccgtgtcgcgtacggaactgcagcgcgaaatgctgaacttctgggggcgcgagaacgttcagttcggcaaacgcgttgaaagcgtccgtgaggacgcatctggcgtcaccgtcacctttaccgacggtactaccgcgacgggggatttcctgattgccgccgatggcagtcactccgcggttcgcccgtacgtgctgggctatacgcccgagcgccgctacgccggttacgtcaactggaacgggctggtgaagattgatgaagagattgcccctgcgcaccagtggaccaccttcgtcggcgagggcaagcgcgtttcgctgatgcccgtcgccggcggacgtttctatttcttttttgatgttccgctccccctcgggctggcggaagatcgcactacccttcgcgccgatctcacgggctacttccgcggctgggcgccaccggtgcagaagctcatcgccgtgctggatcccgagaccacaaaccgtatcgaaatccacgacattgaaccgttcgacaccctggtgcgcggcaacgtggcgcttcttggcgatgccgcgcacagcaccacgccggatatcggccagggcggatgcgcggcgatggaggacgccgtggtgctgggtgactgcctgcgcgagaaccacaacatcgcactggcgttgcggcagtacgaagcgctgcgctgtgaccgggtccgcgacctggtgcttaaggcccgtaaacgctgtgatatcacgcatggcaaagacatggcattgacccgggcctggtaccaggagctcaaagaagagaccggagagcgcatcattaacggtctgtgcgacaccattcaggccgggcctttaggctga

SEQ ID NO: 122386 - DNA, 501 bp, Enterobacter cloacae
atgattgcactgcaaacttttaatcaactgagccacgaagaggcgctcgcgcggttgcagccctgcgtggcgttgcccgactgggccgatgcgctggtgcaggggcggccctatttacaccgcaaagcactgttcgacgccgcccggacactggcccaaacctgggatgaaacggcgcttacgcaggccctgaatgcgcacccgcgaattggtgagaaaccgacgggagcccgggcggaggcggtgctttcgcgccaggagcagggcgccgtcgacaaccgcgacaggcagctggcacaggcactgcaggaagggaacgctcgctacgaggcccgttttggacgcgtgtttttaatccgcgcgaaaggccgtagcggtgaggagattttacgcgccctcaacgcccggctggaaaacagcgatgcgcaggaggtacaggccgcactggaacagctgcgggaaattacgctgcttcggctggaaggagtcattgacgaatga

SEQ ID NO: 122387 - DNA, 324 bp, Enterobacter cloacae
atgagtacgttaagcacgcatattcttgatatttcgacgggaaaaccggcgcagggcgtaagggtttatcttgagcaggacggcgtcgtattggccactgctttcactaacgcccaggggcgcatcaccgcgtttatccctttcctgccagcaggacgttaccggctggtggctgagattggggcttggttcaccgaaaccggccgcgacacgctttacccctgcgcacagatcgattttgtgacgggagaaacggcagacgagcacttccacctgccgtttgtgattgcgccgggcgggtggtcaacctaccgcggcagttga

SEQ ID NO: 122388 - DNA, 1317 bp, Enterobacter cloacae
atggactaccagactgcgatccgcggtgcattttttgatattgcccaggtctgcgacagtgcagacgttatcgcccaacaggcgcgctaccttgaagacgggctgctgttcatccataacggcaaaattctggcccagatggcctggcaggagggcgagcagtatcttgatccctataaagggtacaccgacctgcgcggcaaactgctgctcccgggttttgtcgatacccacgtccattacccgcagacggagatgattggcgcttttggtgagcagctgctggagtggctgaccacctacacgttcccggtagaaagccagtttgccgatgaggcctatgcgaaagagattgcggcgtttttcatcaaccaactggtcagccacggcaccaccaccgcactggtgttttgtacgttgcatcctgaatcggtcgaggcgctgttcaccgaggccctgcgccttaacatgcgccttatcgccgggaaggtgatgatggaccgccacacgcctgactacctgagtgaaaccgcgaaagagagctaccggcagacgcgcgagttgatccagcgctggcaccaccgtggacggttgggctacgccattacgccacgctttgccccgacctcctcaccggaactgctggccgcggtcagcctgctcagagaggagtttcccgacacgtggatgcagacccatctgagcgaaaacccaaatgaagtggcctgggtaagcgatctgtggccggaacatgaacgttatctggatgtgtatcatcattacgggctgaccggcgaacgcagcgtgtttgcccatgggatccacctccatgagagcgagtggcgctgtctgcacgataccggctcggcggtggcgttttgccccacctcgaacctgtttcttggcagcggactgttccgcttacccgcctgctggcaacaccaggtgcgtatgggcattggcaccgatgtgggtgccggaaccaccttcagcatgctgcgcaccctcggggaggcgtacaaggtgggtcagctgcagagctaccgcctgcgcgccagcgaagcgttttatcacgccacgctgggcggcgctcacgccctgaggctggacgataagattggcaatttcgcccccggcaaagaggccgattttatcgtcatcgacccggccgttacgccgctacagcgcctgcgtaaccggcgctgtcaggacatttatgagcagctgtttgtgctgatgaccctgggcgacgagcgcaatattagcgagacctgggtcaacggtgtgcaggtgtggtcaactgccgcggtaggttga

SEQ ID NO: 122389 - DNA, 1497 bp, Enterobacter cloacae
atgccaaacagacaaaacgcgcagcacggtacggccgctgattccggtgcggtttacagcccacggctttgcaatgaggatctggcaccgacgcgtgaccagaactggagctggtacaacatcttttctttctggatgtcggacgtccacagcatggggggttatgttgttgccgcgagcttctttacgctcgggctggcaagctggcaggttttgctctgcctactgatagggatttgcattgtgcagttgtgcgccaacctggtggcgaaaccgagccagatggcaggcgtaccctacgcggtgatttgccgtcaggcatttggcgttttcggggccaatattccggcggtgatccgcgggctgattgctttcgcgtggtacggtattcagacctacctggccgccaacgcgctgatgctggtggcgcttaagttctggccttcactcgcgacgctcaccaccggttcgttcctgggcctgtcgcatcttggctggatctgtttcgctatcatgtgggtgctgcaggcgatggtcttctggcacggcatgagcgccattaagcgctttattgatatcgccggtccggcggtctacgtagtgatgctggcgctggcgggatggattgtatacaagaccggttttgacggcatctcctttacccttgccagcaaatccctgagcgccggtgagcagacctggcagatgatcaccgccacggcgctggtggtctcttacttctccggcccgctgctcaattttggtgacttctcccgctacggtaaaagcatgggggagatccgccgcggtaaccgctggggcctgccgtttaacttcctgctgttctccatcgttaccgtggtgattgtgtcgggtacgcaatcgctgtttggccgcatgatcactgacccgattgaaaccgtcagccgtgtgggcaacgatctggccgtggccattggcttgctgaccatgatcaccgccaccatcgggatcaacatcgtggcgaacttcgtctccccggcgtttgatttctctaactgttcaccgcaaaaaatcagcttccgtaccggggggatgatcgccgccgtcggctctatcctgttaaccccgtggaacctgtttaactcgccggagcttatccactacactctggacgtgctcggggcgtttattggcccgctgttcgggattctgattgccgatttttacctgattaagcgcggcaaggtctccgtagacgatctgtttgatgacacgccaaaaggcaaatactggtatcgcaacggtttcaacccgaaagccatcggcgcgctggtgccatccgttgccgttggactggtgataagctttattccctccctgcatgaagtggccaactttagctggtttatcggcgtcttcctgggcggggtcacctaccgctggctggcgcgggaagagcgtgaagcggcaggcgcctcgtcgttcagcccccacgtggcaacgcaaaaagagtaa

SEQ ID NO: 122390 - DNA, 717 bp, Enterobacter cloacae
atgaacaacataaacagcctgcagaccgcgccagacctgcatgacaaagatgaatccatctttcaggcgctgatgaccgcgatagtcgaacatcagttgctcccgggaagtaaattgcctgaagaggcgctggctgaggtcttcggcgtgagccgcaccggtattcgcaaggtgctgcaacgactcgccgctgtgcaaatggtcaccttaacgcccaaacgtggtgcacacgtggccagcccgacggtagaagaggcgcagcagatcttccgcacgcgcgctctgcttgaggtggctaacctgccggacgtgctggcccactgtcagccgccgcatctggctgcactggaagggattattcgccaggagcagcaggcgcacgaagcgtatgacggtcccgccgcaatccgccactccgccaatttccatattcagcttcaggccatttcaggcaatcaggtgctgacagagatggtgaccggcctgagccagcggtcgtcgctggtgatcgccgcctggggcgcgccgtggcgtcagggctgccgctgcaatgaccacgagcaactggtcgaactcttgcgccagaaggcgctccagcccctgagtgaggccttaatgcaccattttgaacatattgttgccagcctctgtttcgaacgggccggtgagtgcctgcctgattttgcccggctgttcgccagccacaaggagtcgtaa

SEQ ID NO: 122391 - DNA, 744 bp, Enterobacter cloacae
atgtcgtctgtttgtatacaagtgattaaccccaacaccagcctcgcgatgacggaaaccatcggcgccgcagcccgcgcggtagcagcaccgggaacggagatcctcgccgtctgcccgagcgcaggtgtgccctcgatagaaggtcattttgatgaggccatcgccgccgtgggcgttctcgaacagataaaacgcggacggcaacagggcgtggatggacacgtgattgcctgctttggtgaccccggcctgctggcggcgcgcgagctggcgcaggggccggtcatcggtatcgcagaagctgcgatgcatatggccacgctggtggcaacgcgcttttccgttgtgaccacgctgccgcgcacgcggattatcgcccgtcatcttttgcaccagtatggtttccaggaccactgtgcagccctgcatgccatcgatctgccggtgctggcactggaagacggtagcggcctggctcaggagaaggtgcgcgcgcgctgcatccaggcgctgaaagaagatggctgcggcgcgattgtgctcggctgcggtggaatggcgacgctggcgcaggagctgacgcgcgagctgcacgtgccggtgatcgacggcgtcagtgcggcggtaaaaatggtcgagtcgctggtggcgctggggctgtcaaccagcaagcatggggacctggctttcccggagaaaaaagcgttgagcggacactttcaggcactgaatccattttaa

SEQ ID NO: 122392 - DNA, 933 bp, Enterobacter cloacae
atggcgctttttaacgaggattatccgcgggacttacgcggctatgcaggcaagccgccgcacgcgcagtggccgaaccaggcgcgcatcgccgtgcagtttgtactcaattacgaagaaggagcggaaaaccacgttctgcacggtgatgccggctcagaacaattcctctcggacatcatcggtgcggccagttatccggacaaacacatgtcgatggactccctctatgaatacggcagccgtgccgggttctggcggatccataacgaattctgcaagcgtggcctgccgctgacggtctttggcgtggcaatggcgctggcgcgacatcccgatatcgtcgacgccatcaaagcggctgattatgacgtggtcagccacggctggcgctggatccactatcaaagtatggatatcaaccaggagcgcgagcacctgcacaaggcggtgcatgtcctgactgacctgtttggcaaaccgcctgccggctggtacaccgggcgtgacagcccaaacacccgccagctggtagtggagcatgggggctttgactatgacagcgactactatggcgatgatttaccgttctggacgcaagtggcgtgcagcgacggcacgcgcaaaccccacctgattgtgccgtatacgctggatgccaacgacatgcgcttcgcgaccgcgcaggggttcaacaccgccgagcagttttatacctacctgaaagacagctttgacgtgttgtacgaagaaggggaacgtgcgccgaagatgatgtccatcggcatgcattgccgtctgctggggcgtcctgggcgttttcgtgcactccagcggttcctcgattaccttgcgcagcacgatcgggtatgggtctgtacccgccagcagatagccgatcactggcgtgaagtgcacccgtttcaacaataa

SEQ ID NO: 122393 - DNA, 387 bp, Enterobacter cloacae
atgataaatcacgatgacattaaccttccgtgggtcgttgcagaagtgaccgcagccttttaccgctatgaagacgcgctggtaagcaacaacattccggtgctggatgagctgttctggcacgacaaaaacacggtgcgtctcggtgcgggcgaaaacctgtacggcattgaggaaatccgcgcctttcgggcgtcgcgcccgtccgcgggtctgcaaaggacgttgcgccatacggtaatcaccaccttcggagaagattacgccgtgtgtagcaccgaattcacccgcgaaggaacggagcggattggccgccagcagcagacatgggtacgcttcccgtacggctggcgaattgtggcggcgcaggtcagcgtgatggcgtaa

SEQ ID NO: 122394 - DNA, 1398 bp, Enterobacter cloacae
atgacgctacacgagatgagtatcagtgagatccagcaggcgttgagtgcaggcgacctgagcgcccatgacatcgcccgccagaccctggaagccattacgcgcatcaatccccatatcaacgcctggaccaccgtcacggaagaacgcatgctggccgaagccgagaatatcgacaccctgcgtcgggagaaacgccctctgccgccgctggcaggcattccctacgcggtgaaaaacctgttcgacgttgccgggcatacgacccttgccggtgcagagctgttcagtcagcgcccccccgccaccgctgacagctttgcggtacgccagttgcgcagcgccggtggcttattgtcgggaatggtcaacatggatgcctacgcctacggctttacgacggaaaacagttactacggcgcaactcgtaacccgcacgatgtgacgcgcattgccggaggatcgtccggcggctctgccgcggcggtcgctgccggactggttcatttttcgctcggtaccgacaccaacgggtctattcgcgtaccggcctccctgtgcggaatatacggtcttaagcccacttttggtcgtctgtcacgcgccggcagccatccgtttgtcgccagtctggatcacatcgggccgtttgcccgtcgtgtgagcgatctggcgtcggtgtacgatgcactgcagggtcgggataccagcgacggatttcaggcagagagttcccgggagcagacccggcccctgctcgaccgcggtctggatggtttgcgctgcgcggtgctcggcggctatttcagtacctggtgcgacagcgacatgcgggacgccgtggcgcgggtggcaaaagccctcgacgtgcaggaaacgttgcaattccccgatgccgaactggcccgctccgcggcgtttatcatcagcgcctcggaaggcggaaatcagtacctgcccgcgcttcgccgcgagcccgggcgttttgaaccccattcgcgcgagcgactgctggccggcgcgatgatcccttctgcctggtatattcaggcccagcgttttcgcacgcaggcccgacaggcgtttaaagcgctgtttgcgcaggccgacgtgctgatcgccccggccacgccgcgcagtgcaacgcggattggcgaagagattatggagatcaacggccagccgttaccggttcgcgccagcatgggcatgctgacgcagccgatttcgtttttaggtttacccgttaccaccgtcccgctgcgcaccgctcagggcgcacctgttggcctgcagttgatcgccgcaccgtttaacgagcaagcctgcctgcgcgtggcgcgggtgctggaagcaagcggaataaccgatgcccggccagcggagatggcaccatga

SEQ ID NO: 122395 - DNA, 189 bp, Enterobacter cloacae
atgaataccacacaacctgactggcatgcctatctggcgcaaatggagtccgtgctgggcgttgagctggatgacgcccgccgggcagaactccatgtgcagttctgccgtatcgcggcgatggccggcccgctgatggcactgccgcttgatgaccatctggagatcgcaggagtatacaaagcatga

SEQ ID NO: 122396 - DNA, 1584 bp, Enterobacter cloacae
atgcaaagtaatgtctccgtacacggaatggccgtggcgccccaccatcttgccagccagagcgctctggccattctgcgcgaaggcggtagcgcgattgaggcaatggtcgccgccgccgcaaccattgccgtggtttacccgcacatgaacggtctcggtggggacggtttctggcttatcgtgccgcccgatggcgaaccggtcgccattgacgccagcggcgcagcaggctcactggcgacgcttgccgcctatgacgatgtctctcagatcccccatcgcgggcctcgcgcggcgctgaccgtggcgggaacggtgagcggctgggacgaagcgctgaagatttcgcgcacgctgacgggcaccgctcttcccctgaatcgcctgctggcagacgccattgactatgcccgaaacggcacgccggtgaccgcgtctcaggccgccgccacggccagtaagctggatgaactgaaggacctgcccggcttcgcagagacctggctggctgacggcaaaccgccgcaggtcggcagccggttttatcaaccggcgctggcttccacgctctcgcacctcgcagaagacggtctggacagtttttatcgcggcccgctggcggagcgtctggcccggggcatggcaacgctcgggctgcccatcaccctggctgacctaaacgcgcatgtcgcccggcgcaccacgccgctgaaattacagcatcagcagggcgaagtgtggaacctcgcgccgccaacgcaggggctggtgtcgctggcgatcctcgggataaccgaccgcctgtccatggccgatgctgacgaagcgaccaccgttcaccgcatagtagaggccaccaaactggcgtttggtctgcgcgatgcccatatcaccgacccgcgcgagctgaaaaccgatatccagggtctgctggatcctgccgcactggccgccctcgccgaccaggtcgatgataaccaggccgcaccgtggggctgcggcaaaggccctggtgatacggtctggatgggggtgatggataacagcggtcttgccgtgtcgtttattcagagcatttatcacgagttcggcagcggcgtggtcctgcctgatactggcatcgtctggcaaaaccggggagcctcattcagcctcaatccccgtcacctgctggcgcttgcgccaggaaaacaaccgttccacaccctgaacccggcagccgcgcgtctgcatgacggacgcgtcatggtctacggctcgatgggcggtgacggccagccgcaaacccaggccaccctgtttacccgctatgtggtgcagggggtaccgttgcaggagagcatcgcccgcccgcgctggttactggggcgcacctggggacagacatccgacaccctgaaggtggaaggccgctttacgccgcagaccgtcgcgcgcctgcgggcgctgggccacgacgtggagtgcctcccggaattcagcgaagccatgggccacgcgggtgcgattgttcgccatcctaacgggctgtttgaaggggcatttgacccgcgcagcaacggcgccgccgccggattttaa

SEQ ID NO: 122397 - DNA, 840 bp, Enterobacter cloacae
atggaacagcttgatgaacgtctgaaagcgcaattcgcgtcgttgtcaccgcaggagcaacgggtggctgattttatttttgatcatttcgacgacctcattagttataacagcgccgagctggcgcagctgagcggggtgtcgaaagccacggtgagccgtctgtttaagcgtctgggctatgagaagtataaagagatgcgcgacgaactgcgcacgctgcgccagagcggcatgccgctgaccgataaccgcgatgcggtgcagggcaacactctgctggcgcggcattataagcaggagatggcaaacctcacccagtgggtcaacgctctggatgctcagcagtttgccgaggccatggcctcaatggtgaaggcacggcggattgtgattatcgggatgcgcaacgcctatccggcggcgctgcacctgcgccagcagctgttgcaggcgcgcggacaggtgctgctgctgccgcagccggggcagagcctgagcgaggaactggtcgatctcacgcccgacgatctggtgattatgatggcatttcgccgtcgcccgcggatcgttcggccgctgttgcagcagcttcagcacagcggtattccggttctgctgatgtgtgagccgcaggcgcacagcctgtttccgctgaccagctggcagctctgcgccccgctggacagcgtctcggcgtacgacagctactcgtcggtcaacagtctgatcaacctgctggctaatgccttcctgcatgaaatcctcgataaaggccgtccccggatccacgatatcgcctccctgtatcagcagctggacgaactggaacagcgataa

SEQ ID NO: 122398 - DNA, 783 bp, Enterobacter cloacae
atgaaaaagttattgattgcactgaccggggccgtctgtctgtttgcaaacctgccagcaaaagctgaccagcttcaggatattgagaaacgcggcactcttcgtatcgccgtcccgcaggattttcctccgtttggttcggtcgggaccgatctccagccgcagggctacgacattgacatggcgcgctatctggcaaaacagatgaagctcaagctgcagctggtgccggtgaccagtgccaaccgcgtgccgtatctgcaaaccgataaggtggatctggtgatctcaagcctcggtaaaaacgccgagcgtgaaaaggtgatcgattttagccgggcctatgcgccgttcttcctcggcgtgttcggcccgaaaggggctgagctgaaagatgctgctcaactgagtggaaaaaccattggcgtgacgcgcggcgcggtggaggacatggtgctgaccagccttgcgccgaaagatgcagacgtcaaacgctacgaagacaataacaccacgctgtcggcttacctgtccggtcaggtccagtacgtggcgacaggtaatctggtcgtggcggcgatttcccgccagaacgccgccaaagccccggttccgagctttatgctgaaggactcgccgtgctttatcgggctgaagaaaaacgaaccggcgctgaaagcgaaagttgatgcggtgatcgagcagggaattaaagacggcaccctgaatagcctctctgagcagtggctgaaagcgccgttgccggcaagcctgggcgtgtaa

SEQ ID NO: 122399 - DNA, 666 bp, Enterobacter cloacae
atgacagagcaactccatttctctgcgctctggccgtactggccggcgctgctggcagggctgtgggtcaccattcaactgacggtgatggcaaccctcggcgggctggcgatcggtattttcggggcggcgattcgcagcggccggacgacgtggttcagccggatctggggcggctacgtggagattatccgcaacacgccctttgtcgtgcagctgtttttcattgtgttcggtctaccgaatctggggctgaagatgacggcgggcgaagcggcgctgctggcaatggtcgtcaacctgggcgcgtacagcacggagattgtccgtgccggtattcaggttacgcccaaaggacagtgggaggccggccgcgtgctggggcttacccgcctgcaaacgtttatacgtgtggtgctgccaccggccctgcagcgtatttatccggcgctggtcagccagtgcattatcgttatgctcggttcgtcggtggtgtcgcaggtctcctatgaagagctgacttttgccgccaacctgattcagtcaagaacgttcctgagctttgaggtctatctggtgaccaccggaatttacctggtgctgtcaattaccctgcgccagctaatgatggcggcaggacggaagtggctgggggtacaggcatga

SEQ ID NO: 122400 - DNA, 660 bp, Enterobacter cloacae
atgatgaccacctttaccgactgggacattattcgcaatctgctgctcgccggacgctggacggtgctgctgtcgctggtggcgtttgtcggcggggcggcggtaacgctgccgctgttgctgttgcgcctcacgggcgggcgtacggtaaaacgtcttatccgcggctatatcgaactgtttcagggcacgccgctgctgatgcaactgttcctggccttcttcggcgtggcgctgttgggtatcgatgtttcgccgtggaccgccgcgtcgctggccctgacgttctacaccagcgcctttttgcttgatatctggtttggcagtattcgtgcgctgccgaaagggcagtgggaggcgtcgcgctgtctggggctgaccttcggccagacgctgtttcgcgtggtggctccccaggcgttacgcatcgccatcgccccaacggtggggttcgccgtgcaggtgattaaggggaccgcgctggcatccattatcggttttatcgagctgaccaaggccgggacgatgctgaccaacgtgacctatcagccgtttaaagtctttgcgctggtggcgctcggctacttcattctgtgttatccgctgtcgcgctacagccgttatctggagactaaattcaatgcctctcatcaccattaa

SEQ ID NO: 122401 - DNA, 738 bp, Enterobacter cloacae
atgcctctcatcaccattaatcaggtgcagaagtactacggcgataaccacgtgctcaagggcgtggatctggacatcgacatgggccaggtcatttcaattatcgggcgcagcggttcgggtaaaagcacgctgttgcgctgcattaacggcctcgaagggtatcaggacggcagcatcaagctcggcggcatgaccattaccgaccgggattcccaggcgcgtgaaatcagccgctcggtcggcatggtatttcagaacttcaaccttttcccgcacatgacggcgatggaaaacgtgatgctcgcgccacgtcgggtgctgaagaaaagcgcagcagaatgtcaggtgctggcgcagcgcatgctggagaaagtcgggctgggtgaccgtctggattactacccgtcaagcctctccgggggccagcagcagcgcgtggcgattgcccgtgctctggcgatgtcgcctaaagttttactctgtgacgagataacttccgcgctcgatccggaactggtaggcgaagtgctcaaggtgctggaacaactggccgctgaggggatgacgctgatcctggtgacccatgaaatgaattttgcccgcgaagtgggcgaccgcgtggtgtttatgcatcaggggcgcgtctgggagcagggcgacagcaaaacgctgttcgctaacccacagaccactgagcttaaacagtttatctcctccgtgcgcggcctcaattaa

SEQ ID NO: 122402 - DNA, 1242 bp, Enterobacter cloacae
atggatatcgctcaattttcgcaaatcaatccgccacaacgtctgctgatggggccggggccgatcaacgccgatccgcgcgtgctgcgtgccatgtcgagccagcttatcggccagtacgatccggcgatgacccactacatgaacgacgtcatggctctctaccgcggcgtgttccgcacggaaaaccgctggacgatgctggtggacggcacctcccgcgcggggattgaagcgattctggtatcggccattcgtccgggggacaaagtgctggtgcccgtttttggtcgcttcggccatctgctgtgcgaaattgcccgccgctgccgcgcagaggtccacaccatcgaggtaccatggggcgaggtgttcacaccggatcgggtggaagatgccattaaacgcgtgcgtccgcgcctgctgttaaccgtgcagggggatacgtccaccaccatgctgcagccgcttgcagaactcggggcaatctgccgtcgttacgatgtcctgttttataccgatgctaccgcgtcgctcggcggcaacgccctggagaccgatgcctgggggctggatgcggtctcggcggggatgcagaaatgtcttggcggtccgtccggcacctcgcctgttaccctgagcccgcggatggaagaggcaatccgtcgccgcaaatgcatcgaagaggggatccgtaccgatgcccatcgcgacggcgacgaagagatgatttactccaactatttcgacctcggcatggtgatggattactggggacccgagcgtctgaaccaccacaccgaagcgaccaccgcgctgttcggcgcccgcgaatgtgcccgcctcattctgcaggaagggctggataacggtatcgcccgccacaagctgcacggggatgcgctgctgaaaggtattcaggcgatggggctcgagaccttcggcgacctcaggcacaagatgaacaacgtgctgggcgtgcttatccctcagggcgtaaacggtgaccaggtgcgtaaactgatgctggaggatttcggcattgaaatcggtacttcgtttggtccgctgcacggcaaagtgtggcgtattggcaccatgggctataacgcgcgtaaagactgcgtgatgaccaccctgagtgcgctggagtcggtactgaactacctgaagttttccactacgcagggtgctgcgatgcaggctgcgtgggatcattaccgcactgagacggcgctatga

SEQ ID NO: 122403 - DNA, 1242 bp, Enterobacter cloacae
atgaatcacgcgacacgccagcaggcggcagaacgtgtgatggctcgcgccgatgcgctggccgccatcagcgaaaaccaggatttccttacccgcgtgtatctctctgcccagcatctgcaggctaaccagctggtcgggcagtggatgaaccaggcgggcatgaccgtctggcaggacagcgtggggaatatctgcggacgttatgaaggcgagcaggagggcgcaccggcggtgttgcttggctcgcatctggataccgtgcgcaatgccgggcgctacgacgggatgctgggagtgctgacggccattgaagtcgttgacagcctgcaccagcagggaaaacggctggcgcaggccgttgagattgtcggcttttgcgatgaagagggaacccgctttggtatcacgctgttgggcagccgcgccctgacgggcacctggcctgtgggctggctcgacacgtgcgatgccagaggtatcagcgtggcgcaggcgatggtacaggcagggttagatcccagccgtgtcgcgatggccgcccgacgcccggatgatttcagcgcctgtctggaactgcatattgaacaaggaccgtgtctggaacaggccggtctggcgctgggcgtggttgaagccattaacggtgcgcgtcgtctgaactgccgcttcaccggtgaggccggccacgccgggaccgtgccgatggcgcatcgtaaggacgcgctggccgccgccgccgaatggatggtgttgattgaaaacaccacccgtcagcacggcggcaacctggtggccacggtgggtgagttgcgctgtctgcctggtgcggtaaacgtcatccccggcgaggtcgcgctctcgttagatattcgcggcccgcaggatgcgccgcttgaccttctgcttactgcactgctgacgcaggcgcaggcgatagcggcccgtcgcggaatacattttgctgccgacgaattttaccgaatcgccgccacgccatgcgatacacgtctgcaggcactgctggcggaggctgtagaatcggtgcaggggaagacattatcgctgccgagcggtgccggtcatgacaccatcgccctggcggagcgctggccggtagggatgttgtttgtgcggtgtaagggaggcgtcagccaccatccggcggaatcggtgatggctgaggatgtcgcgctggcgattgatgcctttacgcgtgcggtaacgcgtctggcgggttaa

SEQ ID NO: 122404 - DNA, 1116 bp, Enterobacter cloacae
atgtcgaacatacaattgaggaatgtcaccaaacgctttggcgacaccgtcaccttgcacaacgtgaatcttgagattgaagacggtgagtttgccgtctttgtcggtccttccggctgcggtaaatcgacaatgctgcgcatgattgccggactggaggacattagcgaaggggaagtgttaattggtgacgaggtgatgaacgacgttgccccctcccaccgcggcgtggcgatggtgtttcagtcctatgcgctctacccacatatgacggtggccgaaaacatgggctacggcctgaaggtcaataaggtgccgaaagatcagatccgccatcaggtcgagatggtggccaaaacgctgcagctttcccaccttctggatcgcaaacctaagcagctttccggcggccagcgccagcgtgtggccattggccgcgccatcgtacgtaatccgcgggtctttatgttcgacgaaccgctctccaacctggatgccgagctgcgcgtggagatgcgtctgcatcttgcccgtctgcaccaggagctgaaaaccaccatggtgtatgtcacccacgaccagatagaagcgatgaccctggctgataaaattgtggtgatgaactacggaaaggttgagcagatgggggcgccgatggaactctactacaaaccggcgaacaagttcgtggccgggtttatcggctcgccgaagatgaatttcctgccggcaacggtagaggcctggcaaccgggtgagctgacggtgagattatcccagcagaagacactcacactggccctgaccaccacaccgttgaacgcaggcagcccggtgacgctgggcatccgtccggaacatttaaccaccgatctccgccacggcacgcggctgacgtttaactgtgaagtggttgagcgtctgggcaataacacctacctctttggtcagtgctacggccacgacaatatgaagattttgctgccgggcgatgtgaaattcgcaccgtggcagcaaattgatgtggcttttgacgatcgccactgcatggtgtttgacgagcaggatgtgcgggtgagtgccgacatcgatgaagcggtacgctcggtcgcttaa

SEQ ID NO: 122405 - DNA, 1215 bp, Enterobacter cloacae
atgaaaaagaacatactcgctgctctgatcctctctacgctcgcggtgcaggctcacgccaccacgcagcttaacgtctgggaagacatcaaaaagtcgtccggcattaaagacgcggtcgccgatttcgaaaagcagtacgacgttaaggttaacctgcaggagatgccttacgcgcagcagctggaaaaactgcgcctcgacggcccggcaggaattggcccggacgtgctggtcattcccaatgatcaactgggcggcgcggttgtgcaagggctgctgacccccctgaatctggaggcgaagcagaccgaacagtacacgccggcgtcgataaatgccttcaaaatggataacaccctttacggtgtgccgaaagcggttgagacgctggtgctgatttacaacaaagacctgatcgcgaagccgctcaactcacttcaggactggtatgacttttctaaacagcagcgcgccaaaaaccagtacggcctgctcgccaagttcgaccagatttactacagctggggggctatctccccgatgggcgggtacatcttcggtaaaaacgataaaggcggttataacgccagcgacgtgggcctgaacaagccgggcgcggtagacgcggtcacctacctgaaaaaattctataccgatgacgtgttcccggcggggatcatcggcgataacggtctgaacgcgatcgattctctgtttaccgagaaaaaagcggcagccgtcatcaacggtccgtgggcgttccagccgtatgaagcggcgggcattaactacggcgttgcgccgctgccgacgctgccggacggtaagccaatgagttcattcctgggcgtgaagggctatgtcgtctctacctggagcaaagacaaagccatggcgcagaaatttatcgaatttatcaaccagccgcagtacgtcaaaacgcgctatatcgcgacgcgtgaaattccgccgctgaccgcgatgattgacgatccgctcattaagaacgacgagaaagccagcgcggttgccgtgcaggccgcacgggcgacagcgatgccgggcattccggaaatgggtgaagtctgggctccggcgaacgcggccctcgagctgagcctgaccggtaaacaggatccgaaagccgcgctcgacagcgcagaaaaacaggttcagatgcaaatcgaagccatgcaggccagcaaccggtag

SEQ ID NO: 122406 - DNA, 1305 bp, Enterobacter cloacae
gtgagtatcatcccggaacattttgccaaaccgcgcgtggccgggcgtcacgcctggaccagcctgctgctggcggtcattcccggcttcggtcagttttaccaccgtcagtggctgaaaggggtcatcttcctggtgctgcttgccagttttatcggcgtatttgctgattttctgcgcgaagggctgtggggactggtgacgctgggtgaggaggtgccgcgcgacaactccatcttcctgctggcggaggggatcatcagcgtgttaatcgctgcgttcggcgtgatggtgtattacctgtcgatgcgtgatgcgtgggtcaatggcctgaaacgtgacgaagggttgcagcttaacagcgtgcgtaaacagtatcagatgctattgagcgacggcttcccgtatctgatgatcaccccgggctttatcctgctggtgtttgtggtggtgtttcccattttgttcgggtttgccatcgcctttaccaattacaacctctaccacacgccgccggctaagctggttgactgggtcgggtttaagaacttcatcaatatctttacgctctctatctggcgttccaccttcttcgacgtgctgcagtggacggtggtctggacgctgctcgccactacgctgcagtgtacggtgggcgtactgctggcgattctggtgaaccagaaagatttacgctttaagccgctgatccgcaccatctttattttgccgtgggcggtgccgggctttgtcaccatcctggttttcgccgggatgtttaatgactcgttcggggtgattaacaacgccattctggccttctttgggattgcgcctaaagcctggatgaccgatccgttctggaccaaaacggcgctgatcatgatgcaaacctggcttggtttcccgtttgttttcgccatgaccaccggcgtgctgcaggccattcctgatgacctgtatgaagcggctaccatggacggcgccagcagctggacccggttgcgaaccattacgctgccgctggtgctctacgccatagcgccgatcctgattacgcaatacaccttcaatttcaataatttcaacatcatctatctgttcaataacggcggaccggcggtggtggggtcgaatgcgggcggcaccgacattctggtgtcgtggatctacaaactgacgatgtcatcttcgcaatatgccattgcggcgaccatcaccatcctgctgtctgtttttgtcgtcggcctggcgctatggcagttccgcgccaccaaatctttcaaaaatgacgacatggcgtaa

SEQ ID NO: 122407 - DNA, 852 bp, Enterobacter cloacae
atggctaaatcacaaagtattaaacgtgagaaatgggtccgcctttcactctcctggctggttattgtgctggtgtcggtcatcatcatttacccgctggtgtggacggtgggcgcctcactcaacgcgggcaacagcctgttaagctcctctgttattccgcagaacctgtcgttccagcattacgccgacctgtttaatggtcaggtgaactatatgacgtggtactggaactcgatgaaaatcagcttcctgaccatggtgttgaccttaatcagcgttagctttaccgcctatgccttctcgcgttttcgctttaaggggcggcagaacggactgatgctcttcctgctgctgcagatgatcccgcagttctcggcgctgattgccatcttcgtgctctcgcagctgttgggcttaatcaacagccatctggcgctggtgctgatttacgttggcggcatgatcccaatgaatacctatctgatgaagggctacctggacgccattcctaaggatctggacgagtccgcgcgcatggacggagccagtaacttccgcatcttcatcgagatcatcatgccgctttccaaacccattgtggcggtggtggcgctgttctccttcaccgggccgctgggggatttcattctctccagcaccattttgcgcaccccggacaaatacaccttacccatcgggctttataacctggtggcgcaaaaaatgggtgccagttacaccacctacgcggcaggcgcggtgctgattgcggtgccggtcgcgatcctttatctggccttacaaaaatacttcgtctccggtctgacctccgggagtactaagggataa

SEQ ID NO: 122408 - DNA, 1203 bp, Enterobacter cloacae
atgaaaagactcaaacccgctttgcttgctgtttgtctttcttgcggtcttgccgcgagtgcgttcgccgcggacggggtaaaaacgcgtccttttaacgccatgccggcagactttattaagggggcggacatctcgacgctgctcgaggcggaacagcatggcgcaacattttataaccagaacggccagcagcaggacgcgattgccattctgaaagccaacggcgtgaactatgtgcgcctgcgtttgtgggtggatccgcaggatgccaacggaaaaacctacgggggcggcagtaacaatctggaaaacacgctggcgctggcgaagcgcgtgaaggcccagggcataaaactcctgctcgatttccactacagcgatttctggaccgacccgggcaaacagttcaaaccaaaagcctgggagaagatggattacccgcagcttaaaacggcaatccatgactatacgcgcgacaccattgcccgctttaaaaaagagggcgtgctgccggacatggtccagattggtaatgaaatcaatggcgggctgctctggccggaaggcaaaagctgggggcagggtggcggcgagtttgaccgcgtagccgggttactcaacgccgcaatcagcgggatgaaagagaacctgaccgacggcgagcaggtgaaaattatgctgcacctggccgaaggcactaaaaatgacaccttccgctggtggtttgatgagataacgaagcgcgatgtgccgttcgatattatcggcctgtcgatgtacacctactggaatggcccgatcggcgcgctgaaagccaatatggatgacatcagcaaacgctataacaaagacgtcattgtggtggaagcggcctatggctatacgctggagaactgcgataacgcagaaaacagtttccaggccaaagaagagaaggacggtggctatcccggcaccgtgcagggtcagtacgattatatccacgatttaatgcaggccgtgattaacgttcccgatcgtcgcggtaagggcctgttctactgggagccgacctggattgccgtaccgggcaccacatgggccaccaaaaccggcatgaaatatatccatgatgactggaaagagggaaatgcccgcgaaaaccaggcgttatttgattgtcatggcaaagtgctgccgtcgataacggtatttaaatag

SEQ ID NO: 122409 - DNA, 2058 bp, Enterobacter cloacae
atgaataaatttgcgcctttaagttcgaaggtcgctgcgttattgcatggcgccgactataacccggagcaatgggagaattaccccggtattattgaaaaagatattgccatgatgcagcaggcgaaatgtaatgtcatgtcggtgggcatatttagctgggcgaagctcgaaccgcgtgaaggggaatatgattttgtctggctggataacgtcattgataaattatattcagcggggatccatattttcctcgccacgccgagcggtgcgcgcccggcatggatgtcgcaaaaatacccgcaggtgctgcgcgtagggcgtaaccgcgtgcctgcgctgcacggtgggcgtcataaccattgtatgtcttccccggtgtaccgtgagaagacattcaaaatgaataccttactggctgagcgttattcacagcacccggcggtgctgggctggcatatctccaatgagtacggcggtgagtgccactgcgatctgtgccaggagcgctttcgtgactggctgaaagcgcgctacaaaaccctggatgcgctgaaccacgcatggtggagcaccttctggagccacacctatagcgactggtcgcagattgagtcccctgcgccgcagggcgaggtgtccattcacggtctgaacctcgactggcgccgctttaatacggcgcaggtaacagatttctgccgccatgaggttgcgccgctaaaagccgtcaacgcagcgttgccggtgacgaccaatttcatggagtatttctacgattacgactactggcagcttgcgaaagcgatcgactttatctcctgggacagctacccgatgtggcacaaggagaaagacgaaacccagctcgcctgctataccgccatgtaccacgacatgatgcgcagcctgaaaggcggcaaaccttttgtgctgatggagtccacgccgagcaccaccaactggcagccgaccagcaagctgaaaaagccggggatgcatattctctcctcaatgcaggcggtggcacacggggccgatgcggtgcagtacttccagtggcgtaaaagccgcggttcggtggagaaattccacggagcggttatcgaccacgtggggcatcttgatacgcgtgtcgggcgtgaagtgacgcgtctgggcgaaatgcttgagcgcctgccgggagtggtcgggtgtcgcacgcaggcacgggtggcgattatcttcgaccagcaaaatcgctgggcgctggacgatgccgaagggccgcgcaacatggggatggagtacgaaaaaaccgttaacgaacactaccgtccattctgggaaaaaggcatcgcggtggatgtgattgatgccgatggcgatctcagccagtacgcgctggtgattgcgccgatgctttatatggtgcgggaaggcttcgccgaacgcgcagaagcgtttgtcgccgggggcggccatctggtgaccacctactggagcggcatcgtggatgaaagcgatctttgtcatctcggcgggttcccggggccgctgcgtaaactgctcggcatctgggcagaagagatcgactgtctcggtgagggagaacgtaatctggtacaggggctggcgggtaatgcggctggcctgcaggggccgtatcaggttcgtcatctgtgcgagctgattcatgtcgaaaacgctcagccgctggcgacctaccgggatgatttctacgccggtcggcctgccgtgacggtgaaccgtttcggtaaggggaaagcgtggcatgtggcgtcgcgcaacgatctgccgttccagcgtgatttcttcgccgggattattgacgaactggcgctgccgcgggccatggaatgcgatttcccaccgggtgtggtggcaacggcccgcacggacggcgaaaccacgtgggtgtttgtgcagaactacaccgcccagcagcagctcattacgctgccgcaggggtataccgactgcatgaccgatgccgccgccgcgggtgataccgctctgctgccgtgggattgtcgggtactcaggcgtaaagcgtag

SEQ ID NO: 122410 - DNA, 243 bp, Enterobacter cloacae
atggacagtgaaataactcagcgtttaattcctgcattcggcggcgacgataatatcgaacatgttgaagcctgcattacccgtctgcgcgtcacggtaaaagatttaaataaggtggatacgcaggcgttacaacaggagggggcgctgggcgtgattattatcggtcagcaggtgcatgcgatatttggccggcagtctgataccttgcggcaattattagatgcgcattttagtcattaa

SEQ ID NO: 122411 - DNA, 1266 bp, Enterobacter cloacae
atgaacacgacgatccgctctgtatctgttgcgttggctgccgcgttagcgtctccttcgctgtttgcagcgtcttcagtaccaattgattttcatggatatcttcgctccggtgtgggcgtctcacgggatggtgggatggaggagtggcaaaaaaataaaattggccgtctgggtaacgaggccgatacctacggcgagctggagctgggctcagaggtgtacaaaaagaatgatgtcagcttctacctcgacagcatggtgagcatggtctctgacggctctaacgacaatgaaaccaccttcggcgacgatgcgcagttcgggttgcgtcagctgaatctgcagatcaaggggctgatccccggcgatccgaacgcggtgatctggggcggtaagcgctactaccagcgccatgacctgcacatcattgacaccaaatactggaacatctcaggcgcgggtgccggtatcgaaaactacacgctcggaccgggtgcggtgtccgtggcctggatccgtggcgatgccaacgacgtggactaccgcgtggacggcgatagcgacgtcaatatcaactacatcgaccttcgctatgcgggctggaagccgtgggcgggcgcatggactgaagtgggcattgattacgccatgccaaaccccaccaataagcagaaagagtacggtgggctgtatgaggccgacaacggcgtcatggtcaccggtgagatcagccaggacatgttaggcggctacaacaagctggtgctgcagtatgcgaacaaaggcctggcgcaaaacatggtgtcccagggcggcggctggtatgacatgtggaactacgtgaacgacgccagcggctaccgtgtgattaacaccggcttaattccgattacggacaagctctccttcaaccacgtgctgacctggggctcggcggatgacaccacgcaattcaccgataaatcgcgccttgtctcgctggtgggtcgcgcgcagtaccagttcaccgaatacgtgcgtctgattggtgaagtgggcggtttctaccagaaagatacctacaccgacggctccagctacaagcagagcggagagaagtacaccctcgcactcggactggcggatgggcctgattttatgtcgcgtccggaactgcgcgtcttcgcctcttacctgaatgactccgagaaaggacaatccttcgaagacggcaccgcaaataatacctggaacgttggcgtgcaggtggaagcctggtggtaa

SEQ ID NO: 122412 - DNA, 1077 bp, Enterobacter cloacae
atgaagtcgaaaagcgcaacgttagaggacgtcgcacgccatgcgggcgtctcctatcagaccgtgtccagggtactgaataaatctgccaatgtatccgaagccacgcgtcacaaggtggagaaatccatagagttattgcggtatgtcccgaaccgcctggcacagcagctggtcggaaagcagacccagaccgtcggactggtgacgatttcgctggctttgcatgcgccgtcacaggtcgccgcggcagtaaaacgctatgcaaatgtggaagggtatcaggtgttgatctccatgattgatgagaacgtcaaccacagcatccaggattcgatcaatgaactgaaatctcagctcgtcagtaaggtgatcatcaacgtcccgctggaagcagagcaggcgcagaaaatcgcgacggacaacgacgatatcgtctgtctgttcctcgacgttgacccttacagttccgtgtttaacgtttcgtttaacccggcagatggcacccgtgccagcgtcaaatatctctacgaactggggcaccgggaaatcgcgttgctggcggggccagcctcttctgtctcggcgcagctcaggctgaaaagctggattgaaaccctgaaaggttacggtctggagccggcctcggtgatccgcgggaactgggatgcgcagagcggttacgcgggtgcgctgcagatgctgcgcgagacgccgcaattttctgccgtgctggtggccaacgaccagatggcgctgggggtattaagtgctttccatcagcatcagatttccattccgggtgaaaaatcggtgattggctacgatgacacctacgaaagctcattcttctatccggcattgaccacggtatcgctggacctggatctgcaggggaaggaggcggtgcgccgcattcttgacagtggcgaagacaatgccgtgcgcatgtcatccattttgcctgcccggctggtggtgcggcagtcgaccgggccgaaaggtgagacgggcaaaaacctgcaggcgctggcgcaacagcttcgtgatatcgcacatcagcttggcgatatgtaa

SEQ ID NO: 122413 - DNA, 1002 bp, Enterobacter cloacae
atgtcttacgctattcacaatcaaaacctggcattcaatgacagcgcaatcgcgcaatatatgaataccgattttatcgtcctcgatatttcattatgcgtggcgctggcacgcgagcaatttttcgaaaaattaaaagacgatgatattccatcgcatattttcctcgaagataacggtcggctggcaggcatggttgcggtgcgcaaactgctgcagaccgccgatacggtacagccggtgaaaacgctgatgatttctcagtttctgcaggtcaaaccggaagacgagcgtgccgatgtcgccgtgctgctggcccacggcgaggcggatgtcgtgccggtggtcacgcacggtaaagtggtcggctgcctgaccgaacgcgaaatcgctcatctgctggaagatgatgtcaccgaagatgcccagctccagggagcaacgctgccgctggaaaagccgtatctggaaaccagccccttcagcctgtggaaaaaacgctccgtctggctgctgctattgtttgtcgctgaagcctataccagctcggttattcagcacttcgaagaggcgctggaatccgccattgccctggccttttttattccgctgctgatagggaccggtgggaacagcgggacgcagatcacctccacgctggtgcgtgcaatggcgctgggtgaagtgcgtctgcgcgacgttggccgcgtgttacgaaaggagatgaccacctcgctgatgattgccgccacgcttggtcttgccgggtgtgttcgcgcctggatgatgggtatcgggctggaaattacccttatcgtcagcctgacgctggtctgcattacgctgtggagtgcgattgtctcgtcagttattccgatggtactgaagcgctgcggcattgacccggccgtcgtttccgcgccctttatcgcgacgcttatcgacggaaccggtctgattatctacttcaagattgcgcagtacacgctggggctggaataa

SEQ ID NO: 122414 - DNA, 537 bp, Enterobacter cloacae
atggtcagcatcacgaacgctgcggggtggaatatgacgtggtttgacaatctgctgaatcattttgcgctctatccgacgcatctgttcgcgctgcttttcgtcatcgcgctgagcaagtctacggtactggtttcctccgtgcttccgccggcctcggtgatgctgctggcagggatcaccgtcagccagaccagcctgcatccgggactgacgtggctggctgtcgcggcgggtgccgcaacagggtcggtattgaattatcatatcggccagttgatgggccacacgcggctggtcacgcgcttcacctcccggcacgccgagaaatttttgcgggtacaacatcagctgcagaaaaacggcgtgctggtgctctttaccgcgcgtttcctggcggtgctgcgctatatcgtcccgctggcagcgggcatgctcagactgaacgcggcgaaggtttacgcggtaagcctgatttcagccgtcgtatgggcggcgctgtatgtcggcatcgtcaccggcatcagcgccttttga

SEQ ID NO: 122415 - DNA, 750 bp, Enterobacter cloacae
atgggtcgtttagcaggtaaatatacgctgattaccggcggcacttccggtattggtctcgctaccgcgcaggaatttattgccgaaggggcgcacgttgctgtcaccggacgtaacccggatacccttgccgaagcacaacgcattctgggcgataatgcctgggttattccgaccgatgcgggtgacatcgccgcgcaaaaagcgctggcggacacgctcgcctctcgctggtcgcgtcttgatgccgtgtttattaacgccggcgatgtgacgcacgggctgcttgaagagtggcaggaagacgcctgggatcgcctgatgggcatcaaccttaaaggaccgttctttttgattcaggccctgctgccgctgctcaataatccctcctctgtgatcctgtgcggatccgtgagcgcccgcatcgggctgcctgccagcagcgtttatgccgccagcaaggcgggattactgtcgctggcacgcacgctgtcaggggagctgttgccgcgcggtattcgcgtcaacggcctgagcccgggtccggtggaaacaccggcatttaataaaacggggttaagcgaggaagcgctcaaggcgatgctgggggatatcaccaaacttgtgccgctgggcagaatgggcacgccgacggagctggcgaaagccgcactctatcttgcctctgacgaatcgcgctatatggtgggaacggaactgctggtcgacggcggaatgggaaacctgtag

SEQ ID NO: 122416 - DNA, 360 bp, Enterobacter cloacae
atggcggaatcactcaatataccctgtgaaaaaaaatctgaggtttatctctgcccgatgacgcagtttgtaaacctgatttccggtaagtgggccatcccggtgctctatcgcctgattatgctcaatgcaccggtccggtttggcgatctgctgcgcgccgctgcccccatcacgcaaaaagagctcacgaagcagttgcgcctgtttgagcagcgcgggctggtgtcgcgcactatctacccggagatcccaccgcgggtggagtatcagataaccgcgctggggttaaccctccagagcgcgctctccccgctggccgactggatgagcgaatacggcgatcgccttgaaaagtaa

SEQ ID NO: 122417 - DNA, 177 bp, Enterobacter cloacae
atgataagaaaggcttataaatggccgtcgcgtaatctcacccgaatggctgagatcatgttgcagaatattacctctgacttgccggatagccgcattccactaagcttaatttcacgcggcacagataaaggcactgtccttcagccgcgcggtgaaagaatcctcttttactga

SEQ ID NO: 122418 - DNA, 801 bp, Enterobacter cloacae
atgaagctctctgtctcacctcccccttacgacggcgcgcccacggttgtcctgattgccgggcttggcgggggcggcagctactggctaccgcagcttgccgtcctggagcaagagtaccaggtggtgtgctacgaccagcgcgggacgggcaataatcccgacgtgctgccggaagcctacagcctggcgatgatggccgacgagctggcccaggcgctgaatgccgccgggatcgttcgttactgcgtcgtgggtcatgcgctgggggcgctgatcggcctgcagctggcgctcgaccaccccgatgccctcagcgcgctggtgtgcgtgaacggctggctcactctgaatgctcatacccgacgctgtttccagatccgcgaacgcctgcttcatgcaggcggcgcacaggcgtgggtagaggcacagccgctgtttctttacccggccgactggatggccgcccgcgcgccgcgcctggaggccgaagaggccctggcactggcccacttccagggcaaaaacaacctgctgcacaggctgaatgccctgaagaaagcggacttcagtcgccacgcctcacgcattcactgcccggtacacctcatctgctccgccgacgatctgctcatccctgcggtctgttccactgagctgcaggcggccatccccggcagccacaaggtggtaatgcgccagggcgggcacgcctgcaacgtcaccgagccagaaacttttaatacgctgctgctgaacgggcttgccagcctgctgcacagccctgaacccgctttataa

SEQ ID NO: 122419 - DNA, 585 bp, Enterobacter cloacae
ttgttttttgtgcgggcgtcctgtccggggaatataaaagaaaaaagcccgtactttcgtacgagctcttatcttgaatatggcggtgagggggggattgactcgcttcgctcgccctgcgggcagcctgttcgctgcgcgctcagtctgtccaactggctgtcgccagttgtcgaaccccggtcggggattctcatccccccctgtccggggaatataaaagaaaaaagcccgtactttcgtacgagctcttatcttaaatatggcggtgagggggggattgactcgcttcgctcgccctgcgggcagcctgttcgctgcgcgctcagtctgtccaactggctgtcgccagttgtcgaaccccggtcggggattctcatccccccctgtccggggaatataaaagaaaaaagcccgtactttcgtacgagctcttatcttaaatatggcggtgagggggggattgactcgcttcgctcgccctgcgggcagcctgttcgctgcgcgctcagtctgtccaactggctgtcgccagttgtcgaaccccggtcggggattctcatcccccctgtccggggaatataa

SEQ ID NO: 122420 - DNA, 939 bp, Enterobacter cloacae
atggatataatcttctatcaccccacttttgatactgcttactggattaaggcactttcggcggcgttgcccggggcgcgcgtgcgtgagtggaaacgtggtgataacgaacatgctgactacgcgctggtctggcatccgccggtagaaatgctccagggccgtaaactgaaggccgtttttgcgctgggcgccggcgtggattcgattctgagcaaactgaaagcacaccctgaaatgctgccggaagagatccctcttttccgtctggaagataccggcatgggacagcaaatgcaggagtatgctgtcagccaggtgctgcactggttccgccgcttcgacgactatcaggcattaaaacagcaatcccactgggaaccgctgccggattatcagcgcgaagattttaccattggtatcctaggggctggcgtgctcggcttaaaagttgctgaagcacttgccccgtggggcttcccactgcgttgctggagccgtagccgcaaggattatccgggcgtagaaagttttgccggcgctgatgagcttcctgcgttcctgaacggtacgcgcgtgctcatcaacctgctgccaaatacggccgaaacggtggggattatcaatggtgcactgcttaatcaactggctgaccagagttacgtaatgaacctggcacgcggggtacaccttgttgagtccgatctgctgcaggcgctgaacagcggaaaactgaaaggggcgatgctggatgtgtacagccgcgagccgttaccggccgaaagcccgctgtgggcacatccgcgtgtggcgatgacgccgcacattgcagcggtcacgcgtccggcggaagctgtggcctatattacccacaccatcagtgagatggagcagggccatccggtaaccggacaggtcgacagacagcgcggctactga

SEQ ID NO: 122421 - DNA, 414 bp, Enterobacter cloacae
atgcgtattgcatatgcagttgtttcgataatgctaataacccctataagctgggccggaaatatgacgttccagttccgtaaccctaactttggcggtaatcccaataatggggcgtttctgttgaacgaagcccaggcgcaaaactcctataaggatcccagctttaaggattttagcgtcgataccccatcggcactggacaacttcacgcaggctatccagtcgcagattttgggagggttgctgaccaacattaataccggcaaacccggccgaatggtgaccaacgacttcattgtcgacatcgccaacaaggacggacaactccagttgaacgttaccgatcgaaaaaccgggaaaacctccaccattcaggtttccggtctacaaagtgattcaacgaacttttaa

SEQ ID NO: 122422 - DNA, 390 bp, Enterobacter cloacae
atgaaacgcacgttgagttggatcgccgcagcgagttttatgctcgctgccgggaacggacgggccgtcgaggtcgaagttcccggattgttaacagaccacactgtctcctcggtcgggcacaatttttatcgtgcattcagtgacaaatgggacagtacatttactggaaatataacaatcaacgagcggcccagtgcacgatggggaagttggataacaataacggctaatcaggacgttatttatcaaacatttttattccccacgaaaatagacttcgataaaaacgtagccttagcactggctcaatcagaagatgctattaatcgcctgcaaattgataaagcgctattaagcaccagcgatttagcaaaagacgaattctag

SEQ ID NO: 122423 - DNA, 456 bp, Enterobacter cloacae
atgaaaaatacatcgttatttatgatgtttacattactgggtgcgcctggatttgtaatcgcggctgattcagatttggctaacgctgaatataacttcacggttaatgaattaagtcgttcatcattaaatcaggcagccattattggtcagcagggcatgttaaatgatgctcaggttcgccaggacgggtcaaaattattgtccattgtttctcaggatggagcaggcaacagagcgagagttgatcaatcagggacttataatattgcctggatcgatcagagcggtagcgcgaatgatgcaggtattacgcaagatggatatggtaatagtgcgaaaattatccaaaaagggtcgggtaatagagcaaatattacgcagtacggtacgcagaaaaccgcagttgtagtgcagagacagtcgcaaatggcgattcgcgttattcagcgttag

SEQ ID NO: 122424 - DNA, 456 bp, Enterobacter cloacae
atgaaatttatcaaagtggcagcaattgcagcaatcgtagtttctggtagtgctatggccggtagtattaatcaaggcggttggggtaacgggcatggccacggtggtcatgacagtggtccaaattcaacgctgagcatttaccagtacggtggcggtaactcggctctcgctttgcaaaccagtgcgagaaattccacactgaccattaatcagagtggcggcggtaacggcgctgacgttggccagggctctgatgacagctcgattagtctgactcagaatggtttcggtaacagcgcaacgcttgaccagtggaatggtaaccactcggtgatgaacgttagccagtacggtggtggcaacggtgctgctgttgatcaaaccgcatccggatccactgtgactgttcagcaggttggttttggcaaccacgcgactgcacatcagtattaa

SEQ ID NO: 122425 - DNA, 333 bp, Enterobacter cloacae
atgaataccttaattctcctcgcggcgctttccagtcagatcacgtttaaaacatcgcaacagggaaatatgaccaccattattccgcaggttattctgacggaaccgtgtgaatgtcaggtgcagattgtctctttgcgacaggggcagggggggcaaagttcttcacggcaacaaaacacactttttattcccgctaatcagacgattgatttaatgcggctgagtttaaatatagattccggagacaaggtgaacattactgtcaccgtctctgacgggaaatcgcttcatttatcacagcaatggtccccggcgggaagtgcgctctaa

SEQ ID NO: 122426 - DNA, 321 bp, Enterobacter cloacae
gtgaccaaatatttagcccgacgggtttatggtttaggtttgatcctctctgcatttattactcccgctttttcagccacgattgtcgacggtggtgtgattcattttcgcggcgctattgtcgcagacccctgcgtggtcacaccgcatcatgacgcgtttgcaatgacatgcccggataataatcggatgcaaacgcgcagagtcagctatgaagatgtacttaacggtcaggtcaacgattccagcctcgcaactctcagcatgaagtaccttaatcccgaaaaaacgctcgcggttgttcaaattcagtatcgttaa

SEQ ID NO: 122427 - DNA, 543 bp, Enterobacter cloacae
atgaaaccgcaaattgaagtcattcatggcgatattacgacgatgcacgtcgacgtgatcgttaatgcggccaatccatcactgatgggcgggggcggtgttgacggcgcaatccaccgggctgcaggaccgcagctccttgaggcctgtaaagctgtgcgtcagcagcagggtgaatgtcctccgggtcatgcggtgattaccctcgcgggagatcttcctgccaaagcggtgattcacgctgtggggcctgtatggcatggcggcgatcggcatgaggcgagtattctggaggaggcgtaccgcaactgcctgcgcctggccgcggataacggctataagacgatggcttttccggctatcagcactggggtatacggatatccaaaacctgccgctgccacgatcgcggtagagaccgtttaccgatacctctccctcaagccgatgcctgagaaggtaatttttgtctgtttcgacgaagaaaccacgcacctttatcagcggcttctcacgcagcgtggacaggacgtagagagctaa

SEQ ID NO: 122428 - DNA, 1119 bp, Enterobacter cloacae
atgaaatatgatctgattattattggtagcggctccgttggttctgccgccggatattatgccacccaggctggcctcaaggttctgatgatagatgcccatcttccccctcattcagagggaagtcatcatggcgatactcgcctcattcgtcacgcctatggtgaaggcgagcgctatgtcccgctggtacttcgcgcgcaagcgctctgggacgaactggctaaacagactgaggagcgcattttcgaacgcacgggcatcattaaccttggtcctgcccgctctgattttctcgccagcgtcgaacgcagcgcgaagacatttaacctggacgttgagaagctcgacgcggcggggatcatgtcacgctggccggaaatcaccgtcccggacgattatgttggtctctttgaagcccattccggcgtgctgcattgcgaaacagcaataaaaacctggatagcgctggccgcgaaagcaggctgcgcccagcttttcaattgtccggtcgaggccattaagcatgacgctgacggcgtcacggtgacaaccctggacggagagtacacggcctcccgattgctcatcagtgcgggtacctgggtaacccgtctgctgccagacctgcccgtacagccggtgcgcaaggtcttctcctggttccagtctgatggccgttacagtacgcagaataaattcccggcgttcaccggcgagttacccaacggcgatcagttctacggcttcccttcggataaagacgcgctcaaaatcgggaaacacaatgggggacaaattatctcctctcctgaagaacgtaaaccgtttggcgcctacccacaggatggctctgaagccttctcgttcctgcgaaatattttgccgggcgtcggtggcttactctatggcgcggcatgcacctacgacaacacgccggacgaagactttattatcgatacgctgcccgggcatgagaacacattgctcatcaccggtctgagcggtcacggctttaagttcgcgtcggtgctgggtgaaattgccgcgcagtttgcccagggtattacaccgcagtttgatctgacgcccttctctctttcacgttttaacggataa

SEQ ID NO: 122429 - DNA, 651 bp, Enterobacter cloacae
atgaaatatcagttaagcggtgcagaagcgcgcgtcgtcggatgcctgctggaaaaacaggtcacgacgccggagcaatatccgctctctgtcaacgccgtcatgatggcctgcaaccaaaagaccaaccgcgagccggtaatgaacctcagcgagcatgacgttcaggatgtgctggatgaactggtgaaacgccattatctgcgcaccgtcagcggcttcggaaaccgcgtcaccaagtacgaacaacgtttttgtaattccgaattcggcgacctgaagttgagcgccgcggaagtggcggtgatcacgacccttttactgcgcggggcacagactcccggcgagctgcgcacacgggcttcccgtatgcatgagtttgcggatatgcaggaagtggaacaaaccctggaagggcttgcaacccgcgaggatggcccttacgtggtgcgtctggcgcgcgaaccgggcaagcgtgagagccgctatatgcatctcttcagtggcgaggtggataccgcgacgctggcaacggaacaagagtccactgttgtcagcggcagcctgacggcgcgcgtggacgcgctggaagaggaggtcgctgggctgaaacagcgcctggacgcactgctggcacatttgggagattaa

SEQ ID NO: 122430 - DNA, 225 bp, Enterobacter cloacae
atgcccgacggcgttgcgcttgcgcaggccttcggatttgcaggccgggtaggcgaaacgcctcccggcgaaaccaacaatcggcgcttagtctacccggatttaagggaattactatcggcagatgttacagagggttattcactcatggcctctcgccagagccgttccacgatgcgttgcgccatgatggcctgttcaccggcggtttccggaaccgtctga

SEQ ID NO: 122431 - DNA, 660 bp, Enterobacter cloacae
atgcaaacgttaaaacgtggcctgatggcaactttcttgctttttagccccctggtgcaggcggatggtttacaggatcagctaaacaccttttttgcccagaagctggcgggctttagcgatgaagttgtcgtcacggtacgcacgccaccaaatctgtatccctcctgtgagcagccgtcatttaccgtgaccggcaccaccagactgtgggggaacgtgaacgtgctggcacgctgcgccaacgaaaaacggtatttacaggttgcagtccaggcgacaggcaattatgttgtcgccgctgtccccattgcccggggctccgcactgcaggccaacagcgtgacgttgaaacgcggccgtctggatcagctgccgccacggacaatgcttgaaattaaccaggcgcaggacgccgtcagcctgcgtgatgtcgcaccgggccagccgatacagctgtcgatgctgcgccaggcgtggcgcgtcaaggcgggtcaacaggtgatggtggtggccaatggagatggcttcagtatcaacagtgaagggaaagcgttaaacaatgccgcggtggcgcaaaatgcccgcgtcagaatgtcttcagggcaggtggttagcggaaccgtcgattctgatgggaatattctgattaacctataa

SEQ ID NO: 122432 - DNA, 756 bp, Enterobacter cloacae
atggatcacgcaatatataccgcgatgggcgcggcaagccagacgctcaatcagcaggctgttactgccagcaacctggcaaacgcctctacaccgggctttcgtgcgcagcttaatgcgctgcgtgcggtcccggtggaagggctctccctgccgacgcgtacgctggttacggcctctacgccgggtgcggatatgacgccaggccagatggattacacctcacgcccgctggacgttgccctgcaacaggacggctggctggcggtgcagaccgctgacggcggtgaaggatatacccgtaacggtaacatccaggtgagtgccacgggccagctgacgattcagggtcatccggtaatgggtgaagcgggtccgctgacggtgccggaagggtctgagctgactatcgcggccgacgggaccatttcggcattgaacccgggcgatccggccaataccgttgcgcccgtcgggcgtctgaagctggtgaaggcggaaggcaaagaggtgcagcgtggtgatgacgggatgttccgtctgacccaggcgacccaggccactcggggtgccacgttacaggccgatccgagcatccgcgtgatgtccggcgttctggaaggcagtaacgtcaagccggtcgaagcgatgaccgacatgatcgccagtgcccgtcgttttgaaatgcagatgaagattatcagcagcgttgatgaaaacgcgggcaaggctaaccaacttctggctatgagttaa

SEQ ID NO: 122433 - DNA, 783 bp, Enterobacter cloacae
atgatcagttctttatggatcgcgaaaactggcctggacgcgcagcaaaccaacatggatgtgattgccaacaacctggcaaacgtcagcaccaatggtttcaagcgtcagcgtgccgttttcgaagatttgctttatcaaaccatccgccagccgggagcgcagtcttctgaacaaacgacgctgccatccggtctgcagattggtaccggtgttcgtccggtagccaccgagcgtctgcatagccagggcaacctgtctcagaccaacaacagcaaagacgtggcaatcaaaggccaggggttcttccaggtgcagctgcctgacggtacttctgcctatacccgcgacggatcgttccaggtcgatcagaatggtcagctggtgacggcgggtggtttccaggttcagcctgcgattaccatcccggcgaatgccctgagtatcactatcgggcgtgacggcgtggtgagtgtgacgcagcaggggcaggccgcacctgttcaggttggacaactaaacctgaccaccttcatgaacgacaccggtctggaaagcattggtgagaacctctacaccgaaacgcaatcctccggtacgccaaatgaaagcaccccgggcctcaacggtgcgggtctgttgtatcagggttatgtggaaacctcgaacgtgaacgttgcggaagagctggtgaatatgatccaggtccagcgcgcgtatgaaattaacagtaaagcagtgtcgacgaccgaccagatgctgcagaaactgacgcaactctaa

SEQ ID NO: 122434 - DNA, 954 bp, Enterobacter cloacae
atgcgtattagcacccagatgatgtacgaccaaaacatgcgcgggatcaccgattcccagagcaagtggttgagttatggtgaacaaatgtccaccggcaagcgtgtcaatcgtccgtcggacgatcctatcgcggcgtcgcaggctattgttctgtcacaatcacagtcacaaaatagccagtttgcgttggccagatcgttcgcatcacaaaaagtttctctcgaagataatgtgcttaaccaggttactgccgctatcaccagtgctaaagagaaattagtctatgccggaaacgcaaccttaagtgatgacgatcgcctgtcgctggcgagcgatttgcaaggtattcgcgaccaattgatgaaccttgcaaacaccgcggatggtaatggtcggtttatctttgccggctttaagactgaagtgccaccgtttgattccgttaccggtgactacaaaggcggtactgaggctatttcgcagcaggttgataccgcgcgtaatatggtcattagccacacgggtcagcagatcttcgaaagcatcaccagtaacgccaaagaactgccaggtggcggatatggcgagacgaacatgttcaagatcctcgatacggcgattaccgcgcttaaggttcccgtcgataccgactctgctgcagctgaagcacaggggaaaatcatttctgatgctcaaaccggcatcacaaatacccagaacaacattcttactgtcgctgctgatgtaggtaccaagatgaacgagcttgaaaagctggataaccttggtgacgatcgtgcactgggccagactaagcagatgagcgacctggttgatgtggactggaacgcagcgatctcctcttacaccatgcagcaggccgcgctgcaggcatcttataaagcgtttagcgatatgcagggcatgtccctgttccagctgaacagataa

SEQ ID NO: 122435 - DNA, 939 bp, Enterobacter cloacae
atgatgaagcgagttgagcgtatagacagggtggaactcatgcgcacatttgttcgtattgtggaaagcggatcgctatccggggcggcaagactgcttgcgacgagccaggccacggtgagccgccgccttcagtctctggaaacgctgctgggggtacggcttttattgcgaaccacccatgcaacaaaacttaccgatgacggcgagcgctgctatcaacatgcccggcgggtcattgatagctggctggcactggaagatgaaatcggccagacggaggacgagccggttggggtgttacgggtacgtgcaccgcacgcctttgggcaggatcagctcctgagaccgttaacggagtttttgcagcgttatcctcagctgtcggtggtgtggatgctcaacgataagtcggtggattttctgagcgacaatctggattgtgctattcgagttggcgcagaggtggatccggcaaccgtctccgtgctgttggcggaagtgccacgctgtgtggtagcttcgcctgcgctgctggagcagtttgcgccggttcacacaccggaggatctgcaggcgcttccctggattgccatcagcacgttctatcagcgacatgtggagttgtgggatgatcttgcgcaggtaaaacgtatctccattgcgccacgactaagcacggatagcctgcatgttgcgcgcaataccgccctgacagggttaggggtggcgatggtttcaagctggacggtcaagcaggatatccaggaagggcgcttagtgcatttgcttccacagtggcagcccgccgcgctcccggttcatctggtttatccgtggtcgcgttattatccggcgcgtttacgccgttttctggagatgatgaagagggtgatgccggacattgcgggtatgagaaagccggcacgcgagcaataa

SEQ ID NO: 122436 - DNA, 810 bp, Enterobacter cloacae
atgtttttaatcaatggccttgagcaaaacacgctgcctgctggtgacagggcaactcagtttggtgatggctgctttacgacagcgcgcattctcgacggcaatgtctgcctgctcaaggcgcaccttcgtcgtcttcagcagggttgtgaagccttgatgatccccttcacgcactgggacacattgcgtcaggagatgtgccagttggcggccgggaagcaaagcggtgttttgaaggtgattatcagccgcggcagcggtggccggggatacagcggtacagcttgccagcacccaacgcggatcctttcggtgtctgcctgtcctgctcattatctgcgctggcgtgaagagggcgttacgctaacgctcagcccggtacgtctggggcgaaaccctatgcttgccggtataaaacacctcaaccgccttgaacaggtactgattcgcactcatcttgaacagacggacgctgatgaggcgctggttcttgacagcgaagggtttattacggaatgctgtgcggctaatttactctggcggcaggggaacgatgtttatacgccgtcgctcgagcaggccggcgtcaacgggattatgcgtcagttttgtttgcagcagctggcacactctggctttcgcgttgtcgaagtgagcgcgagagaagaggcgctgcaccaggctgatgaaattatcatttgtaatgcgctgatgccggttgtacccgtccgcgcgtatggtcaatacagcttgtcctcgcgcgagctgtttcagtttttagccccgatatgtgagcaaacccgatag

SEQ ID NO: 122437 - DNA, 150 bp, Enterobacter cloacae
atgtttcaggcgatcgcgacgcgtcagcgctcactctccaggcagctggaggacattcaggaaagaaatcggtggagaaggttgaaaggacaggagaatctcgctcatactcttgtgttgtgtcacacagtaatactgagaatgtgttaa

SEQ ID NO: 122438 - DNA, 375 bp, Enterobacter cloacae
atgcttaaagggcgtattgcagcgctggtaatgacgatgttgatcgtagggtgcagcacgcgtccggcgatccccgtcagcgatgaacagacgctggtgatggaatcctccgtacttgctgcgggcatcacggcgcaacaacctgcgttgtcgatcagtgaaatcaactcttctgcttcctctacgctctttaatgaaagacaagaaccagtgacggtgcactaccgttttttctggtatgacgtacgaggtcttgaaatgcatccgctggaagcgccgcgcagcgtcactattccggcaagatcgtcggtaacgctctatggcagcgccaactatctgggtgcacataaggtgagactttatctttatttgtaa

SEQ ID NO: 122439 - DNA, 825 bp, Enterobacter cloacae
gtgccgttacgcaactctgactgtacgcgtgaagagatcctgacgcgttattttccacagtatcgccttatcgcgccgcaggccccttccgggcttggcggcgcgagttgcattatagagcagggcgagcaacgtctggtattgcggcagaatcacgatcccttagcgtcttcatcccatttccgccgtcagtttcgggcactgaaacgccttccggcggatctggtgccaaagccccgtttttaccgccagggctggatggccgtggagtatctggcaggggagatcggcaacacgctaccggaaacggcagtgcttgcggctatgctctgtcatctgcaccggcaaccgcgcctggggtggcgggtgacgctgctgccgttgcttgaacaatactggcagcaggcttcggccgacaggcgaaccccattctggctggcacagctaaaacggctgcgtaaaacgggcgaaccgcagccgcttcggctctcgccgctgcatatggatgttcatgccggaaatattgttcatacgtccctcggtgcgaggcttatcgactgggagtatgccggtgacggagacgtggcgctggagctggcggccgtctggtcggaagatgatgctgcgcggcagcggctcatcaccgactacgcccggatagcgcacatgaatgccgacgccctgaggcgtcaggtgaggcgctggcgaccgtgggtcgtcatgctgatggctggctggtttgaaatgcgctttcagcaatcccgagataaacaatttattgcgctggcagatgatgcctggcgtcagttacaaactaaaggataa

SEQ ID NO: 122440 - DNA, 1932 bp, Enterobacter cloacae
atgaaagacgccatggtccgaaaacaaaaaataagagtcaagacgttgatgctattgtccattttcctcaccgtgacggtgggctttacggcaacgatcggttttatgatgtggcagtggatggatcagcaagaagtgctggctaaaaaacacatccgccagattgctgaagtgcagtcgttgcaggtcagtaaacagatggattccgccctggcggccgcgcgtgacatgggaaacagcgctcaggcactgcgcgacgcgggcatcgctgatcgacaggggctcaaccagctgctaatccattatctctcagcgcaccctcagtttctttcaatgtcgatggcctttgaacctgatgccttcgatggcaacgatgccacctttgccggtcagagcggtgaagatcccgccggacgttacgcccgctacgttgaccgcgacgccacaggcaaaccggcattacatctgctgacggacatcgaaacgcccggcagcggcaattattatctgctgccgaagcaacggcaaaaagatgtcatcatcgaaccctatatttatccctacaatggggtggacgtaatgctcacctcgattgccgcccccatcatgcgtgagggtcagttcctggggtccgtcacatcggatttctcactcgctaccctgcaatcgatgatcggggcgattaaaccgtggaacggtacaggctacgccctgcttctgtcggcgggcaacaacgtggtttccagcccggataaacgtgccgtaggcaagccttacactggaaccgtcacaggggatgaggtgatacgcacaaacgatcctcaactgaaggaagaggcgtttatcacctggcaggcgattaccatcggcaacagtcagacgccctggaagctggctattgtcaccccggtcagcgaagtgatggccgaggcaagacaatttttactgaaagccatcctcctgatggtgttaagcattgtggttgtcagcctggtcatggcgcaaatctttacccgtaaagtggaccgcccggtggggggcgaaccgtcagatgccgccgggatcgcgctggccgtggccggaggcgacctgaacaacgctatcccggtgcgtcccggggataccagcagtattttttacgccctgcacaccatgcagatgcagctcaagcgcatcgtgggtaacatcagcgaagccagccactccgttcacggtggcaccagtgaaatttcggcaggcaatctcgatctggcctcacgcaccgaagaacaggcagcggcgattgtcgaaaccgcggccagcatggaagagatttcggtcacggtgaaaaataacgccgacaatgcgcacaaagctaccacccttaccgatcgcgccgcgacccttgccggacatggcgagacgctggtcaacgatgtcgtggtggtgatcggggaaattgacgaaagcgcccgtaagattggagagatcaacagcattgtggacggtatcgccttccagaccaatattctggcgctaaatgccgccgtagaagcggcgcgcgcgggcgaacaggggcgcggttttgcagtggtggcgggtgaagtgcgcaaccttgcccagcgaagcgccaacgcggcaaaagagatctcccagctgatagccgagtcttcaggccgtgtcagcaaaggcgttgagctggtcaatgaaaccggcgtcatgatgaagcaggtcattgaggccgtgtcgcatgtgcatctggtgattaacgatattgttcaggctctggatgagcagaatcggggaattagccaggtcagcattgccgtcaatcagatggacagcacgacccagcaaaacgcgtccctggtacaacagatctcggcagcggccctgtcactggacgagcaggcgaaatcgctggagaaaacgctggcgtactttacgccataa

SEQ ID NO: 122441 - DNA, 1230 bp, Enterobacter cloacae
atgtatggatttatcgcgagacaacccatttttaacctcgatatgaataccgtggcctatgagctgcttttcagagacggaatgaccaaccgtttcccggatgtgtcggcggaatatgccacatccagaatgatatcagaccagttcttatccgtgccgtcccagcgcatcgccggagaacatacgtcgtttatcaattttccttcacggatgatcatcgaccgcagcgctgaggcgctggacaaaaacaacgtggtcattgagatccttgaggatgctgacccgggtgaggcgcttttgcaggccgtgagagaaatgtatgagcacgggtactgctttgcgctcgatgattttactctcgcaccggaatgggatgtttttttgccctatatttccatcatcaaattcgatgtccagaattacaccttagcgcaaattcaaaattacctgagtgagcgtaaaagcctgaccgggcatattaaatatctggctgaaaaaattgagactaaagaggaattcaaacaatacagcgatgccggattttctctttttcagggatattttttctgtcgtccggaggtgattaaatataaacggctatcgcaaaatcagcttgcaattttccgtctgcaaatggaagtaggacgcaataaacctgactttcggatcatcgaggcgttaatcaaaagcgacctcacgctgtcctataaaatcatgcgctatatgaagcacaccgcttttaaacacatgggggcctgtaatttcagcaagttaacgctgagtgaagtgttgaggtatcttggagaaaatcagctcagaaggtttgtggccgttgtagtgctggcaagtgcagccaacgataccgtcaccgagctttacccgatgagtatgatgcgcgggaaattctgtgaactgattgccgaaaaattgaacgagccgatgctggctgagaatgcgttcatgtgcggtctgttctcactgcttgataccctgcttgagctgccgatggcagagttgatgacgcaaattgctgtcccgcagagcgtgagtaatgcgttgtgccatcaggaagggcagttagcggacatggttcgcctctgccattattacgagcaacagcagtgggatgaggcaagcagaataagtcacgcgctggggctggcagaggaagacatcgtagaggcgatgaggaaggccacgatctgggccggggagaacgccgtcagttaa

SEQ ID NO: 122442 - DNA, 1170 bp, Enterobacter cloacae
atggtgggggggcgtgatagaatacgccgccttgaagttcaatgtcgtgagtattccatgtcagataacagccagaaaaaagtgatcgtcggcatgtccggcggtgtcgattcctccgtttccgcctacctgttgcaacaacagggctataaggtggagggcctgttcatgaagaactgggaggaagatgatggcgaggaatattgcactgctgctgcggatctcgccgatgcgcaggcggtgtgcgataagctgggcattgaactgcacaccgttaactttgccgcagaatactgggacaacgtcttcgagcttttcctggaagagtacaaagccggtcgtaccccgaacccggacattctgtgcaacaaagaaatcaaatttaaagccttcctggaattcgccgcagaagatctgggcgcagactatattgcgaccgggcactacgtgcgtcgtgccgatgtgaatggcaaaagtcagctgctgcgcggtctggatggcaacaaagatcaaagctacttcctttatacactcagccacgaacagattgcgcaaagcctgttcccggtaggcgagcttgaaaagccgcaggtgcgtaaaatcgccgaagagctggatctgatcactgctaagaaaaaagactctaccggtatctgttttatcggcgagcgtaaattccgcgacttccttggtcgttacctgccggcacagccgggcaaaatcgttaccgtcgacggtgatgagattggtcaacatcaggggctgatgtaccacacgctgggccagcgtaaagggctgggtattggcggcaccaaagaaggcagcgaagatccgtggtatgtcgtagataaagatgtcgaaaacaatattctggttgttgctcagggtcacgaccatccgcgtctgatgtccgtcggcctcatcgcacaacagctgcactgggtcgatcgtgagccgctgaagggtacgctgcgctgcacggtaaaaacacgctatcgccagaccgatatcccttgtaccgtcaccgcgctggatgatgaacgcattgatgtgcgtttcgacgagccggttgcggcggtcaccccaggccagtccgccgtattctacagcggcgaaatctgtctgggcggcgggatcattgaacagcgcctgccgctgccggccgtttaa

SEQ ID NO: 122443 - DNA, 1047 bp, Enterobacter cloacae
atgagtacttttactgtagtacccgcaaatcagtctgcagataataatgcgaaaatgatttatcagtggttgagtggtctgtccgatcgacagggtaaaaagctcatttcaggtatttttggtggctatagcaatatcggcggcgtcgatgctttttccctgcaacaaggaaaagacctgcaggccctgaccgggaaattcccggctatttatagcgctgactatgcccgtggctgggatgcctgtacccctggagaggaagccagtttgatcgattttggttgtaatgccgatctgatcgaccactggaaaaaaggcggactggttgcgatcagtcaccatttaccaaacccttgttttgcggggaataatcctggtgatggaaagggggctctcaagcatcctgtgagtaatgatgaattttctgcaatcttacagtctggaacaccggcgcgtgggcgctggctggcaatgcttgataaggtcgctcagggcctacagcaactgaatgagaaaggtgtcaccgtcttttatcgacccttgcatgagatgaatggcgagtggttctggtggggggcaaccggtgagaatacaaacgatactgtacgtatggatctgtatcgacgcctgtatcaggatatctttaactatttcgttaaaacgaaagggttaaacaatttactctgggtcttctctcctgatgcaaaccgggattataagacatcttattaccctggcgcagagtatgttgatattactggcctggacttgtatacagacaatcctgccactgtaaacggttacgatgaaatggtggcattgaataagccgtttgcctttgcagaagtggggccatcaacaattaacggccagtttgattatgcaaacttagtgagtgttattcttcagaaataccctaaagcaaccatgtttatcccctggaacaatgactggagcccgctgaaaaacctgaatgcctctggtgcatacaataatgaccgggtaataaatctcggagatgtatggaacggcagcgttttgagttaa

SEQ ID NO: 122444 - DNA, 351 bp, Enterobacter cloacae
atgttagctacgatccttgtcgctattgttgcattaattcatctctacatacttgtgctggaaatgttcctgtggaacacaaaaacaggccacaaggcatttaatctcagccctgattttgcacgcgacacccgtgtgctggccgcaaatcaggggttgtataacggttttctggcagcgggactgctctggggactgtggcttggtgaaagcggtgttcctgtggtcttcttctttttgacctgcgtgttgattgcgggcatttacggtgccatgaccgccagccgaaaaatactctatgttcaggctttaccggcgctggctgcattgattgcattgtggttgcgttga

SEQ ID NO: 122445 - DNA, 246 bp, Enterobacter cloacae
atgcacaatgaaattgcacttaaatattatgacatcgtcgatgaatacgcgtcggaagccgcggagccggtaagtgaggcagagcgcgatcctcttgcctgttatttccagttgctgctcacccgtttatcgaacaatgaagagatcagcgaggaagcccagcaagagatggcgagtgaagccggcatccgtagcgcgcgcattgatgatattgcgaacttcctcaatcagtggggaaatgaatag

SEQ ID NO: 122446 - DNA, 696 bp, Enterobacter cloacae
atggaaacgtctgatctggaaaaacattaccacgacaccaacgctaagacgctggcactctgggaaaagcgggacggtatcggagcggtaagggagccgttttatgctacgcaaaagctcgcactggcaacaggtttccagccggaaatggccgcgtctgtcgacatgttgtttcgggaactgcgggcgttgacccgccacgactcgttagtagacctccagccgccatccggcttccatttcaccttcgtacccataacgctccctttctacgacgagaatgcaccgttaccggcgaagacgcatcagcttatcgacgcatggatcccttttgccggtctgggtatcacggttcgggaactcaggctggtggcattgcccaaccagctcttgcttgcaggcatacccgatacacttgccgtgaagcagcggcaggcgttttgtgaacgtctgttaaccacggactggcaagaggcgttgcgcttacgccatggcaatacccctttaccagcgccgttctggcacactacgctgttgcgctaccaggcagactgtctgcctgaatcgctgagggcgtttttccgtgagcgccgcatgcagcgttacggtgaggtttgcggagaactaaaactcaacgtcgtgaattataactggacgctatgcagagccgtcacgtcgtcaatgttgacacgttaa

SEQ ID NO: 122447 - DNA, 1512 bp, Enterobacter cloacae
atgaaaaagatcattgccgttgctatcatttcaacgttgctggtcgccctctctctctacgcggttaatgcggttatcgtggcccagcaaaagagcaaacagctcgaggtttcccattcccttttgcaatattcagaagtcctctctcaaagtgtggcgcaggcgctcaaaagcattacgacacagggttgtgataaaaacagtctcgatagttacaggcagataaagttagatagcctctatttcggggatatcggttttattgaaaaggggaaaatagcctgtactgctttttggggtaaactcgccactcccgttgcccttcctgcagagctgcataaaacgccacggggttttcttctggcacagttttccagaaaagatttttttacaggcaatgcggcaatttataataacgtgattatattcacctcccgctatgcttacgataagttcacgccgattacggcgaactattcactgagtacgacgaccaaagatttcggcagaacatttttctcagcctccccggtgataaaagaacagagctggctgcattcgaatctgtttaccttaaccctgacgcagtgcagcgccgtatgggatttgtgtgtgatcgtgaagcatcacaacgcagggctggcttcgttgtcgctggtggtgtttacccttctcacggcaatttcggctttcatctggatagcgatcacgctgtttttcttccgcatctatgaagatcggttctcactggagcgcacgctggttaacgcggtaaaagccaataccatcagcgttaactaccaacccattattcgaatccaggataaaaaaatggtgggcgttgaagttctgtcgagatggcgcgataacaatcatggagaggtctcgcctgagctctttattcccttaattaagaaaattggcctgtatcaaaagtattatatcaatatcatcgaaaaatccctggcagaaatcgcctcgctggcgattaaacatcagctggtgatttcattaaacattggtcgaaccgagattgaggacgggcaattcattaagattctgtgtcgtgagtgtttagtgaacagcattccactctccttgataaaagtcgaactctctgaaaaggcggtttccactgcggatgttctcgaagggttctgtcaggcgttaaaatcactgggtgtgagaatatcaattgacgattttggagtacaaaactctaacctcgcccgcatatcgcttctggaatacgatgagatcaaaatagacaaatcgctggtagatggtattaatgagcattataaacagaatatattcgtcatctttagtgacgccctcgccagactgaataaaacgctcgtctttgaaggtgtggaaagcgaaacgcaatatcgctttatcgcagaccggtatcctgatgccctgattcagggatggtatttctctaaatcactgaccattgatgaactgacgcagcaacttaacaacgataagcaaaaaccagcgcgttaa

SEQ ID NO: 122448 - DNA, 1521 bp, Enterobacter cloacae
gtgcgcaacgttatgctccccattctgtgtgccttatttgtgtttctgagtggcatgctgatcattaactggcagttgtggcatatggcccggtcaaattatgccgaaaccgccgccgcaagcacgcgtaaaattgaggccattcttgctgaggctgtcagtgctgcagataccgcaaaacgggtcgccgctgcagggtgtaccgacaccggacagcgtgaactgggttcggaagctgcgctgaaaccgcatcttcgcgccattatgattgagcagcagggtaggatcgtctgtacctcccttcccggaaacggcgtattgattcttcgcccgcagacgctgcccaacaaaggattgatgctgctccccggtaatcgcctggtgaacggcattccggtgttactttttcagatgcccgtcgcgaaagggcgcgttatcgtaagcgttagcgacgcgcatttgcgggatgttattgcgagtgcagcaaacaacacgggactgaggctggttgttggcgataaagcaatagccggcgcgggcgatgtgaccggctggccccccgtgaagtgggcgggttccttaacagcatcggcacattttccgtttagcatggcctggcagcctcccgcctttttcagcctgacgcgtttactgcatcagggatggagcctcatactgcttatccttgcgttatctgtagctgttggcattcttatccgtcgctacagggggaaaagcagctcgtttgaagacgatctgcgtaaagccatcatccacggcgagatcgttccgtactatcagccgatcgtgaatggcgataccggcggtttgtatggcgtggaagtgctggcaaggtggaagcacccaaaatcaggctttatcccaccggatgtttttattccgattgccgagcgcagcggtctgataattccgctgaccaaaagtttaatggcgaaagtggtgaccgagcttaagccgcttttgcctaagttgccggacggatttcacatcggggtgaacatcagcgccagacacatcaatgcgccttcttttatcgctgactgccgggtctttggaaaaggcttttatggtaaagaggtcaaactggttctcgaagtgaccgagcgtgaaccgctgatcgataatcctcatctggtggaaaatctcaatgcgttacataacgccggtttcgtcattgcgcttgatgactttgggaccgggtattccggactctcctgtctgcacgcgctggcgattgattatattaaaatcgataaaagtttcgtgaaccgggtatcagaggcgaaagactctacgatcctgctggactgtgtgattgacctggcgaaaaaactctcactgcatatcgtggctgaaggggtagaaacgaaggagcaactggactacctcaaccgtaatcagattaccctgttgcagggatactattttggtaaaccggtctcgtataaagaatttattaaagtcatcttatctaagcccctggagaaggtcagtctgtaa

SEQ ID NO: 122449 - DNA, 1473 bp, Enterobacter cloacae
gtgcatgtgaaaaatactttttacacaacaactattaccgtcatcattgtctcattgatcatttcgctgtcgcttgccgtccaaattaccacgtccaggcagcagtcaatccagcaaataaacaccagcgttgccaacctgagccataccttagacgtgtacagcgaagggatcatgcgccaaagtgaaatgttgattacttcggtttccgacataatcaaaatttatggcatgaccccacaacaggccaaaaatatccagcggatgataagcaatcaggataatcttcttatccagataaataatgtggttgtttacgatgcgcaagggaatatttttacggcactgcatgaaagtttttccgggccccgtaaaggggtggacaggtcgttttttatctaccacaaagaaaataagagccagcagatttttattggccagccggtggtcagcagaacgaatggtaaatgggtcataaccattagtcgtcggctggaaacccctaccggcgcgtttaacggtgtcgttgtggttacgctgggtatcgaaaattttctggcgttatacgggcagatcaatattggtcactcaggcgtgatcggcttaacaacccagtcaggcgtgttgctggtacgtcatccgtttaaaaataattacatcggcgcgattgtttcggattcgcctctcttcaggacatacctcaaggtacaaaacgcgggtatcgccagctctgtctcacggtttgataaaatcgaacgcatttatgctttcgagaagaacaagcgctacgggctcgtcaccaccgtggcggtcagtacgcacgaagcactcgccccctggcgcaagcaggctctccagctttctgtactcattttggtttttaccgcgatactcattgcggcgtcctgtttcctttattccgatttatccagaaaaacacgggataacagagcgctgaagattattgcgtctgaagatgcgctaaccggacttttcaaccgacgcatttttgatgaaaaaattctgtcagaaattgcggcctgtgcggccagcgacgccccgatttcggtgttgattgtcgatgtggactacttcaaaaaatacaacgataactatggtcatcccgaaggggaccgctgtttaaccctgctgggaaatagcctcagggagagcctgaaccgggacaaccaggttgtggcgcgctatggtggggaagagtttgcactgatcctgccagacacggatatccaggaagcgctccgcctcggtcagacgatcattcgcaatgtcttttcgctgcatattgaacatgctttcagtcccttcgggcgggtcacggttagcgtcgggatctccactgcgcgtgccgtggatatcgcgggcagccagcagaacatcattatagccgccgaccaggcgctctatcaggcaaaacgtgcagggcgaaaccggcacgcttttgttgcggtgtag

SEQ ID NO: 122450 - DNA, 345 bp, Enterobacter cloacae
atgatccagtgtaaacgcgtatacgaacaggcaagcccggacgatggttatcgggtgctggtagacagactctggccgcgtggcgtgaagaaaaccgatctcgcgtatgatgaatggtgtaaaacgctcaccccgtccaatgatttacgcaaggcgtttcatagcgaaacccttgatttcaacgccttcagcaaggcgtaccgggaagagctggcgcagcacaaggacgaggggttgcgtcttgcggcgctggccagcaagcagaccttaacccttctctatggcgcgaaagataaggaacacaatcacgccctggtgttagccgactggctgcgtaatgtctag

SEQ ID NO: 122451 - DNA, 855 bp, Enterobacter cloacae
atgagcgtaaaaaccgtgaccttttccgcagggcgtccacttccggctattggacagggtacctggtatatgggagaaaaagccagccagcgtaaatccgaagtgaatgcactgcgggcgggcattgatctggggttaacgttaattgataccgctgaaatgtatgccgaaggcggagcggaagaggtggtcggggaggccattaagggccagcgcgacaacgtttttctggtatcaaaagtctacccgtggaacgctggcggtcagaaaggccaggcggcgtgtgatgccagtctgcgacgtctcgggacagaccatatcgatctctaccttctgcactggcgcggtaattatggcctggatgaaaccattacgctgatggaaagactccagcagcagggaaaaattggccgctggggcgtctcaaacctgaattatgaagatatgcaggcgctgtggcgcgaagagggcggttccgcctgtgccactaatcaggtgctttatcatctggcgtcacggggaattgaatttgatctgcttccctggtgtcagcaacaagcgatgccggtgatggcttactgcccgctggctcaggccggtcgcctgcgttcggtgctgatgaaccatccggtcgtgaatgccatcgcgcataaccaccgcgccactgccgcccaaattctgctggcgtgggttatccgccatcagggtgttattgccataccgaaagcggcctcgattgagcatgttaacgccaacgctggagcgctggagataaccctcaccgcggaagaacgtcacaaactggataatgctttcccgccacccacccataaactcccgctggatgtcgtttaa

SEQ ID NO: 122452 - DNA, 417 bp, Enterobacter cloacae
atgctaaaaacagtcgatgtcgttgcggcaatcatcgaaaaagacaacaaaattttactggcccagcgcccggctcatgccgaccagccgggcatgtgggaattcgcaggcggaaaagtagaagccggtgagacgcagcccggggcgcttgtccgcgagttgcacgaagagctcggcatccacgcgcagccaggtgagtatgtggcaagccatcagcgtgaggtgtcacagcggttaatcaaccttcacgcctggcacgttccggcgttcagcggcgcgctgacggcgcattaccacagtgcgctggtgtggtgtacgcccgaagatgcatttggtttcaacttagcgcctgcggacatcccgctgctggaggcgtttattgttttacgcgacgccagaccagcggattcgtgctaa

SEQ ID NO: 122453 - DNA, 570 bp, Enterobacter cloacae
gtgaaagagacgtccacctgggtagatcccatcgccacccttccggtcagcataaaaccgattgccgccatgcagaaaaaacactttggtgccgtgcttaaccccacgcgctggtggggaaggatgccacgtcttttctggctggtggcattgttcgtcggttttctcgaacgtcgtcacgcgcgcctgtcgccggtgctccgttcgctgttaatgacccgggtatcgcagctttgtcactgcgctttttgtatcgatgccaacagtttgcgcctggcggagcgctcgggcgcattggataaggttcaggccgtcaacgcgtggcgtgattccgctctatttagcgaagaggagcgtgcagcgctggcctatgccgaggctgtcaccgcgacgccgccccgcgtggatgacgaaatcaaaagtgagatcacacgccatttcagcgaggacgcgatcgccgaaatgacggcgctgattgcgtttcagaatctctctgcacgctttaatgccgcgctggacatcccggcgcaggggttatgtgccacgtttaaagaggatccccatgcttga

SEQ ID NO: 122454 - DNA, 1308 bp, Enterobacter cloacae
atgaaacgtgtttctcaactgaccgcgctggccatgctgtgtggcctcgcttcattttcctctctggctgctgatatgccgcacgccatgacgctgtctcaacttcaggcacaacacggcgcggtgatcgacacccgcgccagcgcgttttacaacggctggccgcaaacgctgagcgcgccctccgggcatgagcccgccgcacttaacctttccgcctcctggcttggcgcgatgagcgatgaccagattgccgtctgggccagacagcaccagcttacgccggccatgacgatcgcgctctacggccgcgacgccgataatcaggcggtcaaagcgcggctggaaaaagccggctaccaccagatttccgtgctcaacgatgccctgcaggtacctgagcgtctgcagcgtttgccgcactttgaacaactcgtctacccggagtggatccaccagcttcggcagggtaaacccgtcactgctgcgccaacgggcgactggaaagtcattgaagccgcatggggcgcgccgaagttttatctgctgaaccatattcccggtgccggctacattgataccaacgaagtggaaagcgaaccgctgtggaataaagtttctgacgacacgctaaaagcgatgctggcgaagcacgggatccgtcacgatacgaccgtcattctgtatggccgtgacgtatatgccgccgcccgcgtggcgcagatcatgctgtatgcgggcgtgaaggacgtccgcattcttgatggcggctggaaagcctggtctgacgcgggtctgccggttgaacggggaatgcccaaagacgtgaagcccgcccccgattttggtgcaccgatccctggccagccgcagttgatggtggatatggcgcaagcacgcgggatgctgcatcgccaggacgcgtcgctggtcagcattcgttcctggccggagttcatcggcgaaaccagcggctacagctacatcaagccaaaaggtgaaattgccggtgcccgctggggtcatgccggtagcgacgccacccatatggaagatttccataatccggatggcaccatgcgcagcgctgacgacatcgccgccatgtggaaaacctggaacatcctgccggaacagcacgtcgcgttttactgcggcaccggctggcgtgcgtccgagacgtttatgtacgcacgggcgatgggctggaaaaatgtcgccgtctatgacggcggctggtacgagtggagcagtcatccacagaaccccctctccagcggaaaacgcgggccagaaagttcacgctaa

SEQ ID NO: 122455 - DNA, 621 bp, Enterobacter cloacae
atgctgcaggtcagcaatctcaccattgaaccgcttttccgcgaggtcaatttttgtgtgccacgcggcgaaatagtcacgctgatgggcccttccggcagcggaaaatcaaccctttttgcctggatggtgggcgcactgtcagacgacttcgaggctcagggcgaactgtggcttgatgaacgtcgctgcgacggactgcccgtggaggcccgcgggttggggatcctctttcaggatgccctgctgtttgaccatttcagcgtcggacaaaatttgctgctggcattacctgaacggattgtcggacgagcacggcgagaagcggtcgagcaggcgctcggttctgccgggcttgccgggcattacgccagcgatccggcgaccctttccggcggcgaacgtgcccgggtcagtctgctgcgtgccctgcttgcagagccgcaggcgttactgctggatgaaccgttcagccgtctcgataatgcgttacgcgcttcgtttcgggcatgggtatttgacactacccgcgcacgcaatattccggtggttctggtcacgcatgacgacgaagacgtgcccccgggcggcgaagtgattgagatttctcgctggcaataa

SEQ ID NO: 122456 - DNA, 1530 bp, Enterobacter cloacae
atggctgcgtcgttacggcacccgctgagctggctcgtctggctggcgatggcagtcatctatctgccgttgcttcccgccgccgccatactgtttgccccggcattctcgctgaacaactggccgttgctgcttaacgacccgcagctgccacaggcaacggtcgccacgctggtctcaacgcttatcgcgacgctggggtcgatgtttatcgctctggtgatcgtggccctcctgtggccgggcgagcgctggcgacggctcagcagccggctgccgtggctgctcgccgttcctcatgtggcctttgccaccagcgctttactgctttttgccgaagggggcctgttgtatcaggtgtgtagcgtctgtacgccgccgcttgaccgatacggtgcagggctggggctgacgcttgcggtaaaagagagcgcgtttgtgctgtgggccctttacgccgtcctgccggaaaaacgccttgcgcagcaaaaggtcgtgctgcataccttcggctacgggcgttttcaggcgctgaactggctcatccttccaacgatcgcgccggctcttggcgcggtgatgctggcggtgctgacctggtccctgtcggttgtggacgtggcgatggtgctcgggcccggcaatcccccgacccttgccgtactggcgtggcagtggctcagtcagggcgatgcgcagcagcagacaaagggaacgctgctgtgcctgcttctccttcagctgctggccgcgctttctgcactgggttacggcgcatggagactctggcgtcgcacgctgccggatctgagcggacgccgccgaatgtcgcttatcgcgccaccagcgcgtctgttcagcggatttctgcccgcctgcggggtgctttgcgcggtcgtgctgctcatgctggcgcagcgggacgacatcggtgcggttggcaccagtctctcctttggtctgctcgccagcctgatttcgctgggagtaatctttctctggcttgagtggggaccgcagcgaggcacacagtgggtgtggttgccgctggcgctgccggcgctgcccctcgttaccggacaatatgttatcgcgttgcgactgggtatcgacggacactatgccgccgtgctgtggagccatctgctgtgggttttaccgtggatgttgctggtcctccagccagcctggcagaggatcgatccccgtctgatccttaccgccagaacgctcggctggcggcggggaaaaatcttctgcttactgaaatgccccttgctggtacgcccggcgctgctggctttcgcgaccgggttttccgtcagcatggcgcaatacatgccaaccctctggctgggcgcaggccgttttgcgacgctgaccactgaaaccgtggcgctcagcagtggaggcagcattccgcttctggctaaccgggcgctggggttgctgttggtcacggggagcgtgtttgcccttgccgccctgctatcccggctcgcaagccgttaccgacgaggattacgttaa

SEQ ID NO: 122457 - DNA, 1170 bp, Enterobacter cloacae
atgcgccgtgtgcgtttttgcacgtttctgagcggtctgctgctggcagccccgctgtttgcagcggacaactggcaggctatccaacaacaagccaaaggccagaccgtctggtttaacgcctggggcggcgatcgggcggtaaaccgctacctcgagtgggtaagcggtgagatgaaaacgcattacgacataacccttaaaatcgtcccactggcggatgccgccgatgcggtcaaacgtattcaaacagaagccgccgcaggccggaaaacgaacgggtcagtcgacctcttatgggtcaacggtgagaacttccgtaccctgaaagccgctaacctgctgcaaaccggatgggcgcagaccttgcccaactggcgctatgtcgatacccgcaaaccggttatggaggattttgctgtccccaccgatggcgcggaatccccgtggggcggtgcgcagctcacctttattgcccgccacgcaagcctgcctgcgcccccaaacgatcctcaggcgttactggcgtatgcgcagcagcatccgggcaaagtcagctacccacgcccgcccgattttaccggtacggcatttctggaacagttgctcctgaccctcaccgctcacccggaggcgctgcaaaaagcccctgataacacctttgcccaggtgacggctccgctgtggcactacctggacaaattacacccgctgctgtggcgaaagggagaggactttcctccctcgcccgccagaatggataccttgcttgccagcggtagtctcaatctctccctgacctttaacccggcacatgcgcagcaaaaagtggccagcggtgaactgcctgccgacagctacagcgttggttttgacaacggaatgataggcaacgtccattttgtggccattccgtcgaatgccagtgcaagcgcaggcgcgaaggtggtcgccaatttcctcctttcaccgcaggcgcaaattcgcaaggccgacccggccatctggggagacccgagcgtactggatgcgaaaacactgcccgaaaaagaagcgaagctgctcgctgcgcatacgccggcagggctgccgaaaatgcttcccgagccgcacgctgcctgggttaacgcactggagcaggaatggctgcgtcgttacggcacccgctga

SEQ ID NO: 122458 - DNA, 660 bp, Enterobacter cloacae
atgtgcgcccttctgggcgcatttgttctgaccttcgtctttcttccgccggggacgctctccctggaaaccatcaaaacgcaccagcagtcgctcctctcgcacgtggaacaggcaccgtggcaaagcgcgtttttctttttcgccctctacgtgttggtctccgccctgtcgatacccggtgcggcgatactgacgctgctggcgggagcgctgtttacgctgtgggaaggcaccctgctggtctcgtttgcttctaccctcggcgccacgctggcgatgcttgccagccgttatctgctgcgcgactgggtacagcggcgattcacatcgcagatgaatacggtgaacgccggtatggcgcgggacggtgcagggtatctttttgccctgcgtctgatgcccttgttcccgttttttctggtgaatctgctcatggggctgacacgtattgcggtcagtcgctactggtgggtgagccaggtcgccatgctgcctgcaaccattatctttctgaacgccggacgcgcgctggggaaagtgaattcgcttcgcgatattttatcgccgggactgatattcgcctttacactactggggttattgccgctggcgacgcgctggctgttttcccgttttaccccttcatcaaaaaagtga

SEQ ID NO: 122459 - DNA, 966 bp, Enterobacter cloacae
atggaaaatttactggcgttgacactggccgatgaaacgcccgaacagcgtgagggggagggcccctcatttcactggcggtggctgggtcgcggcatccttgaactgacaccggccgcgaagagtgagttatcgctgctgctttcaaccggcatccatggtaatgaaaccgcgccggttgaaattgtcgacctgctgcttcgcgcgttgtatcggggagatatcaccctgcagtgccgtctgctggtggtgcttggcaacccgcctgcgctggcgcaaaacaaacgttatcttgagagcgaccttaaccgcatgtttggcggccgctggtcacagtttgtgccaggcgatgaaacgtcgcgggcgcagtggcttgagcacgtggttgcaacatttttcgccgcggccggtcccgtgcgctggcatctcgacctgcatacggcaattcgcgcctcttatcatgtgcgctttggtgttctgccccagcgtaaccagccgtgggatgaggcgtttctgagctggctgggcgacgccgggctggaggctctggtgtttcatcagtcgccgggggggacatttacccatttcacctgtgagcatttcggcgcgctggcctgcacgctggagctgggaaaagcgctaccgtttggccagaacgatctcgcgcgcttcgcgccaacgcatcttgcgcttcgcgcgctgctcgggggattggcacccgagccaacgcaacagactgtcgtgcgctatcgggtcgtacagcagatcactcgccgcagcgaggccttccggctgcatatggccgcccacacgctgaacttcaccccttttcgcaaaggcgttctgctggcggaagatggcgacgagcgttacgaggtgcagaaaaccactgaatatgttctgttccctaatccatcggtagcgtttggcctgcgtgccgggctgatgctggaaaaagtgtcctga

SEQ ID NO: 122460 - DNA, 129 bp, Enterobacter cloacae
atggagagttgcaacgaaaatattcaaaataatgattttcaaagcaatttagaaaagtatagcgaagtgaagaccaataataaagcaattcaccaggaatattctgcaatagttgtcattgcgctttaa

SEQ ID NO: 122461 - DNA, 558 bp, Enterobacter cloacae
atggagttctttgatatccgtaagatgccggtcagcctctggcgcaatggcgcaggcgagacgcgggaaatttgttgttttccgcccgcaacgcgcgatttttactggcgtgccagtatcgcgaccatcgccagcaatggcgaattctcctcttttcccggtgtcgatcgggtgattaccttgcttgaagggggtgaggtaacgctggatgccggtcaggcgttctgccataccctgaaacatcatcagccataccatttttccggcgatcagccggtgaaagcgctgctttccgaaggacggatgtcgatggatttcaacatcatgacccggcgtgaccgttgtcaggcgaaagtgcgtgtcgctgaccgcacctttaccacgttcggctcccgcgggggcgtcgcgttcgtgttaagcggggcgtggcagcttggcgataagttgctgacggccgatcagggcgccagctgggaggagggcgtccatactctccgcctgctggaggctcagggcaccttattattcagcgaaattaactggctgccggggcactaa

SEQ ID NO: 122462 - DNA, 879 bp, Enterobacter cloacae
gtgagcaggcgtcaatccgccccgcgtcttgagtttgaagcggcggctatctacgaatatcccgaacatcttcgcccctggcttgaggaactgcctaaacagccgggtgtgtatatctttcacggtgagagtgacacccttccgctctacattggcaaaagcgtaaatattcgcagccgggttatgtctcatctgcgcacgccagacgaggcggcaatgctgcgccagtcgcgacgcatcacctggtttcgtaccgccggagagatgggcgcgctcttactggaagcgcggctgatcaaagagcaacagccgctgttcaataagcgcctgcgccgcaaccggcagctctgctccctgcagataaacgccggtaagccgcaggttgtctacgcacgggaagtcgatttttctcacgcccccaatctctacgggctgttcgctaacaaacgggcggctctgcaggctctgcaaacgctggccgatgaattacagctgtgctacagcctgctaggcctcgaagcaaccacccgcgggcgggcctgtttccgctcagcgttaaagcgctgcgcaggggcctgctgtgggaaagaaagcattgaggaacaccacgcccggctcctcgcagggctggcggcgcttagcgttaactgctggccgtgggagggtgccgttgcgctaaaagaagtcggtgacgcgatgacccagtatcacatcatcaacaactggctctggctgggcgctgttgacgatgtaaacgatgcggcaaccttgctgcgcacacccgccggtttcgaccacgatggctacaaaattctctgcaagcccgtgttaaccggcaagtatgaggtcattgagcttagtgccccggcagccagttaa

SEQ ID NO: 122463 - DNA, 1359 bp, Enterobacter cloacae
atgagtaaagtcatcgcttcacttgaaaaggtactccttccttttgctgttaaaataggaaagcagcctcacgttaatgccatcaaaaacggttttattagattaatgccgttgacgctggctggggcaatgttcgttttaattaacaacgtttttctgagctttggtgaaggttcctttttttattcattaggaattcgattagacgcttccacaattgaaacccttaatggtttaaaagccatcggcggcaacgtatataacggtacgttaggtattatgtcgctgatggctcctttctttattggcatggcactggcggaagaacggaaagtggatccgctggccgcaggtttattatccattgccgcctttatgaccgtgacgccatacagcgtcggtgaggcctatgccgtaggggccaactggctgggaggcgctaatatcatctccggtatcgtaatcggtctggtggttgcggagatgttcacctttattattcgtcgcaactgggttatccgtttaccggatagcgtgccggcgtccgtttctcgttcattttccgcgttgattccaggcttcattattctctccatcatggggattatcgcctgggcgctctctcattggggcactaacttccaccagatcattatggactctatctcaacgccgctggcgtcaatgggtagcgtggtcggttgggcgtatgtgattttcacctccctgctgtggttctttggcgtgcatggttcactggcactggcggcgctcgacagcggtatcatgaccccatgggcactggaaaacgttgcactttaccagcagtacggctccgttgacgcggcgctggcagccggtaaaaccttccatgtgtgggcgaagccgatgcttgactcttatatcttcctggggggtaccggggcgacgctgggtctgatcatcgcggtctttattgtttctcgtcgcgctgaccatcgtcaggttgcgaagctggcgctgccgtcaggcatcttccagattaacgagccgattctgtttggtctgccaatcatcatgaacccggtaatgttcattccgttcattctggttcagccactgctggcggccataaccctgacggcctattacctgggcattatcccacccgtcaccaacattgcgccgtggaccatgccggcaggtctgggggcgttcttcaacaccaacggtagcgtggctgccttcctgctggcgatattcaacctcgggattgcaacactgctctatatgccattcgtggcgatagcaaacaaagctgcaaccgttatcgatgaagaagagagcgaagaggatatcgccctcgcactgaaattctaa

SEQ ID NO: 122464 - DNA, 324 bp, Enterobacter cloacae
atgcagggcgcgacgcgtggggggaggatcggctatcatagaattttcctgcttccagaatgtgctttagtgaacccgtcgcttatgaaaccttttcgtcaacaaaaccgccctgtcattagctacgtgccccgcgtcgaacccgcgccgcccgaacacgccctgaaggtggatggttttcgtgatgtctggcaactgcgcggtaaatacgtagcgtttgttctgatgggagaacacttccgccgttcgcccgcgttttcggggccggagtcggcccagcgatgggcgaaccaggtccgccaggatgaagagattgaagaataa

SEQ ID NO: 122465 - DNA, 291 bp, Enterobacter cloacae
atgagcagtggtgacatcacccgctacgtcgttaccatcaacattcatcaagcgtcgctgaccgagcttaatgagctcaacaacgcctttacccgggccaatttcctgctcacactcacggatgacgagggcaatatccatgatttaggcaccctgacgtttggcctgatcagcgccctgagtaaagaagaggttcacgctctggcggccagtctggtcgaaagcgtgaccgacaaagcggcagaaattgatcttgatacctgggaaagctggcagaaaaaagaacaataa

SEQ ID NO: 122466 - DNA, 234 bp, Enterobacter cloacae
atgaaaaaaatcaaaactgccgcagcagcgatggtgctttccgcactgtcttttggcgtatttgctgctgatgaaaccaccccgacagccagtgacacccacagccaaatcggcattgcgaaagccgctgacgttgaagccggatctaacatcgcgccagcctctcagtccaccggtcagtctatgaatgatgcttttgacgtccataaactggttgcaggtgaatggtcctga

SEQ ID NO: 122467 - DNA, 756 bp, Enterobacter cloacae
atgacgttgctgatgcagctcacggacgtcgccgatacggggcgtctggagccgataaccggtgccatcaatgcaggcgaaatcctgcatcttgtcgggccgaacggcgcaggaaaaagcaccttactggcgcgcatggcggggatgaccgccggcgcgggggagataaccctgctggagcataaccttgctgactggtcgccagtctcgctggcgcacaggcgcagttatctggtgcagcagcaggtcccgccctttgcgatgcccgtctggcactacctgatgctgcatctgcacgataaacagcatacgtcgctgctcactgaggtagcggcgggattagggctagaagataaactgtcccggcatgccagccagctttccgggggcgagtggcagcgcgtgcgtctcgcggccgtcattttgcagattcacccggccggcaatccgcacggcagactgctgcttctggatgaaccgatgagcggtctggatgtggcacaacaggccgcgctggacaccctgttaagctccctgagcagaaaagggatcggcgtggtcatgagcagtcatgacctgaaccatacgctgcgtcacgcccaccgggtgtggctgttggcgcgaggaaagatgattgccagcggcacgcgcgatgcggtattgacgccgccaaatcttgcccgcgcgtacaatatgtctttccgcaggctggatatagaagggcataagatgctgatttctaccgcgcaggcgtaa

SEQ ID NO: 122468 - DNA, 1443 bp, Enterobacter cloacae
atgaccctgtcttttactgctcactggcatgacgagttgccgggtttttataccgcactcaaacccacaccgttacaaaattcccgtcttatctggcataacgatcggctggcagatgagctggctgttccacctgagatgtttcagccctccgacggcgctggcgtctggggaggcgaaacgctgcttgccggtatgcagcctctggctcaggtctatagcggacatcagtttggcgtctgggcaggacaactgggcgatggccgtgggattctgctgggcgaacaacggctgcccaacggggagacggtggactggcacctgaagggggccggtctgaccccttactcgcgaatgggcgacgggcgcgcggtattgcgttcgactattcgcgaatgtctggcatccgaagcgatgcatgcgctggggatccccaccacccgcgcactgtcgattgtaaccagtgacaccccggtggcgcgtgaaacgatggaaaaaggggcgatgcttatgcgcgttgcgcaaagccatctgcgttttggccactttgaacacttttattatcgtcgtgagccggaaaaagtccgccagcttgcggattatgccattcgtcatcactggtctcatttccaggacgaggccgataagtacattctctggttccgcgatgtggtagcccgtaccgcaaccatgattgcccgctggcagacggtcgggtttgcccatggggtgatgaacacggacaacatgtcgcttctcgggttgacctttgattacggtccgtttggcttccttgatgactatcagccggggtacatctgcaaccattctgactatcagggacgttacagtttcgacaatcagccggctgttggcctgtggaacctgcagcgccttgcgcaaactctgtcgccgtttatcgacgttgatgccctgaatgatgcgctcgacagctaccaggacattttactgcgcgaatacggcgcgttgatgcgcaacaaactggggctggtgacgcaggagaggggcgataacgacatcctgaacgctctgtttgcactcatggaacgtgaaggcagcgattacacccgcaccttccggatgctgagccagactgagcaacacagtagtgcctcaccgctgcgcgacgagttcattgacaggcagggctttgacgactggtttgcgctttaccgtgcgcggttgcagcaagagcaggtcgacgacgcaacccggcaggcgcaaatgaacgcggcgaacccggcgatggtgttgcgcaattggctggcgcagcgggccattgaacaggcagaacagggtgagtatgacgaattacatcgcctgcatgtggctctgcgtacgccgtttgctgaccgtgatgacgactatgtaagccgtccgccggactggggaaaacgccttgaagtgagctgttcgagctag

SEQ ID NO: 122469 - DNA, 771 bp, Enterobacter cloacae
atgaatctgaacggtaaaaccgcactggtgaccggctcgaccagcggtattggacttgggatcgctggcgtgctggcgaaggccggcgcacagttgattcttaacggtttcggtgacagtgaatcggcaagagacgaaatcgcgaaacggggtaaaacgccgggctatcacgatgcggacctgcgtgacgtccagcagattgaagccatgatgcactacgccgaaacccggtatggcggagtcgatattctgatcaacaacgccggtatacagcacgtcgcacctgttgatgcgttcccggtggagaaatggaacgacattatcgccatcaacctctcttccgtctttcacaccagccggctggcgctgcctgcgatgcaggcgaaaaactgggggcgcatcattaatatcgcctccgtgcatgggttggtcgcgtcgaaagagaaatccgcctatgttgccgccaagcatggcgtggtgggctttaccaaatccctggcgctggagaccgcccgcaccggtattaccgccaatgccatctgcccgggctgggtgctgaccccgctggtgcagcagcaaatcgacagacgtattgccgatggcgtcgcaccggatgtcgctcgtgagcaactgctggcagagaaacagcccgccggtgagtttgttacgccggaacagctaggcgagctggcgttgtttttgtgcagtgacagcgccgtacaggtccgcggcgccgcctggaatatggatggcggatgggtcgcacagtga

SEQ ID NO: 122470 - DNA, 1392 bp, Enterobacter cloacae
atgagtgtgttgattgccctggcggcgctggcattgctgatgctcgcggcttatcgcggatacagcgttattctgtttgcccccatcgcggcgctgggtgccgtgctgctgaccgatccgggggccgtcggcccgacgtttaccggtctgtttatggaaaagatggtcggcttcgtcaagctctacttcccggtgttcctgctgggtgccgtgtttggcaagctgattgagctttccggtttctcacgcgctatcgtcgctgcagcgatccagatcctcgggcgccgccatgcgattccggtcattgtgctggtgtgtgcattgttaacgtacggcggcgtttcgctcttcgtggtggcctttgccgtctatccttttgccgccgaactgttccgccagagcggcatccccaaacgtcttatcccggcgaccgtcgctctgggtgcgttctcgtttaccatggacgccctgcccggtacgccgcagatccagaacattatccccaccagcttctttggcactaacgcctgggccgccccgtggcttgggctgattggctcgctgtttatcctctgttttggcctgctctggctggagcgtcagcggcgaaaggcgctcaacaacaatgagggctacggttccgatctgaaaaatgaacctgaaacgccggacaacattaatctgccccatccgctgatcgccatttcccctctgctgctggtggggatcctcaacctgctgtttacccgctggatccccggctggtacgggacgcaccatgaacttaccctgcccgggctggcgaagccgattgtcaccgaggtcagcaaaatcaccgccatctgggccgtggaagcggcgctgatcgcgggtattgtcatggtactgctttttggatttcgcaatatccggggacggctggcagaaggcagccggacggcggtcagcggcgccattctggcggcaatgaataccgcgtctgaatatggtttcggggcggtgatcgctgcgctgcccggttttctggtcttatccaaagcgctcgccgctatcccgaacccgttgctcaacgaagccatcagcgtgaccgtgcttgccgggatcaccggttcggcgtcgggcgggatgagcatcgcccttgcggccatggccgatacgtttgtcgcggccgcccacgcagccaatatccctctggaggttctccaccgcgtggcctcgatggccagcggcggcatggatacgcttccccataacggggccgtgattacgttgcttgccattacgggtctgagccatcgtcaggcgtatggcggcattttcgctatcaccctcatcaaaagtctggcggtgctttttgtcattgccgtgttctatctcaccggcattgtgtaa

SEQ ID NO: 122471 - DNA, 1182 bp, Enterobacter cloacae
atgaatgaggtcatgattgtcggggccacgcgaacccctgtaggcagttttcgcggatcgctctcctccctttccgcggttgaactgggtgccgtagcggttcgtcgcctgcttgagaacagccggctgtgcgcagatcaggtagacgaactgattttcggtcaggtgctgacggcagggtgtggacaaaaccccgcccgtcagaccgctctcacggccggattgcccgtcagtacgcccgcgacaaccgtcaatctggtatgcggtgccggcttaaaagcggtgcagctcgccgcgcaggctatccgctgcggcgatgccgacgtggttatcgctggcggccaggagagcatgagcaatgccccttacctgctggacggtgcgcggtcagggttgcgttttggtcatacagggttgcaggacagcatgataacggacggcctgtgggacgcatttaacgattatcacatgggcatcaccgcggaaaacgttgcccgccaatatggcatctcccgcgagcagcaggacgcttttgccgcccggtcgcagcaaaaagcggcgtcggccattgagcacggtctgtttgacgcggagatggctccggtcacggtgagcgagggtaaaaagccgccgcgcctggtcagcagtgatgaacaaccccggccgggaaccaccgctgagcaactcgctcagttgcgccctgcctttcgtcgtgaagatggaacggtcacggcgggtaatgcctcaaccctgaacgatggtgccgctgcggtgctgttgatgagcggtgaaaaagcgcgggaaagcggattaccgatcctgggacgggtcgtgagttatgccgtgaccggcgttgatccatcggtgatgggcatcgggccggtcagcgcctgccagacggctctggcccgggcaggctgggcgctggatgaggtggacgtcattgaagcgaatgaagcctttgccgcgcaggcgctggccgttggcaaactgctcggctgggatgaacgtaaggtgaacgttaacggtggtgcgattgcgcttggccaccccatcggcgcctctggctgtcggatcctcgtcacgctgctgcatgagatgcaacgccgcgacgcgaaaaaagggctcgtcaccctgtgtgtgggaggtgggcaaggcattgcattaacccttgcgcgctaa

SEQ ID NO: 122472 - DNA, 657 bp, Enterobacter cloacae
atgttaacccgtgaacagatggccatgcgcgtcgcccgagaactgcgcgacggttactacgtcaacctggggatagggatcccgacccttgtggcgaactatattccggcaggaatggacgtgatgctccagtctgaaaacggcctgctggggatgggagcctttccggatgagcagagccttgacgccgacatgatcaacgccggtaagcagaccgtcaccgcgaggatcggtgccgccattttcgactcggctcagtcgttcgccatgatccggggcggtcatgttgacctgaccgtactcggggcgttcgaagtggatgtcgaaggcaacatcgcctcgtggatgatcccgggcaagatggtgaaagggatgggaggcgcgatggatctggtcgccggggcgcagaacatcattgtggtgatgacccatgccgcaaaaaacggcgagtcaaaactgctgccgcgctgcacgctgccgttgaccggcgctggctgtatccgtcgggtgttaaccgaccttgcgttgctggagattgaagacggcgcgttcattctgcgggaatacgcccccggcgtcagtattgacgacatcgtcagtaaaacagccgggaaaatcatcgtggcggacgacgtgcgcgagatgcgcttcaactga

SEQ ID NO: 122473 - DNA, 708 bp, Enterobacter cloacae
atggcgggactggataagcgcgtcggcagctatgcgcaggcgctggacgggctgacggacggaatgacattgctggcaggcggcttcggcctgtgcggcattcctgagaacctgattgccgaagtcagacgccgtcaggtgcaggggctgacggtggtttcaaacaactgcggcgtcgatggttttggtctcgggatactccttgaaacgcgccaggtacgaaaagtggtggcgtcgtacgtgggcgaaaacgcgctgttcgagcaacaggtgttgagcggcgagctggaagtggaactcaccccacagggaaccctggcagaaaaggttcgcgctggcggagcgggtattccggcgttttacacggccaccggctatggcacccccgtggctgctggcaaggaagttcgccagtttgccggcaagcattatgtcctcgaagaggccattaccggcgattttgcgctgatcaagggctggaaagcggactggtacggcaacgttatctatcgccataccgcgcaaaactttaacccgctgatggccaccgcgggccggataacggtggtggaagtggaagagatcgtcgccccgggcgaactgcccccgtcggccattcataccccggggatctacgtcgacaggctgattgtcggccagttcgagaaacgcattgaacagcgcacgctgcgcgcagagggagtctga

SEQ ID NO: 122474 - DNA, 924 bp, Enterobacter cloacae
atgagaatgagtgtcaaacagttacgcgcgtttttagcggtagctcacactctgaatttcgcgcatgccagtgaacggctgaatctttcccagccggcgcttagcctgacgatcaagggtctggaggaggcgctggggggaccgctgttgcagcgcagcacccgcaaggtggcgctgacgcaggagggggagacctttttaccgatggcgcggcagctgctggcggactgggataacgctgaagaagccatgcatcagtgctttacgctgcagcgcggcaaaatctcagtcgcggcgatgccgtcatttgcggcgaatgtcctgccggaggtgctcaaggcatttcgcgatcgccacgctgggatcaacgtcaccgtgcacgatgttatcaacgagcaggtaattgaaatggtgcgggaagggcgggtcgagatggggatcgcgtttgaaccggcgccgacccataacctgctttttacgccgctgggtctcgatcgatttgttgccattgtgccgaaatcgtccgctctggcagccaaaaaacgcctgtcatgggaagcgctactgacgctggatttcattaccctgcaacgcccttcggccgttcgtctgatgatggaagaagagctggcccgcagcggtcgtaaactggatgtggcgctggagagccatcaactggtgacggtgggcagaatggtcgccagcggcctgggcggcagtgcggtcccggcactgtgcgaggcgcagatgacctcgttaggcgcggtctgtattccactcgataacccgccgattgaaaaatgcatcggcgtgatccatcccgggcacacgcagctttcaaaagcggcgcatgccctgcttgagacgctgaaagatttttatcagcccggtcagggggcgagaaacacctgcggtgaggcgtga

SEQ ID NO: 122475 - DNA, 780 bp, Enterobacter cloacae
atggctgaacgctactgcgcggaacgtcttgtttatcaggtcgggcaacggacgcttatcaacgacgtgtcgctggcgttatctccgggggaaatggtggcgttgattgggcctaacggtgccggaaaatcgacgttactgcgcctgctcacaggctatctcacgccttctggtgggcaatgcagcctggcgggtacgccgcttgaggcgtggcacccgcaaaagctctcacgccgccgggcagtgatgcgccagaatacgcagctcgggtttgactggccggtcgacgcggtggtgggtatgggccgcgcgccctggacgcgctacccggaagccccggttgtcgaagccgtaatggcgataacgggctgcctgcccctcgcagaccgacacttttcggccctctccggtggcgagcaacaacggatccagttcgcccgcgccctggcgcagctctggcatgacggcggtccgcgcggctggctgtttctcgatgaacccacttccgctctggatctttaccaccaacagcatctgctgcggctgttgaaatccctgacccgtcagggcgattttcacgtgtgcgtggtgctgcacgacctcaatctggcagcgctgtgggcggaccggatcctgctgctgcataacggcacgctggtttctcagggcacgccggaaatggttttacaggccgacgcgctggcccggtggtatggcgcgcaggtatacgttggcccacatccggttcacgcctcaccgcaggtgtttctcgccccctga

SEQ ID NO: 122476 - DNA, 993 bp, Enterobacter cloacae
atgtcccgacggatcgcgttgtcgctgtggatgctggccgccatcctgacgatcatgacgctggcggcctccggggctggcgcactgcatctgccggtcagtctgctgtggcgcggcagtgatgaaagcctgcgtcagatctggctgaccattcgtctcccccgggtcctgctggcgctggtcaccggcggctcgctggcgctggcaggctgcgtaatgcaggggctttttcgtaatccgctggcggacccggggctacttgggatcagcagcggcgcggcgctggccgtggcgctgtgggtggttattcccctctcgctccccgcgctgatgatgctttacgctcccatgatcgcggcatttgggggtgcgctggcggccactttcgtcatttttgtcctaagccagcagcgtaacagcacactttcacggctgttactggtgggcattgccctcaatgccctgtgcggtgcggcagtcggcgtactgtcatggctcagcaatgatgcccagcttcgccagctctccctctggggcatgggcagcctgggtcaggcgcagtggtctacgctgctggccgtcacctcgctgatggtgccaggcgttctgattatctggcgtcttgcctgcacgctcaatttactgcagctgggtgaagaagaagcgcactaccttggcgtggcggtggcgacggtacagcggatcctgttgctgtgcagcgccttactggttgccgccgcggttgccgtcagcggggtgattggttttgtcggtctggtggtgccgcacctgatacggatgtggctgggcgccgatcaccgggccgtgatccccggctccgtactggccggggcgtctctgctgctggttgccgatacggtggcgcgcacgctggtcgcaccggctgaaatgccggtcggtttactgaccagtctctttggcgcgccgtggttcctgtggctcatttttcgtcgtggaggcgcacatggctga

SEQ ID NO: 122477 - DNA, 822 bp, Enterobacter cloacae
atgaaaaaatggctcgccctgctctgcgccctgccgctggtgacgttcgcggccacaccgcagaaaattgtcgccctggggggtgacgtgactgagattgtttatgcccttggcgcgggatcgtcactggttgcccgcgacagcaccagccagtggccgcaggcggcgaacgccctgcccgacgtcggctatttgcgccagcttaacgcggaggggatcttatccatgcgcccgacgctggtgctggccagtgctcaggcgcagccctcgctggcgttaaaacaggtcgaggaaagtcacgtcagtgtcgtcaccgttcccggcagtcatgacctgagcgtgattgacgaaaaggtgcgagtcattgccgaagcgacgcatcgcgaagcacagggggacgcattgcgcgctacgctgcgccaggcgctggcagccctgcccacctcgccactcgacaaacgggtgctgtttatcctcaaccacggcgggatgaccgcgatggctgccggacaacagaccgccgcggatgctgccattcgcgcagcgggtttgcaaaacgcgatgcagggctttacccgttatcagccgctgtcccaggaaggggtgattgccagccagcctgaccttgtggtgatttcgcaggatggcgtaaaggcattgggcggcgaagcgaatgtgtggacacttcccggcctcgcgcaaacgccggcgggacggaacaggcaggtgctggccatcgacgatatggcgctgctgggctttagcgtgcgcacgccgcaggccatacagcaattgcgcacccgggcggagcaactgccctga

SEQ ID NO: 122478 - DNA, 1029 bp, Enterobacter cloacae
atgaatcactacacacgctggcttgcgctgaaagaagaaaatccgggtcaatacgcacgtgacatcgcaggcttaatgaacatcagcgaagcagagctgaccttcgcccgcgtgggccacgacgcctggcgcctgcacggcgacatccgcgaaatcatcggcgcgctggaagccgtgggcgagaccaaatgcatctgtcgtaacgactatgcagttcacgagcaggtgggcgcgtttacgcatcaacaccttggcggccacgccgggctggtactgaatccgcgggcgctggatctgcgtctgtttctcaaccagtgggcgagcgcgttccacatcagtgaaaccaccgcccgcggtgagcgtcagagcattcagttcttcgaccttcagggcgatgccctgctgaaagtttacacgaccgataacaccgatatttctgcctggggcgacctgcttacgcgctttatctttgccgataatccgccactggcgctgaagcatgccgatgtccctgcccacaacgaaaaggctgatgccgccctcgttgatcaggagtggcgcgccatgaccgacgtgcatcagttcttcggcctgctgaagcgccacaatctgagccgtcagcaggcgtttcgtctggtgggtgacgatctggcctgcagggtagacaacaccgctctggcacagctgctggaaacggtccgcctggaggggaatgaaatgatgatcttcgtcggcaaccgcggctgcgtgcagatctttaccggcgtggtggaaaacgtcgtcccgatgaaaggctggctcaacatcttcaacccaacctttaccctgcatctgcgggatacgtccatcgccgaaacatgggtgacgcgtaaacctaccgctgacgggcacgtcaccagcctggagctcttcgccgccgacgggacgcaaatcgctcagctgtacggtcaacgcagcgaaggtgaaccagagcagcgtcagtggcgcagccaggtcgacgccctgacccgaaaagggctggccgcatga

SEQ ID NO: 122479 - DNA, 1986 bp, Enterobacter cloacae
atgccacacctgcattccgcatttttgcgcccgtcctgccttgcgctatccgttgccagcgccctgccgggcgtcacgtttgcggccacagatgacatgaccgttatcgccaccggcaacgcccgcagcgccttcgaagccccgatgatggtcagcgtgattgacaccgcggccccggaaaatcagaccgccagctcggccgccgacctgctgcgctacgtcccaggcctgatgcttgacggcaccgggcgcaccaacggtcaggacgtcaacctgcgcggttacgaccgccgcggcgtgctggtgctggtggatggcgtgcgccaggggaccgatactggccacctgaacagcacgttcctcgacccggccctgattaaacgtatcgaagtggttcgcggcccgtcagccttactgtacggcagcggcgcgctggggggcgtgatcgcgtatgacaccgccgatgcaaatgacctgctggaaccgggcaaaaacagcggctaccgcgtgtttggtacgggcgcgacgggcgatcacagtctgggcatgggggccagcgcttacgggcgtaccgaaactctggacggactggttgcctggtcgagccgcgatcgcggcgatctgcgccagagcgacagtggaacagcgccgaatgacgaatccatcaacaacatgctggcaaaaggccgctgggccatcgacccggcccagacgctgagcggatccctgcgctattacaataacgcggcgcaggagccaaaaaacccgcaaacccccgccgcagacgccagcagcaatcccatgaccgatcgctccaccattcagcgagacgctcagctgggctatcacctggctccccagggcaacgactggctgaatgccgatgcgaaactctactggtctgaagcgcgtattaacgcccagaaccttgacggcaccggcgagtttcgcaagcagaccaccaaaggtggcaaagtggaaaaccgcacccgtctgttcagcgacacgtttgcctcacatcttctgacctatggcggcgaatactaccgtcaggagcaacatccggggggcaccaccaccggcttcccggaggctaaaatcgattttagctccggctggctgcaggacgagatcaccctgcgcgacctgccggtcacgcttctcggcggtacccgttacgataattaccgcgggagcagtgaaggatacgacgatgtgaatgcggacagatggtcctcccgtgccggactgaccgtcagcccgaccgactggctgatgctgttcggctcttacgcacaggccttccgtgcgccgaccatgggtgaaatgtataacgacgccaaacatttctccatcggccgcttttacactaactactgggtgccgaacccgaacctgcgtccggaaaccaatgaaacgcaggagtttggcttcgggctgcgctttgacaacgtcatgcttgctaacgatgcgctggagttcaaggccagctacttcgacaccaaagccaaagactacatctccaccagcgtcgattttgcggctgcgaccaccatgtccatgaacgttccccacgccaaaatctggggctgggacgtgctggcgaaatacacggccgacctgttcaacctcgatgtagcctataaccgcacccggggaaaagataccgatacgggcgagtatatctccagcatcaacccggataccgtcaccagcaagctggatatcccggtggcgcaaagcggtttctccgtcggctggatcggcaccttcgtcgatcgctcaacccatatcagcagtagctacagcgaacagccgggctatgcggttaacgatttctacgtaagttataaaggccaggagcagctcaaaggggtaactacgacgctggtgctgggtaacgcgttcgacaaggcgtactggtctcctcagggcattcctcaggacggacgcaacggtaagatttttgtgagttaccagtggtaa

SEQ ID NO: 122480 - DNA, 189 bp, Enterobacter cloacae
atgtcacgtacggataacaacgcggcaacgcccgaaaacacacacacagcacctgccccagcgcgcaccgatcgtcggatcgacagtaaaagcctgctgggggacgagggacgcgtgatcatcgagcatgacggccagctttatctgttgcgccagacccatgccgggaagctgatcctcaccaaataa

SEQ ID NO: 122481 - DNA, 630 bp, Enterobacter cloacae
atgtcctctactgaaaaaacgcatcgtggttctccttacgcgcgagaactgatttcattcctgcaaccctactgtaccacgcgcaatgtcgctcccggcgaacagctggatctccaggttaatggccagagcgtgtgctatttgatcctcgaaggcaccgttgctatctaccgcagaagcgacaacatgatgctcaccaccgcacgtagcccggcgctttttggcctcgccaatctgacagacatctacttcaatgattatcttaaaaccgtgaccccctgcctgacgggtatgcttaccaccgctcaggtagaagccgttatcaaagagaatgggttatgggggttgttgtctaagcacctgatgtttgtttataaccggctatacaataatgtgatgcctcagggcgcgcccacggcctatgaaatgattcgccagcaattgataaagctgatggatgaagatgagagttatcgcaacgccatcaccgcagagcggtatattcgcgaaaaaacccagctgtcgcgcagcggggtaatgcgtattctggcggatttaaaaacaggcgggttcattgagatagaagatggcaggctcgttaaaatcaataaactgcctgcccggtactga

SEQ ID NO: 122482 - DNA, 678 bp, Enterobacter cloacae
atgtattttttcagaacccctttactggcaacagcgttgttatctctgatgctgtcaacggctcatgccggcgtcattattggtggtacgcgcattatttttgatggcgctaaaaaggaaacgtcactcagtgtgaataaccctgatggtacgccgtatttaattcagtcatggatcgacgtgccggaaggggcgtcaggcaaggtgccttttattattacgccgcctttgtatcgtcttgatggcgggcaaaaaaacgttgagcgcatcgtgatgacgggggcactgcctcaggatcgggaaagtttattctggctgaatattaaagcgattccgtctgcctcaacgcagatgaacgcattacaaattgcggttaaaacgcgcatcaaactgatttatcggcccgctgagctgcacgcgtccacgcctgacgaacaggccagtcaattacgctggcgcagaaccgggaatgaacttcaggttaataacccgaccgcgtatgtcatcaattttaatgaaatcacccttgggggtaaaaaaatcgatgacgtgtcgtatgtcttacccggtggctcagtccgtttcacgttaccgcaaggggccagcagcagcgtactgacgtttaaagtgattaatgacttcggcagccctgggggcgcgcatcaggcaaccttataa

SEQ ID NO: 122483 - DNA, 2526 bp, Enterobacter cloacae
atggcaatacattattttcgggctcgacctgcacccctggcgacagtgatcggattaatacttgcaggttcatcgcaggcgctttttgccggtgagacatttaatgccgaactggttgaacttgataatccaggaagggggagaacggatttatcggcatttgaatccggatcgcaggcacccggcacctatcacgtcgatattgttcttgatgaccagctaatggcgacccgcgatatcacctttactgcagtaaaagacgaaaagggcaatgacgtcctccgaccgtgcctgagtcttgaccagttaaaacagtggggcgtaagaaccacgcttttcccgcagctggcggcgaacaacggtgaatgcgcaaaccttcaggcgatcccgcaggccagtagcgattttcagtttggcgcacagcggctggtgatcagcattcctcaggccgccatcgacctgccagccagggacgcggttccgccagagatgtgggatgaggggattaatgccgccatgcttaattacagtctgagcggcgcaaacgcgtgggcgaagaacactcgcggcagccagaatgatagccagtacgccaacctgcgccccggggtcaatatcgggccgtggcgcttacgtaattacaccacctggtcacgggattccaccggtgaggatcggtgggacaacgtgtatacctatgcgcagcgcgccgtcattccgctgaaagcacagctgattatcggggacagtaccgcaccggcggatgttttcgacagtatgccatttcgcggcggtcagctggcctcggatgatgacatgctgccggactctcttaaaggctatgcgcccgtggtccgcggcatcgcgcgaaccaatgcgcaggtggtggtccgccagaatggttatcaaatttatcagagctacgtggcgccaggcgcgtttgaaatctcggacatgtatcccaccggcggcgcaggcgatctggatgtgaccatcaaagaggctgacgggagtgagcagcatttcacgctgccttatgcctcgctgccggtcctgcagcgggaaggacgcctgaagtatgcggtgacggccgggcagtatcgcgcctacaacagccgcgtggagaaaacgtcttttggtcaaatcaccggtatttatgggattcagcacggcatcaccctttacggcgggatgcaggggtctgataaataccgttcagtggcgtttggcatcggtaaaaacatgggggatatcggcgcgatctctgccgacgtgacccaggcctggtcaacgccgaataacaccgacaaaacatccggtcagtccttgcgcgcgcgttacagcaaaaatatggcgaagaccgggacaaacttttcaattgcgggataccgatattcaacccgtggctattacgggatgcaggacgtgctggattcctacggcgacagcagcgccctgcaggaccggcggcgtaaccgtgctgaactgaccatgagccaggcgctgggcggcgcgctgggttcactgacgctcagcgccgcacgcgaagattactggaattctggtcaggcgatggcctcctggagcgtgggctacaacaatgactggaacaacgtcagttacggtttgacctggacctacagcaagaatggacgcgggagcgcacaaaacgcggaccacgatcggttgctggcctttaacgtcagcgtaccgttggacaaattcttgccgcgtacctgggctaactatggcatgaacgccagtaagcacaacggcacgacgcacgtggtcgggctgaacggcgtgtctctggaaaacagtgccctgaattggaacgtgcagcaaggttatggcacacagggcacgggaaataccggcaacctgaacggcgactataaaggcacctatggcgaaattgtcgcgggctacagctacgacaaacacagcgagcgcctgaattacgggttgcaggggggcgtcattgctcaccgtgacggcatcacgctttcgcagccgctcggtgaaaccaatatcctggtgaaagcgccgggtgcacacggtgtcgatattcgcaatcaacccggggttcgtacggattaccgcgggtatacggtggttaacaatctgtcggtataccgaaaaaacgacatcactcttgagccggaaactatgccggatgacgtggaacttgagattaatacgcgcaccgtaacaccgacccgcggggcgatagtggaagccgattatgtgtctaaaatcgggcgccgggtgctaatgaccctgtccgacgggcaatatgccgttccgtttggtgcggtcgtcacgctcaaaggcgacagcaacagcagctttattgtgggcgaccgtggtcaggtctatttaacgggactgcccggacagggagaaatcgtggcaacctggggaaatcaacccggtcagcagtgccgcgcgcagtttagcctgcctgcacaacccacctacggcggaataaccgacgttaacgcgctttgccgccaggaaggttaa

SEQ ID NO: 122484 - DNA, 948 bp, Enterobacter cloacae
atgaaatttgctttatctctgatcctgctctgtttactgagcgggtggaatagcgcccgtgccggcacctgtacaaccatcacgccgcaaatatcgacgatatctgtgggcacgattaacgtgcagcgtgatgcccctgtgggcaccattattttttctcgcgccgcctcatcaacgggaacctatttaacgggatgttctaacccgctgatgctgggattcagtatgcgatataacaatgggaacctgagcagttacggtaaccatgtttatgccaccaatgtcagcggtattggtattcgcttttcctcggggaattattttgaaaacccggcttacacgttttcgtataacgcggtgacgtcgtatgtggattggtttggtggaaaagttgaactggtggtgaccggcccggtaacgtcgggcgctttaacgccgggcgttatcggaaccgtggcgcttcagggaagtgacggtgtttatcgtgacggtctgacggtccagttaacagacggcacaattaatgcgctggcatgcacgataacgacggcgcagttgacgttcccgataggcgatattccggcctcatcgtttggctccgttattggaaccacgccatccggcgcccaaaatacgcaaaatctggggttaacctgcagtgccggcaccaatatcagtgtgtcactcagcggtatgcaaaatccggacagcgccaataccagcgtcatggcattaaccggtcaggggaatgccggtacggcaaaaggggtaggggttcagctactttataacggttctcctttggtaatgaacggtcgcctgttattaaaacagtctgcgggaggacaggagacgctcccgttaaccgcgcgctattaccagacgttaaccaccgtggaatcaggctcggcaaatgcgtcagccacgcttacgataacctatcaataa

SEQ ID NO: 122485 - DNA, 516 bp, Enterobacter cloacae
atgatgaaaataatttccgcggcgttgcttgtgtcgggtttactgtgcggcaaagcgctatgtgcagacagcgtaaatatcggggtcaccggaaatatcgtggcctcaccctgcctgtttaataacggcaatacgaatctcgatattaatctgggcaatatccaggcgagtaatatggtgacgccaggatcatcctcagacccggttacgtttgatctgttatttacccaatgtccggtggggacgcgtagcgtcaccgctacctttacgggtacacccgaccctgttgccggcgccgactattacattaaccgcggtacggccacccacgtggcgatagcaatgcgcgaggccggaagtggcatactgaaagggaagggctccagcatgacggaatatgtcgcctcagaccggacggcgaagatggccatgcaggctgcggttatatccaccggaggcagggcgacgcccggcaccctcagcgcagtggtggtcattacgctgcaatacaattaa

SEQ ID NO: 122486 - DNA, 663 bp, Enterobacter cloacae
atgttgaatattttaattagcgagacggattcgttatttcagtctggtctgcagtatttttttatggatttcttttggcgtaattttaatgactgtattcactttgaatatgaaatgacgccgcataacgtcagcacggcggatattattgtcctctctttatgccagggggaaaccctgacctgttttccggaattacagtcacggcaaaaaggcattgtgatcggctgggttgacgatgagcaacgctctacggcgtcgcaatcctgttatcaggatattattttcatctcccgcaggacctctcttgacatgattggcgagacggtaggttgtgcgtggcgtaaaacgcagttgaagggacgtgtgctgcagaaaacgtcctgtttcgattgcgagcataaaatattatcaccgcagcaaatacgcatcgtcatgaacctgtataaaggcttatccgttatgcagacggcagacgcgttacagatcggctataagaccgtttttgcgcacaagtacatgatcatgcaaaaatttaacctgcgaagtgattatgagcttatcgcgctgctcaacaggatggtgaagaaaaacggcacccccaatatttttcgtgattctgtgagacagggtttccaggaccgcccctgtctggaggtgtaa

SEQ ID NO: 122487 - DNA, 1218 bp, Enterobacter cloacae
atgcaaattcataaaaccctgaaaccgatttttgtgaccaggttcaagtgtgtggggccggaatgtttaatttcctgctgccgcggctggacaatttccattgataaaaaaacacatcaaaaatatctttcatcaacgcatcccggtatcgctgcaatcgccaaagacaatctgattctgcagcgtaaaggcaaagtaaactattcccgtattaaactggatgaaaatggggagtgtccgtttatcgatgaaaataagctctgtatggtacaccgtgatttaggtgaaagtgccttatcgcacacctgcagtacttatccccgaagctccacccgctatctggatgaaactcgccacagcatgaccctttcatgtccggaagtggtcaggcgggttctcttcgaccccgatgcgatgttattgcaggagcaggatgaactgctggccgtttataaaaccaatctgattggtcagcgccagtctatgcctcaaagcagccaggtcattcatctccttgcgtggaaaataatccagtcgccagcgaggaatgttgaagaaaatttgatggcgctggctcagttgatcctgaccttacagcatgtgaacttcgatttgcacaatcagtatgagcaggttgaacgcttttacgaagccttgctggaagcgttgcagagcggtaaatcgctgctctctgaaagcaatgtcgggcgatcaaatgcgatgaaatatctggcattgtcgatcctcggcacgaacgtggcgcgagattctgcacgggatgggtatatcaacgaagggcatcggcaaattgctgactttttgaatttcagccatgacagcgatcccgccaggctggcgcagaaattcgacgcgattaaccagcagtgggggaaactttgccaggaatcctgtctgtcagagccgtacgtattacgcaactatctgttgtacaaactctacagcggctatttcccgggtaagaataccgctaccattatgcgtcagttttatcgcatcgttctggactttttttacctgaaagttttcctgagcgtcaaatcaatggatgaacaactggaccagcagatggtcatgaaaaccatcgccagcttctcagaaaagaccctgcacaatcagaccattgatgcccgtatggattttgctatcgataagattaacggtggggacgacctctcgtgcctgctgctcattggctaa

SEQ ID NO: 122488 - DNA, 321 bp, Enterobacter cloacae
atgaacagcagtgatgcagaccgactgattgaccagcttatcggtgaagccgttctttctcttttgaaagagcgaggccccgtcacaaccgaagctctggttcagcgtctgcgtgatatgaaagcgcatgaaaaggatccccagcggcgggagacacttgcgatggtgattgccgacatcggttcaaacaacatcgccctgaaacgtcgcagaaccgcgcaaggacgaaccgatagagagggatctctcaacgttaaaagagacaatgtagtgccgttatttggaaatggaaaaccgtccgatcccagaaaaatacattga

SEQ ID NO: 122489 - DNA, 1221 bp, Enterobacter cloacae
atgcttacaaccatcatataccgcagtcatatctgcgaggacgttccagtgaaagcgctggaaaacatggtagctgctgcaaatagtaaaaaccggcaatccaatgtcacggggatcttgctgtttaacggcacgcatttttttcagttgctcgaaggcccagcggaaaacgtttcatccatttacgagcagatttgccaggacacgcgccaccataacgtggtggagctgatgcgcgatcacggcccctcccgacgcttcggcaaggttggcatggagctttttgacttgcgtcagttcgacagggaagaggtgcttcagcaggttctcgacaaaggcaccagcaggtatcaactgacatatagcgatcgcgccctgcagtttttccgcaccttcgtggaggccacggagaaagccaactattttgaactgccgcctgcagatgcctgggatttcatcccggaagagacgcctttatcggcgcaaccggaggtggtggctaaaggcgcggattgcagctttgcgttccagcctatcgtggatccgtttatgcagcaggtcgtctcctgggaggccttgatccgcacgcccaccggtgaatcgcccggaacctattttgcccaaattcctcgagaagaggtgtacgcctctgatttgaaaagcaagcaggttgcgctctccatggcgagcgctctgggattacaggatcagacattatccattaacctgctgcccatgacgctggtcaacgtgcctggcgccgtggatttcctgctcacggccattgacgcgaatggctttgtgccggagcagattgtggtggaattcaccgagagcgaagcgatttcccgttttgaagagtttacccattcggtcaggcagctaaaaagtgccggtatcagcgtaaccatcgatcactttggtgccggttttgccggtctgcagttactggcgcaattccagcctgacagaattaagattaaccgcgatctggtcgcgaatgtgcacaaaagcggcccgcggcaggccatcattcaggcgattatcacctgctgttcctcgctggagatccagttctgtgccgtcggcgttgagaagcctgaagagtggatgtggctggagtctgcaggcatttcccagttccaggggcacctgtttgccagcccgcgtcacgggggaattccggcgatcgcgtggccagagaagaagtttgaattttga

SEQ ID NO: 122490 - DNA, 687 bp, Enterobacter cloacae
atgcttgccggacttaatgtcattaccgataacctggattacctgctctggggacgtgcggcagtcggtgagcctggcggggtcttgctctcgttgctgatggcgctgggcgcggcggctctcgccctgcccggtggaattgctctcgcgtgtctggcctggcgttttacggggcttgtgcgcaaggcgctctttgtatgggcggaattaattcgcgggatcccgttaatctttgtgattttctggatgtggtatctgctgccgctcatcaccggcggcgatctcccgggggcgctcaccgtcacgctggccctggcctggtttaccgcggcctcggttatgcattcagtactggccggactcagcgccttaccgtcagggcagtacgaggccgccctgtctcagggtttcagtacccggcaaacgctgtcgcgcgtgctgctgccgcaggcgctgcgcaatattctgccgtcactgatggggatttttatcagcctgctgaaggatacgtcgctggcgtttattgtgaatgtccctgagctcaccacggtggccggccaggtgaacaaccgggtgcaaatttacccggcagccatttttatctttacgggtgtggtctattacctgctctgctgctcccttgagcagcttgcgaaacgctggcgcttcaaccggccagcgctttga

SEQ ID NO: 122491 - DNA, 747 bp, Enterobacter cloacae
atgcccgcacttgactggcagggcgtgctgaccggacagcccctgcagtggatcgtatccggatttctcaccaccctgtgggtgacgctcgcggggatgctgctggcaaccctgctcgcgctgctttttctgcttcttcgcctgacgggtggacgtgtcgggaacgcggtcgtcagtagctgggtgtcgctgtttcgcaatacgccgctgctggtgcaactgctgttctggtatttcgccgcctggaatgggttaccgcaggcgttccgggatgccgtgaatgcggatcaccgctggtccgttttgcccggtgacgtctggtggtttacccctgagtttttatgctctgcatgggggttaggcgtattcacctcagctttcttgattgaggaagtggcatcgggactacgttcagtccctgccgggcaacgggaagcggcgctcgcacagggattttccgcgcggcgcttgtttcgttacatccttctgccgcaagggctggccaacgcctggcaacccgttgtcgggcagtatctcaatctgatgaaactctcatcgctcgccagcggcattggctttgccgaactgacctatcaggtgagacagattgaaagctacaacgcccatgcgctggaggcgtttaccgtcggcaccgtcctgtacctgcttaccggtatgctgatgggggcggtgctggtgcgcctcggcccaatctcaggaaggggaaaccatgcttgccggacttaa

SEQ ID NO: 122492 - DNA, 1326 bp, Enterobacter cloacae
atgaataacactcttttcaggcgcacggttattgtctggctgctggcgtgcctcatcagcggcgttttgctttatgccgaacagatccgccgccagttctgggaacgcgatcgtgagttttcgacacgctattccacccttagcgccgtgctgacacaaaatgaatctgttttgccgttactcaacggcgaggaagacctcgcggccctgcgcaaaaaattcccgcacatcctcgcccttgggaaaacctcaggccgtgcgctgaacgccgcccgtgtggaatcgacccgcgattgtcagtactggctgtataatccctggcgtcagatccgcgtacttatcgatcttgcgccgctgctcagcacccaacatacctttgatgcacttgccattcgcttcaatgacgcaaataacgcgccccctgccggggctttctggcactggcagcggaccttcacgcaacccacacaaccttttacccttatggccacggcaaagccgcactggctggccgtctcctggtgggtatatccgttcctgttcttcggctgggcagtgcttatcgccgcggccagcctgctgctctggcaacggcggcagcgccagcacgccgaacagcgcgcacactattaccagcatgcaaggctcaacaccctgggagagatcaccgctgggatcgtgcatgagattaaccagccgctgactgctgttcagacctggattcagggtgctcagcgccagcaacagcaggcgaatccgcaggccgtatcgcaggcgctggctgccgcgctggtacaaacccagcgtatcagcgcgctcttaacccgctttcgcgaacatgtggttcaggaaaaagtcaccttgcgcgacatcgacctgaaaccgtgctggcagcaggtggtcgatctcctggaacatgaacgccgctctgagcatatcgcggtgagccatgcgttcgcggcaggtgccacgcgggttctggcagaccgactctggcttgaacaggtgctgcataatctgctcagtaatgccattcaggcccagcaagagtgcgcgcaagggtgggtgaaaataaccagcgagaaacgggaaaactggatttatatcaccataactgatggcggacctggctttagcccggaggccttgcagaacgcctttatgccgttttacagcggacggacggaaggaatagggctgggaatgacgttaacggagtcgttgatgacgcgcatgaatggaacaatcacgctgggcaacgcgccccagggcggggcgcaggttcggttacaactggcgagtggagaggtaaatacgcgtggataa

SEQ ID NO: 122493 - DNA, 612 bp, Enterobacter cloacae
gtggataacacagtctggctgattgatgacgatgaatccatccgtgagtcgctggccttcttactctcgggaatgggctggcaggtcaatgggtttgaaagcgtggacgcgtttacgtcagcgcacggtgggcgcgcggcgctcgtcggctgtctgctgctggatatgcgcatgccgggaaaaggcgggctgacctggctggaggagggcaaatggccctggccgctgctgccggttatcgtcatgaccggacacggcaccgttgatgcctgccgccgcgcctttcgcaatggcgtctttgagtttttcaccaagccgctggatgccgataagctcattgaaacggtggggctcgccttcgaagagagccagagacgactgacccgttggcaggaaacgtcgcggattaaagcgcgtttcgaacaactgacggcgcgtgagcacgaggtgctggcggtgctgatggaaggacgcagcaataaagaggtggccctgcagttgaacctctcgcccagaacggttgaagcgcaccgggccgcggcgttcgccaagcttggcgtgaccagcctggtgcaggcaatccgcgattacgacaaattacaatccgtataa

SEQ ID NO: 122494 - DNA, 480 bp, Enterobacter cloacae
atgaaaaaagtaatgatggcagccgcgcttgtcgccggtagcgtaagcctgacggcacaggccgacgcattgaaccagaaaaatctctccctggcgcaggccaacgcgctggcgacctccgctattcaggcctgcgtagcgaaaaactaccaggtgacggtcaccgtggtggaccgcgccggtgtggtcaaagcggtgcagcgtaccgacaatgccgggccccacacggtaaaagccagcgaaatgaaagcctataccgcgctgagtgcaaaaaacgcgtcaggcaaggttatggaagccgcgcagagcaatgccggcgcacaaaacatgcgtgatattccgggcttcctgctgctggcaggtggtctgccggtgaaagagggggatgaggtgattggcgcaatagggatcggcggtgcgccgggtggtcatctggatgaagcgtgcgcgcaggcggcgattgacgggctgaagaaataa

SEQ ID NO: 122495 - DNA, 783 bp, Enterobacter cloacae
atgattacactgtgtaaaacctgcggtacctcttatgacgcaacgccggcgcgatgccctgtgtgcgaggatgaacgccagtatgttccggccagcggccaggcgtggagtgattttgcgacggtgacggccacacacagcaataaatggcagcagcttgagccgcagctgctcagcatcaaaacggtgcccgcttttgccatcaaccagcgcgcgctgcttctgcgtaccccccacggcaatatcctttgggattgcattgcgaatctcgacccggcaaccagaaccatcatcacggcgctcggcggtatcagcgcgatcgcgatttcacaccctcactactacaccacgatgcaggagtgggccggggctttcgatgcgccggtttacctgcacgcgaacgatcgcgagtgggttatgcgcgacagcccgatgctccacttctggcagggcgatacgctggacattttccccgcggtaacgttattacgcctcggaggacatttcgctggcggaacggtgctgcactggcaggggggtgatggtgtcttgctggcaggcgatattctacaggtcacgccgggcaaagatgccgtctcgtttatgtggagctatccgaatatgctgccgttgcccgcccgcagcgtcgaagacgtgaccgggcggctggtggggaaaaaattcgctcgcctgtacggcgcttttgaagggcaaaatatcctggcgaatgcggatgagattgtgcagcggtcgggccagaaatatattgcttgtctgaagtaa

SEQ ID NO: 122496 - DNA, 1596 bp, Enterobacter cloacae
atgaagaaaatcgccattatcggctccggccctacagggatttacaccttttattctcttcttaagaacgcgtcgccgctctctgtctccgtttttgaacaggcagacgaagctggcgtgggaatgccctacaacgacgacgataactctcgcctgatgctggccaacattgccagcattgaaatcccgcccctttttatgacctacctcgactggcttaagcgccagagtgaagcccatctggcgcgctttaaggttgataaagccaccttgcatgacagacagtttttgccccgtattctgctgggcgagtattttcgcgacagtttccagacgatagtccaggaagctaagaggcggggatttcaggttgagatccacacgtctgccaccgtcaccgatgttgccccgtcctcctccggcgtgacgctttcggtcaatgactcgccgtttccggaacgattcgatctcgccgtgatcgccaccgggcatgtctggccagaagaagaggaagccacgcgcgcgtatttcccaagcccgtggtcagggttgatggatgcccgcatccgcccctgccgcgtcggtattatgggaacatccttaagcgggctggacgcggcgatggccgtggtcatgcagcacggtgagtttcgcgacggcacattcctcctcgataaaggaagtgaagcgttaaaaattgtactcatgtccaggaccgggattctgccagaggccgatttttactgccctattccgtacgaaccgctgtcggtattaaccgaatcggtactcgaagccgaaatcgccaaaggatcagacggtctgcttgaccgcattttcgccctgatggtgaaagagcttgaactcgccgacccggcctggtgtgagaaaatatcgctgcgcatgcagacggcggacagccttcgcgaagcgtggtttgaggatcgaaaacagcacggtccgtttacctgggctgaagagaacctgaatgaggtcgagcggaacaaacgtgaccggcgcacggtggcctggcgctacaccgtgcttcggctgcatgaagtggttcaggagatggttcctcatcttaccgaggaggacgctgaacgctttaaaaacgggctggcgcgcgtctttatcgacaactatgccgccattcccccgcagtcgattcgcaggcttctcgcgcttcgtgaggccggcatcattagtgttgtggcgctgggtgatgattacacgctggatattggcagcgcgcagacggtgatcgccactaaagagacgacctaccgtttcgacgtctttattgatgcccgcgggcaaaagccgcttaaaacaaaagatctgcccttccctacgctgcgcaagcagctacaggcgacgggcgatgagatcccggatattggcgaggattacacgttaaaagtgccggaaatgcttcgcggacgcattgcatttggcgcaatcccgtggctgatgcacgatcgcccttttgttcagggactggcggaatgtgcagagatagcagaggcgatggcaaaagccgcagagaaaaccgcatcgggttcaagaaggaaattaccgtacagtgatgactga

SEQ ID NO: 122497 - DNA, 747 bp, Enterobacter cloacae
gtggcgcggataaataaaatctcgatcacgctctgtgctttactgtttacaacactcactttcacgccagtggcgaacgcctctcaacaggcgcggcactctgctgtacaaaaaacgcatctggccaaaaccacagaccgtaagaaaaagaccaccacccagactaaaaagaccgcctccagcaagacgaaaacaaaaccttcccgcactgcccacgcaaccaaaagcaaagcctcgcaaactgcagctaatctcgtgacggaaaaatgcatcccccgcaaaggtcataaagcgaaatgcacgaaggtcacgaaaatagcggaagtgcataaggttcgcgtacagaaagcgcaaaaaacggcgttgaacaaactgatggggcagattggcaaaccctatcgctggggcggcagctcaccgcgtaccggtttcgactgcagcggcctcgtctattacgcctataaagatctggtgaagttccgaattccacgtaccgccaatgagatgtatcacctgcgcgacgcgtcaccggtcaaccgcggtgaactggagaatggcgatctcgtcttcttccgcactcaggggcgcggcacggctgaccacgttggcgtatatgtaggcaacgggaaatttatccagtccccacgtagcggccaggacatccagataacctctctcagtgaagactactgggtacgtcactatgtcggcgcacgccgcgtgatgacgccaaaaaccattcgctaa

SEQ ID NO: 122498 - DNA, 240 bp, Enterobacter cloacae
gtggcagagcaactggagtttttccccatccagagcccgtgccggggtatttgtcaggtggatgaacgcggatattgccgtggctgcatgcgcacgcgcgatgagcgttttaactggcaacacttcagcgacacgcagaaacaggaggtgctccgtctctgtcgacagcgacttctgcgcaaaatacgcgcaaacaaagccggtgacaccgaagaaccccagcaaccttcactgttttaa

SEQ ID NO: 122499 - DNA, 2034 bp, Enterobacter cloacae
atgaacctgcaggccttctcctggcgaaatacgccgtggatgaaagcgacacgtcagcagtggcgctatgcgctgcgtaatggcattgcgatgtgtctggcgctgactgttgcctattacctcaaccttgatcagccctactgggcaatgacctctgccgcagtggtgagtttccccaccgtcggcggggtgatcagcaaaagtcttggacgtattgccggcagcctgttgggtgccaccgcagcgttaatcattgcaggtcatacgctgaacgatccgtggctttttttgttgagcatggcgatatggctgggcttttgtacctgggcctgcgcgcattttacgaataacgttgcctatgccttccagctggccggctataccgccgccattatcgcctttccggtggtgaatgtgctcaataccaccgagctgtgggacatcgcacaggcgcgtgtctgcgaagtgattgtcggtattctgagcggcggtttcatgatgatgatcctgccgagcacttccgatggcaccgcgcttattactgccctgaagaccatgcatacccgtttactggagcacgcaagcctgctctggcaaccggataccaacgacgacatccgtcttgcgcatgaaaaggtgatcggccagatcctgaccatgaatctgttacgcattcaggccttctggagccactatcgctttcgtcgtcagaacaccctgcttaactatctgttgcatcagcagctgcgtatgaccagttcaatctccagcctgcgccggatgctgctcaactggcccacgccccctgcacatacgcgcgccgtgattgaaacgctgctcgcggcgcttgcacgcccggatgccgacatctacaccgtcgcgaagattatcgccccgctcgcgccagtagatgagtacgattaccgtcatcgcgccttctggcagcgtctcaactatttttgccggttgtatctgcgcagcagccgctggattaacgccgtggaaaatgccaccccggtcaccgagttcgctgtccccggtagcccggcgctggcacgacacacagactcgatggaggcactgtggagcggttttcgtaccttttgcgcgctcacgctggttggcgcgtggagtatcaccacccagtgggagtcaggccctgcggccctgacgcttgctgctatcagctgcgtgctgtactccgtcgccgcgtcaccgttcaactccctcacgctgctactgcgcaccctggtgctgctctcgctgtttagttttgccgtgaagtttgggttgatggtgcagataagcgacctgtggcagttccttctgttcctgttcccgctgttaaccaccatgcagctgctaaagctgcaaatgcccaaactcgcggggctgtggggacagctgattgtatttatgggctcgtttatctccgtcactaacccgccggtttatgactacgccgattttctcaatgataatctggcgaagatccttggcgttgggctggcgtggctggcatttgcggtgttacgtccgggttcagatgcgcgcaagagtcgccggcatatccgcgagttacgcagaggttttgtcgatcagttgagtcgaaaaccgcatttacgtgaaagtgagtatgaatcgctggtctatcactatgtcagccagctcaataacagccaggactccctttcgcgccgctggctgttgcgctggggcgtggtgctgttgaactgctctcacgtggtctggcaacttagggcatgggaaacacggtccgacccgctatcgcaggttcgtgatgtctgcatcaccctgctacgcgatgtcatgagcgaacgcggtgtccagcagcgtccactggaaaccacgcttgctgaacttcagcgaatttgcgatacccttgcgcaccatcactcgcctgcagcacgagatttagcctcgataatctggcgcctgcactgctcgctgtcgcagctggaacaggcaccggctccgggtacaattggggatcacatcaccccgcaggcatag

SEQ ID NO: 122500 - DNA, 861 bp, Enterobacter cloacae
atgcccctgaaaacgctgaagtacttttccacgctgattgttcttgctctggccctggttgccgggtggtggctctggaatttttatatgcagtcaccctggacacgtgacggcaaagtgcgggctgagcaggtcagcattaccccacaggtttcaggcagcattacgacgcttgtcgtgaaagataaccagtacgttaaaaagggtgacgtgttattccgtatcgacgacaccccctatcatattgcgatccttaacgcccaggcacagctggcgaaggcccagtctgatttagcaaaagccaataacgaagccaatcgccgccggcacttgtcgcgcaactacatttccgcagaagatttagataccgccaatatcaacgttaaggccatgcaggcgagcgtgaacgtcgcggaggctacgctcaaacaggcgcagtgggagctgacacaaaccgttattaccgcgccagtcgatggatggatcaccaacctgtcagcgcgcgtggggaattatgccaccgccgggcaacccgttttcgcccttgtcgacagccactcgttctatgttgtgggttattttgaagagaccaagcttcgccatattcgcgaagggtctcccgctacccttacgctttacagcggctcgcaaaagttacagggtcacgtctccagcattggccgcgccatttacgatcagagtgttgaaatggattcaggcctggtaccggacatcaaaccgaacgtgccgtgggtgcgtctggcccagcgcgtaccggttcgtgtggagtttgaccatttaccgcagggcataacgctggtctccggcacaacctgcactgtcgccatcgggacccggtga

SEQ ID NO: 122501 - DNA, 237 bp, Enterobacter cloacae
gtgacgttttttcaaagctccgtgggactcccccttcaggacctgattttcggtgcgtcagtctactttccgcccttgtttaaggccgtcctggtcggctttatgatttggctcatagcccatcgcctgcttcgcgactggatgtactccggcgagatttggcaccccatgttaatggacctctccctgtttgccctttccgtatgcctgggccttgctgtcttgattgtgtggtga

SEQ ID NO: 122502 - DNA, 1362 bp, Enterobacter cloacae
atgcttgcactacaacgatattttaagaacccttatattacattctgttttggatgcatcgtcgtcgttggaatattacaaggtctctttgtaaaactggtcgaattagtcccttcattctcaccgctgctattcccgacacttaccatatttttgctggtattccacctgtttattgcctgcttcatggtcatgaaatactggtgtgacagacggcggttgtaccttatcgccctcgcctcggccttcgccgggtcgacgatgctgatggccggtaccctctccagcttcccgtcatggctggatctctatcagttcaatgttgtcgactataacgacgccatgatcttctttatgttccgtcatattcttatggcggtgctgataatagtctcagctttgctctattctattcgggattatcccctttcacgccccgcgcatattgccgtggttatcggtacactgctgtttacggtttctatggtcgccctggcctggttctgctccagccactcggcactgataacgctggatctggttgataatgaaacccggcaatttatggttctctggagccaggtcataaatatctttttgattcttctctgggttgtggcgttagcaacgttaatgacgattacccgggtgcggaatcttttttgggttggcggtaatttcttatgtgtttgttatgtcctgacgctctcattactgttagccggcgggcatgctgaggacacgtcctggtatcacgctcgcttattcgaaaccgtggcgacgctgatgattatttttgtcctgctgtacgacgtctttaacctgtatcgcgactcgcacataaagtatcagcagtcttatcagaactcgatccgcgacccgctgacgcgcctttacaaccgcagttatttttacgacgccttaaatcaggcactcagcatcagcaaagccaatcaccctgtgtcggttatcgtcagcgatctcgaccgttttaagcgcatcaacgactgctacggccatctgcagggagacaaagtattgcagtttgtcgccaacctgctgatggattccgtccgcccgcaggacattgcggcacgtattggtggggaagaatttgtcctgatgctgaccaatacttcgtcggaggcagcgtaccaggtggctgaacgcatacggctaaagctgagcagttttgataaggtcagcagcgggggtcagttacctgaatccatcacgattagcatgggggtatttaccgccacctctccgacgacgaccgctgaagcgtgcgtggagaatgctgacaaggcgatgtatgaagcgaaagagaccgggcgtaaccgtgtcgttgtatcgaggtaa

SEQ ID NO: 122503 - DNA, 1125 bp, Enterobacter cloacae
atgaaatcgggtcgctacattggtgtgatgtcgggtaccagtctggatggcgtagacgtcgttctggccgctattgatgaaaacatggtggcacagcaggcgagcctgacctggcctatccccctggcgctgaaagaggacattctcagtgtctgtcaggggcagcaactgacgctttctcagcttggtcagcttgatgtgcggctgggggcgctgtttgccgatgcagtactggctctgatgcataaagaaaagcttcgcccgcaggatgtcgtcgctatcggctgtcacggacaaacggtctggcatgagccggtcggcgatgcaccgcataccctgcaaatcggcgacaacaaccagattgtggcgaagacgggcgtgaccgtagtcggtgattttcggcgtcgcgatattgcgcttggcgggcagggcgcgccgctggtgcccgcttttcatcaggcattgttgacccatccgacagagcgccgaatggtgctgaacattggcggtatagccaacctgtctctgcttatcccggatcaacccgtacgcggctatgacaccggcccgggtaacatgctgatggatgcctggatctggcgtcagcgtggtcaggcgtatgataaagacgcgcagtgggccagcgaaggcaaagtgatcatcccgctgttgcagtccatgctaagcgatccgtacttcgccctaccggcgcccaaaagcacggggcgcgaatatttcaactatggctggctcgaacgtcagctggcgcagttcccggcgcttgcaccgcaggatgtccaggcgacgctcgccgagttaacggcggtttcgatatcggaacaggttcttctcagcggtggctgcgaacgcctgctggtgtgcggcggtggcagccgtaacccgttggtgatggcacgtcttgccgggttattgccgggtaccgaggtgacgaccaccgatgaagccggcatcagcggcgatgatatggaagcgctggcttttgcctggcttgcctggcgtaccattgccgggctaccgggcaatttaccgtcggtgactggcgcacgtgaggccagcgtcctcggggccattttcccggcgaatccacgtcataatcagagttaa

SEQ ID NO: 122504 - DNA, 1173 bp, Enterobacter cloacae
atgttcgatttttcaaccgtcgtggatcgacacggcacctggtgcacgcagtgggactatgtcgccgaccgctttggcgcggccgatctgctgcccttcaccatctccgatatggatttcgcgaccgcgccctgcatcaccgaagcgctgcaccagcgtattcatcacggggtgtttggctacagccgatggaaaaatgaagagtttctcgccgctgtggcacactggttccggcaacgctttaacagccacattgataccgactcgctcgtgtacgggccttccgttatttatatggtatccgaactgattcgcctctggtcaactcccggcgacggcgtggtggtccatacccccgcttacgatgcgttctataaggccatcgaggggaatgcccgccaggtggtcggcgtggcgatggaaaaacatgccacgggctggcagggaaatagggccgcccttgaggcggcgctggcaaaaccggaaaacaaaattttgctgctgtgcagcccgcaaaatcccacgggtaaagtctggacccgtgaagagctgagtcacatggcagaactgtgcgcccgttatgacgtggcggtgatcagcgatgaaattcatatggacatggtgtggggaggccgtcgccatacgccgtggaatgaagtggcacgcggcaaatgggcacttctgagctctggttcaaaaagttttaacataccggcgctcaccggtgcctgggggctgattggcgatgaagagagccgtaacggttacctccgcgcattaaaaggtcgtgacgggctctcttccccttccgtgctggcgctgacggcccacattgctgcctatcagcagggagagccatggctggatgcgttgcgggcgtatctggaggaaaatctggcgtacattgcacgcgaattacaccgcgcgtttccgacgctcaactggcagccacccgaagccacgtatctggcctggatcgatttacgtccactcaaccttgacgacaaaatgctacaaaaagtcctgattgagcagcaaaaggtcgccatcatgccaggatacacctacggcgaagagggtaacggttttgtccgtctgaacgcgggatgcccgcgtagcaagcttgagcaaggggttcagcggctgatcgccggcataacgacgctcctgtaa

SEQ ID NO: 122505 - DNA, 369 bp, Enterobacter cloacae
ttgcataaaataagaacactcagcctgatctgcagttttgggttaaccgggtgcgttgtcgcagatatggattcaagtcattatgactatgttccgtatattcagactatccagaatccctggaccccgggccataccaatgtgcaacaacgccgtgaggatttgtacgcctgcggcgttgatcgaaagtattcgctcaattcatgggacgaaaacttcagtcgtaaccgcctgctgccgggcgaaacgatagaacagcaagattccaggatcaaaaaaatagaagactgtatgaaatcaaaagggtacgttctgtgggattactcacaatgcgggccccgtaaaaaaccgagcggtatgtgtaactag

SEQ ID NO: 122506 - DNA, 195 bp, Enterobacter cloacae
ttgagagaaagtttatttttcgtttcagtcgttatcgcctcagtgaccttcatattcatctggatcatgcttgtcgggccaatgaagggtgaagaaaaaacctacgtacaggattcaacgacgtttgcgattgcggtgatggtactgctgctgattgcctttatcgcggtaacgacaacggttctttttctgtga

SEQ ID NO: 122507 - DNA, 1446 bp, Enterobacter cloacae
atgcaggagaactacgcttttattgccgatgccatcgacacgcgatgtcagctgttaaccgacattgccgacgacatctgggatcaccctgaaacgcgttttgaagagttctggtccgcggaacggattgccggcgcgctggaagcggaaggtttcaatctgacccgtgaagccggcgggattccgaatgcctttatcgccagcttcggcagcggtaaacccgttatcgccctactgggggaatatgatgctctggccggattgagccagcaggcacactgcgcgacggcacagtccgccacgccgggtgccaacggccacggctgtggccacaatttgctgggaacggcagcgctggcgggtgccattgcggtgaaaagctggctggagcagcacggggggagcggcaccgtgcgtttctacggctgtcctggtgaagaaggtggttcagggaaaacctttatggtgcgcgaaggtttgtttgatgacgttgatgccgccgtcacctggcaccctgaagcatttgccggcatgtttaacgtcagcacgctggccaatattcaggccgcctggcggtttcacggcgtggcggcgcatgctgctaactcgccacatctggggcgtagcgcgctggatgccgtaacgctgatgaccactggcaccaatttcctcaacgaacacatcattgagaaagcgcgcgttcattacgctatcaccgataccggtggaatctcacccaacgtggtgcaggcgcaggctgaagtgctgtatctgatccgcgcgccggaaatggccgatgcgcagcagatctacgaacgtatcgagaaaatcgctcagggcgcggcaatgatgaccgaaaccaccgttgcgtgtcgctttgataaagcctgctccagctacctgcccaaccgcacgctcgaagcggcgatgtatcgcgccctgcagcattacggcacgccggagtggacggaagaggagcgccagtttgcgcaggatattcgtgccacgctaacgccaaatgacctgcaaaacagcctgaagaacattgccgcgacggggggagaagccggtaacgcttttgcgcgccgtcagcaggagatgttactgacagatgaggtcgcaccttacgccattaccgataacgtactggccgggtcaaccgatgtgggcgatgtcagctggaaaatgccggtggcacagtgtttcagcccctgctttaccatcggaacgcctttgcatacctggcaactcgtggctcaggggcgaacctcgattgctcataaaggcatgctgctggccggaaaagtgatgggcgcaaccgcgctaaatctgctccaggatgcaacgctgctgcaacaatgccgggaagagttcgaacaacaaatcaccgaaaaaccgtacgtgtgtccgattccggcaggcgtgacaccgtcacctttaaaataa

SEQ ID NO: 122508 - DNA, 564 bp, Enterobacter cloacae
atgaaccctgacgacaaatcactttttcttgacgccatggagggtatccagcccctgaagcgctgcacggatattcactggcagccgagccgcaacacgcgaacgcgtcaggagattgataccgagcaactggataacttcctgaccctgggcttcctggaacttctgcccctggaggagccgctggcgttcagacgggaaggggtgcaacagggcgttattgataagctccgctcgggtaaatattcccgccaggccagcttaaatctgttacgccagcccgccgagcgttgccggcagatgctgttttcctttatccgccaggctggacgcgatggattacgtaacctggtgatcattcatggaaaagggcgggagcagaacgcccatcccaacgtggtacgcagttatctggcgcgctggttaaccgagttcgaggaagtgcaggccttttgcgtggcgctgccgcatcacggcggcagcggagcatgctatgtttcgctacgaaagtctgacgaagcgaaacaggagaactgggaacggcacgctaagcgcagccgttaa

SEQ ID NO: 122509 - DNA, 435 bp, Enterobacter cloacae
atggacactctcttttcttattatccaaagcaacctcttgaattaccgttatttgtagaacgcgtagcgtgtggttttccaagcccggcgcaggattatgtggaagatcgtctcgatcttaaccgcctggccgtcaggcatcccagcgcgacctactttgtgaaggtgagcggagactcgatgatcggcgttgggatcggcgatggcgatctgctggtcgtcgatcgttcgttaaacgccgtgcacggggatattgtggtggcatccgtcgcgggtgagtttacggtcaaagagctgcagacccgcccgatcctgaggttagtgccgcataacgttcgctatcagccgatcacgtttcagtccgaagaggaactgcagatcttcggtgttgtcacccacacactcaaaacgcataaacatgttcgcgctggttga

SEQ ID NO: 122510 - DNA, 1263 bp, Enterobacter cloacae
atgttcgcgctggttgatgtgaacagcttttatgcctcctgcgagacggtgtttcggcccgatctgcggggcaaacccgtggtggtggtctccaataacgatggctgcattatttcgctgtcgcgggaggcaaagcagttcgatataaaaatgggcgagccgtatttcaaattcaaagagaagcgctttcccgcgcgggtttacgtctttagctcgaactatgcgctttatgccgatctcagcagccgggtgatgcagacgctgaccgatttcgccccggccatagagatttactccattgatgaggcgtttgtgaacgttgctggcatcagcaactgcatggcgctggaggcgtttggtcatcatatgcgcacgcaggtgtttaaaaatacgggattaaccgttggcgtaggcattgcccccacgaaaacgctggcgaagctggccaactatgcggcaaagcggtggagcagcacgggaggcgtagtggatttatcggatcgcgagcggcagcgtaaactgctggcgcgcgtaccggtagaggaggtgtggggcgtcgggcggcgcattaccaaaaaacttaatgcgatgggcgtcaccacggcgctggatctggcacaagcttcctcgtgggtcatccgcaaacattttaacgttgtcctggagcgcacggcgcgcgagctgcgcggcgagccctgtcttgatctggaagagttcacgcccacgaagcagcagattatctgtagccgctcgtttggacaccgtattacgcaatacgaggagatgcaccaggccatttgcgcctacgctgaacgggctgcggaaaagctgcgcagcgagcatcaatattgtcgctttatcagcgtgtttttgcgtaccagcccgcatgcggacaacgagatttattacggcaatcaggcgtctgtcaccctgatgacgcccaccaatgactcgcgcgatatcatccgtgccgccaccgatgcgctggggcgcatatggcttgacggttatcgctacatgaaagcgggggtgatgctggcggactttttcagtagcggcgtcgcccagctgaatttatttgacgataaccgtttgcgcgccaacagcgcggcgctgatggagctgatcgatagcgtgaatcattccgggaaagggaagatatggttcgccgggcaggggattgagaaatcctgggcgatgaagcgcgagatgttatcaccggcttatacgacgcggtacgcggatttgccggtagcgaagtag

SEQ ID NO: 122511 - DNA, 882 bp, Enterobacter cloacae
atgaacaataagctcaacgccatttccacctttctgcgcgtcgcagaagcgggttccttttcggcagccgctcgccagagcggaatgaagcagtctgccgtcagccagcagattgccgccctggaacaggagctcggggtggtattactgcatcggacaacgcgaatgatgaagctcaccgagcagggtgaacgttatcgccgtgatatgcagcttttgctggatgccatgcaggaagcggagagacggttgaatcctgccgatcatcagtttcagggcagcgtccatgttcagttgccaagcggtctggggcagatcgttttgccccctctgctggcgcttcagcgcctgcatccggcattgcacctgacgttgtccctggatgaccgcatcgccgacctggtgagcgaaggggtggatgtcgcgctacgccttagcgctgagcctccgcagtcgcatgcggcacgtcttctgatgcggattgaaaccgcgctgttcgctgctcccggctttcaggcggtacactccgtcagcgaactggctgcacatccccatgtgcgatttagcggcatcccgcgggatgcgcctctacggttgatcgccggtgaggaaacaattgacgtgaaagtgcataccgtttttcgtgccaacaccagtgacgccctgttacaggcgctggagtcaggcatcgggattggcggcatgcagctgccgcttgcggcaaaggcgttgcaagccggcacgctggtgccggtattaccggcctggcggttacctgaccggtatctctatgccgtctaccccgacgcccgctttatcccacaacgcctcagaagcgtgatacaggtgatcgaacaaatcctgccgacgcttgccaaataa

SEQ ID NO: 122512 - DNA, 1056 bp, Enterobacter cloacae
gtgaataagatgcagccacaaaacgtcgcgctggtcgctggtgccagcgggatcgtaggcagacagctcgtcaaaacactcctggacaacaaatggcaggtgattggcctgagccgccatgccttatcccatcctgatgctatttcgctgatcaacgttgatttactggatgcggaggatagcgccagggctttgcaagccgctggcgagatcacccatattttttacagtgcctggatgaatgccgggagctggacggaaatggttgaaccgaacgtcacgatgttgcgcaacctggtcagcaatattgaaaaaacggcgcctttgcagacggtaagcctgatgcagggatacaaagtgtatggcgcgcacctgggaccgttcaaaaccccggcacgcgaaagcgatccgggcgtacccggggcagaatttaacgccgctcagctcgcgtggctccgtgattttcagcggggaaaacgctggcactggaatgccatcaggccaggcgtggtgggcagttcggtgccaggcaatacaatgaaccttgcgctgagcatcgcactgtatgcgtccctgtgtaaggctctgggtttacctctgcgttttcccggttcggaacagacctggcacagcattgttgatcatactgacgccggattgctggcggaggcaacgctgtgggcagccacatcacgtagggctaacaaccaggctttcaacgtgaataatggggacatctggcgctggagcgagctgtggccgcgcatcgcacgctggtttgaactggactctgcgccgccggtcagattgtcattccatcagttgtttaaggattatcgtgcgttatggcgcgacattgccggggagcggttggtggaggcggatattttgcagctgaacgacgggcattttgccgattttgtctttagctggaattacgacatgtttggcgacggcagtaagctccgccggtcagggttcacgcgaatgcaggcaaccgatgagatgtttttcagcctgttctcgcagctaagagcggcacgtattattccgtaa

SEQ ID NO: 122513 - DNA, 1509 bp, Enterobacter cloacae
atggggcacttcattggctgtatagtcagttttatcgaaaatttgactgcacagatccccatggccgccccgtccccccattaccgtcggattgctgagatgctgcgtcttacgctggcttcaggcgcgttgcaaatcggcgaccggatgatctctgcacgtaaactggccgagcgcgaacaggtcagtctcccgacggcactggaagcactccgctgccttgaggccgaaggcctgatcgttgcgcgtccgcgttcgggctactacgtccgtcagacccgccagtcccgatgcgtgcagcccacgcgttccctgtcaggccccgtgcctgtgacaatgtcagccgtcgcgcgatcgttattcagtagtgcagaagcccggctgataccgctgggggctgccttgcccgaccccgcgtggctaccaggcgataccctgcaacgtgcgctgcagtctgcaggtcgacgtctggaagcgcgtgggcaaagctatagcctgcctccgggacgggttgatttgcgcagtaagattgccgcccgggctgcgcaatggggcggccgttttggtgcagaggatctcatcattaccgctggcgcgacacaggcgctgcgtctggcgttgcgggctgtgtgccagcctggcgacgtggtagcgatagaacaacccgcctatttcggtacgctgttgttgctggaagatttgggcctgaaggcgctggagatcccaaccgatcctgaagaagggttgctgctggcgccgctcgccgatgctattcggtgccatcatccagcggccgttctggcctcgcccaccgtgcaaaatccgctgggtgccagtatgtccgtcccccgcaagcaggaactggttgccctgctggaagatgcaggcatcccgttaattgaggacgatgtttatggcgacctggtcggcgaagggcaacgtcctccggcctgtaaagcgttcgaccagagcgggaatgtcatttactgcagttcattgtctaaaacgcttgcgcccggatggcgcatcggctggattgcgcccggacgttaccacgcccaggtcctgcaggcgcgtatggccggagactgggcaggcgcgccgctgtttgaagccgcaacgagcgaaatcctggccagtggcgactacgatcgtcatctgcggcggctaaagcggcgcatcgcggaggggattggtgccgtcattgcgcgcgtcaaggcaagcttccctcccggcacacgcgttaacgtgccggctgccggtttcctgttgtgggttgaacttccacaccaggtgaatgcactagaggtgcaccgccgcgcgctgacactgaacattggcgttagccccgggccgctgttttccccccgcgcacacttaacgaatttcctgcgattaaattgtgccaacgaacccacgcccctcctgctgaatgcggtggatcggattggcgcgctttgtcatgaactggccagctcctctggccttattccagaaagtgagcattga

SEQ ID NO: 122514 - DNA, 768 bp, Enterobacter cloacae
atgcacagcgacaatttcgatatttctgcctatttcaggcgcataaactataccggccctgcggctgccgatactgctaccctgcatgcgcttatgcgccatcagctcttttcgataccctttgaaaatggggatgtacaggcgggtaaagttgtctcgctggtacccgaagacattgccgacaagctgttgaggcagaagcgcggcggttactgctatgaggtgaatgggctatttgcgatggcgctggaggcattgggcattcgctggcgttttgtcgcggcgcgcccgatgttctacccggtgcgtcggcctaaaacccatatggcactcattgctgagattgacggtcgtcagtggctttgtgacctcgggttcggtagctacggcatccgtgcgccgatggcgttagacatgcttgatacggatatccggcaggatttcgacacgttccggctgacccgtaacgcggagggtgagtatctgcttcaggcacgggtggagggtaaatgggccagtcagtacggctttgacctctctcctcaggagtggattgattttgtgcctgccaactacctcaactccacgcacccggacgccatttttgtgcagaagctgctcgtcgtacagcatcgcccggaaggacgccagattttgctgggtaatgtgctgaaaacgatcaccgcgcagggcgtggaaacgcagcagctggcagaagatgacattgcctctgtactgaaaaattgttttgcgctgacggttgagtga

SEQ ID NO: 122515 - DNA, 270 bp, Enterobacter cloacae
atggatacactccgttgctactgggacgtttttttcaatgcttatggctcactgctcacgaaaaccgtgctggtattactgctggtgtggtggtgtcatcaaaccctgcagcgcttcagaaaagaagcccctgacgctaccggccccattgccgaggccaatgccagagaacgctaccagtggcgctacttgcggtgggctttaagtagcatccagggtatcctttctctgtatattatctggtcgattattacgacgctttttacgtag

SEQ ID NO: 122516 - DNA, 2163 bp, Enterobacter cloacae
atgtatcgcacattaagctggcgcaatattcccaccgcgagaacattgtttgccatgatcttcatggcggggatcggcttaatcatctccattgtcgcgctgctctatttatctctgcacctgatcagcaccaaaaccaatgaaattgacgagcaccgcaccacgctttccgtgcagggtgcgatacaaacgtcggttaaccgtgtctcgaccctggtgattgataatgccgtctgggacgatgcggtacgcgaggtctaccgcccaaagctcgataccgaatggttatacaacacctggggagcgggctttaaagtcaataacctctatgacggcactttcgtgctggatgagcatttcaacgttatctggggatcgtttcaaagccagccttttgcggagacgaatctcgacttttttggcaaaggcctgcaagcgcttattcagcagcacggacgtgaattacccagccagaagaatatttatgccgggatcacccgaacgcgtcacggcgtcgcgtttgtcggaatagggctgatccgaccgatgatcgggcgattacaggttaacgacggtacacgccgctatctggtgattacccgccatttgaatagcggcatattatccgatctggggcagacctttcagattgataacctcaactttaccccggataaaatcaacagtctgagtatgccgctgcgcagttctgctggggagttactgggttacctcaactggcaggcacgccttcctggcgcgcaggcggcccgggccgcatcatctgatatcacgcagatagtggtgctggcatcggtgctgatcctgctgttcattatggtgagctgcgtgggcctgtacaaactggcccgcggagaaagccaggcgcgtctggtcgccagaacggactggctaagccatctgccgaaccgccgcgcactcattgaagcgctggaccgcgtgagtttgcgtggcgatattgacgtcaaaagcgtggtgtttatcgatctggatggcttcaaggacgtcaacgatatctacggccacagcgtcggtgacgatctcattgtgaccatcgccaaaacgctgaatgaatgcgttccaccgggcgggatgctggcgcgcatgggaggcgatgagtttgccatgaccatcggcggtgaaggggcagaagcgctggcgaccacctttgccgaatcggtactggattttctcaatacccccattcgtctgggggagcgcaccattcatatcggtgccagcatcgggattgccagcggaaccctgattgaatgcaccagttccgagctgtttcgccgcgccgatatcgccatgtaccattccaaaattagcgggaaagggcgtgtcacccactatgacgcggcgctgaataacgcccgggaacgcaagcttgcgattgaaaaccagatccgtaacggactggagcgagacgagtttgaggtctggtaccagccgattattgacgcccgcagtcagaaaatgagcagcgtggaagcgctggttcgctggccgcgtcgtccggaaggtgaactcggtccagataccttcatttccattgcggaaacgagtgggctgatttacaaactgggccagtttgttttgcagcgtgcctgccaggatctggagccgtacagcgaattaaagctctccgttaatatctccccggcgcagtttcgcgaccctgaattcgaagaaaaagtggcctgggttctggaaagcacccgtttcccggccaggcgactccagctcgaagtcacggagacctatgtgctggaaaaccccgagcgtgcccgcacggcgattgccaaccttaaagcactgggcaccgcggtggcgctggatgattttggcacgggctattcgagtattggctatttgcggcgttttaatttcgacaccattaagatcgataaatcactggccgggctggtggacaacgatgagcaggcggcggcgctggtgagcggcacggtgaggatcgccaatgccctgggcatggcggtggtcgctgaaggggtggaaaacgaaaagcagatgaaattgttacggctggctggctgcgatcagctgcagggattctggttcagccagccgatgccgattgaatcaatcagggcgttacgtcaggtcagacagtgctga

SEQ ID NO: 122517 - DNA, 321 bp, Enterobacter cloacae
atgctttttagcggcctgggctttctgttctacagcaggtttggtcgcttttttgtggtgctttttagcggcctgcgctttctgctctacagccggtttagcggcatcttgtttaacggcttttttgtggtgttttttagcagcctgggctttttgctctgcagcaggtttagcggctttatggtgtttcttgtggtgtacggtttttgccggagcagcagtcgttgttgcagctggagcagcagcagccggtgcagcagtggtttcagcagcaaacgcagcagaagacagacccatagcagcggcaacaaccagagctaa

SEQ ID NO: 122518 - DNA, 1488 bp, Enterobacter cloacae
ttggaaaaatcacccgcctatcagtcacttgtgacgacattccagcgcctctcccgtttctcccacctctccgccatcgccagctgggatatgttcgccatgatgccgccgggcggcagtgccgcgcgcggtgaagcgctggccgaaatgagcgttctgcaacaccagatcctgaccgataaaaaggtgggtcaatggctgaccgccgcggcaggtgaggatctgaatgatattgaacaagccaacctgcgtgaaatgacgcgtcattaccagcaggcgtcgctgttgccggaagcgctggtggaagccaaatcgctggcaggcagcaaatgtgagcacgcctggcgtactcagcgcccggccaatgactggcaggggtttgccgccaacctgaaagaggtcgtcaaactgagccgcgaggaggctcgtctgcgtgctgaagccaaaggctgcagcccttacgacgcgctgctggatattttcgagccggacatgaccagcgcgcgcctggacgtactgttcgcggatatgaagtcctggctgccggacctgctggcaaacgttgtggaaaaacaggctcagcagtcgttcgttccgccgcagggccccttcccgacggcaacgcagcgtgaacttgggcttgaagccatgaagatgctcggctttgattttaacggcggtcgcctggacgtcagtgcacacccgttctgcggtggcgtgccggaagatgtgcgcatcaccacgcgttatgatgaggacgagctgctcagcgcgctgtttggcgtgatccacgaaaccggacacgcgcgctacgagcaaaacctgccgcgaacgtgggccggtcaacctgtcgcgctggcccgttcaacggcgatccacgaatcccagagcctgttctttgagatgcagctggggcgcagcgacgctttccttaaacatctcctccctgcggttcacgcccgttttggcagtcaggcggcgttcagtgaagagaactttattgcctggaaccagcgcgtgaaaccgggctatatccgcgtcgatgccgacgaagtcagctacccggcacatgtggtgctgcgctatgaaattgaacgtgcgctgatcaatggcgatatcgaggtggatgacattccggcgctgtgggatgagaaaatgcaggcctggctcgggttatcaaccaaagataactaccgcaacggctgtatgcaggacattcactggaccgacggcggttttggctacttcccatcctacacgctcggcgcgatgtacgccgcgcaattgttccatgcggccaaaacggcgctgccgggtctgcagtcctccatcgctgagggcgatttctccgccctgtttgactggctgcgtcagaacatctggcagcacggtagccgcttcaccacttcgcaactgattacccaggcgacgggtgaagacctgaatatccgttacttccgcgagcatttgacgtcccgttatctgtaa

SEQ ID NO: 122519 - DNA, 990 bp, Enterobacter cloacae
atgaaactgaccagattcccctacatttcccatacaaataaagatgggtttgtctggaagaaacgaattgatgggaacacgatttacatcagcctcaagacaagagacttgaaaactgctcaggcaagaggtgtaagcctcactggtaaatgggtaatgtgcaaaccattgaacctgtcattcatggctatgaaacagactctgagaaagcacagagatgaaatggttgatagggctttgttggaaaccttagaagtcggaattccgacaattagccaaactcaaaatgttgagtctgaaaccgttgctcagattcgagaaacgcactccctaactgatgctttggaagagtggtgtaaggagatgaagcctgactggaaacctcgtactgagaagctgaacagacgttctattgacctatttattgaatgggctaagaagctgcacatccacaccatagaggacgtgaacaaagaagccatatcatcattcaagaaatatttggacgagcgctacgaggctcctagaagccgtcaggacgcattaatcaaagtacatgctctgttcagtttctgtgttgataagcgtgattggttacagtcgaatccagtgaaaggaatgctgtattccaaggttgtaacggttaacgagaagactgaaatttcaccagaaacatacagcagagttatggaaggttattacgtgaataactatcaaggcaagctgaaagaactgctcatgattctctggaacactggaatgagaataggggaggctattcagttacgaccagaagacttccgtaatgttgatggtgtgaaggtgattagcattaatgacgaagacgggaagagtgttaagaatgcaagctctatcagaaacatccctgttaaccatgctttaaacgagttgtatgacgttctgagcgttcttccaaaaggtaagccagtattggatggaataagaataacgctgctgcaagccgtgtag

SEQ ID NO: 122520 - DNA, 237 bp, Enterobacter cloacae
gtgggcgaaatagcagaaatgattgtaagagcagttgcagtagtgggaagtcgttacatcaactggagtgaagtgcttgattggttggctgttatcctctacgtcctgttctggatagctgttggagtaggggcaataattgttgtatacaaacttatctcttatccgctgaagcagatgaaaagacgtaatgacctgttagagcagatgcttaccgaaatgcgagagaaaaaatga

SEQ ID NO: 122521 - DNA, 363 bp, Enterobacter cloacae
atgaacaaggttgtgagtgtagggattgcagtgttgctgacgggatgccagacacatcatcatgacgtaatcccgttcaacaccgaagaggactccgcgcacgcatgggcgtttgcgtatgtggaaacagtgaaacaaaggatgacaaccacagagcagtatgaagggaagctctgctcgttaaagattcaccagcccaaaggcgcggcctatgtgaccaacattcaggtggtaaaaggcagcgatcctgaactgtgtaaggccgccattacggccttacagtctgccagtgacgatcatgtgctcccagtggtacctgatgagcgtatcggggaaaactacacgctcgatttcaaaccctga

SEQ ID NO: 122522 - DNA, 273 bp, Enterobacter cloacae
atgctgtttgcacaactctttgggctgtggtttccggggtctgaaacggtgattttgctggggctggcaggcatggcgacgttactcgccgcgacgacccatgcgcccattatgtctgtgttgatggtctgtgaaatgaccgggcagtatttcttgctgcccggtttgctgattgcctgcgtgatcgcgtccgtcttgtcgcggacgttacgccacgactcgatctacggacaacatccgaccgagggaagagagatcgatgtactgcgctaa

SEQ ID NO: 122523 - DNA, 171 bp, Enterobacter cloacae
atgaaccgtgtcggcctgagcaaacgcgctgtaggggagcgtgccgccgggcaggtcagcgccatacgtctggcccgcccggcggagtgttttcgcttaactctcgctgtgaatattcagcgcccggcgcgtacggccggagctgagatactcggcaatataatcctgtga

SEQ ID NO: 122524 - DNA, 711 bp, Enterobacter cloacae
atgcacccattactcaaacgttcgctgctttttgtcggcgccattattgtggtcgttgccctcctcacctggggaattgggctggatacaattaaggcgcgtcaggttgacctgatttacctcgggcaacagcatttaatcctggtattctcatccatgttctttgccctgctgataggtattcccagcggcattttgttgagccgcccgtcagcacgcggtatcgctgaatacgtgatgcagatctttaacgtcggtaataccctgccgccgctggccgttctggcgctggcaatggtggtgattggtatcggtgatacgcctgcgattatcgccctgttcctcgcctcgctgctgccgatagtgcgaaacacctatgccggactgtgctcagttccagcgtcgttactggaagcggctaatggcattgggatgacgaaatggcagcgtctgcgccaggtcgaacttcccaacgcctggccggtaatgctctccgggatccgcattgccaccgccatcaacgtgggtaccgccccgctggccttcctgattggtgccagcagctacggcgaactgatttttcccggtatctacctcaacgacttcccgacactgatcctcggcgcggcggccaccgccctgtttgctctgatcctcgacaccctgctggctgcgctgggtcgcgtgatgagtccacatctcgctcgataa

SEQ ID NO: 122525 - DNA, 798 bp, Enterobacter cloacae
ttgcaccgctttgctagcctgaatagtcaggcaaagctcaacccggaggtattcttgctgattaaactcaaaaaagaacgaacgcatcaggaggatcgcctgctcgcactctggctggcgacctctgcaggcttgctcaacgccatcgccctcggggcatttggcttttttccctcccatatgaccggcaatacctcccaattatccagcgaagtttcctctaccgatctgaatgatattttgttctttggcgccattattctgtcttttgttgccggcgcaatcatggcccgtatcatcgtgttatgggggattatccataatatcaggctggttttttgccagatactgttggtcgagggattattactgaccggcgtttcctgttacgagatgtatttccatgccctcacgactaaccgtgaaattattatctttctttgtggtctgatggggattcataattcaacatcgacccagctttccggcggccgggtaagatcaacccatattaccggcacgctgacggacgcgggaatatctctggcctcggtcctggtggcgatgctccgccgggattattccaaagatacggcagcgcaaaaaagtcagctcaaaacccacttaaccaccattttctcgtttattaccggcggtatcgccgggctgatcctgttcaggtggattgggtttaacgccatgctggcgcttggggtgatgctcgtcgttgtcgccgccttttccatcatcagcacctcagtgcgcgttcgccgggtgcgcgccgccttcagccgataa

SEQ ID NO: 122526 - DNA, 624 bp, Enterobacter cloacae
atgttaagcatcctgggcaagacaacctcgatcaacgtacgtaaagtgctctggacctgcgaagaagcgggtatcgagtatcaccaggaagactacggcagcggctttgcctccacgcaaaccgctgccttccgcgctctgaatcccaacgccatggttcccgtgctgctcgatgacgagttcgtcctctgggaatctaacgcaatctgccgttatctggcccgtaaagccggccgtgaggatctcctgccaacggaaccgcaggcctgcgccaacgtcgaacgctggatggactggcaggcaagcgaatttaacaatgcctggcggtatgtctttccggcactgggacgcaataacccggactataacgacccggagcgtattgccgccggaattaaagcgtggaaccactgcattgctattctggaggagcagttgcaacgcactgcagcctatacggcgggcgaggtgtttacccttgcagacgtggtacttggtctttcggtgaaccgctggaaaatgacgccatttgataagcctgatgtgccggcaattaacgcctggttcgaacggcttaatcagcgaccggcatttttacgtcacgggaataacggtatggtgtaa

SEQ ID NO: 122527 - DNA, 291 bp, Enterobacter cloacae
atgcccgcatttatccatatcaatttacgtgttatcgaccctgcacggcaggccaatcttgcccctcgcttcagactggcacttgaagaggccggcggcaaaattctgcattttggtcctgttgtcgaactccttgaaggcgatgaagaaccgctaccctttgctggcatttttgagttcccttcactgcagcaggcgctggcgttttaccattcggaaaaatatgccccgatcaaagctgaacgccagctggcacagcaggcaaaaatgttcgttgtcaccactgactaa

SEQ ID NO: 122528 - DNA, 453 bp, Enterobacter cloacae
atgaacactgttgatctggcgttactaaaaaccatccccgagacctgtccggcgtatcaggcacgtgcaaccgcacgggctattacgcgttattacaacgcctgcttcagaccttatgaattgacggcagaacagttcagcctgctggtggggatcggcggtggcgtaaatgaaacggtggcagggcttgcatcaaaggccggggtggatgcaaccacactgagccgaaacatacggattatggagtcccgtggggttattgaatcaacgggggggcgcgggcgccgtggaaaacaacttagcctgacctcgcaggggtgggcgcttctgacatccgtgatccccgtatggcagtccgcgagagaggaattgtcacgtaaaatgggaagcgagcagctcagcctgacgacgacgatgatgaaagacctggcaaaaaccagcacatcattttga

SEQ ID NO: 122529 - DNA, 1059 bp, Enterobacter cloacae
atgaagaaaacgccattattccgcaccctggtactctccctggcgatgctggtcagtctccccacctttgctgcggtgaagaaagagttcaacgtctgctggaccatctacgccggctggatgccctggggcacccttagcagtagcaaaatcatcgataaatgggccgataaatacggcatcaaaatcaacgttgttcagctcaacgactatatcgaatccatcaaccagtacactgcgggccagtttgacggctgcaccatgaccaatatggatgcgctgaccataccggccgctggcggtgttgataccacggcgctgatcctcggcagctattcagaaggcaacgacggcgtggtgatgaagggcgagggcaaaacgctcaacgacctgaaagggatgaaagtctacctgcctgagctctctgtttcccactatctgctggtgcgcggcctggaaaaagccggcctggccgaaaaagacgtcaccgtggtaaacacgtctgacgcggacatcgtctccgcctttggcacggcaaatgtgcaggcagcggtagcctggaacccacagctgtcagtcatcaaaggcacgccaaaaacgactgaagtgttcagctcctctcaggtaccgggtgagcttatcgacatgatggtggtcaacagcgaaaccctgaaagacaacccggcgcttggcaaagcattgaccggcgcatggtacgagatgatggggctgatgaaagcgcaggatgccaccgtgctcaacgcaatggccgccgcctccggtaccgatctggccggttatcaggcgcagctgaaaacaacccacctgttctataccccgcaggacaatattgcctttttaacctcgccggagctggcgaaaaccatgcagcgcgtggccacgttttcgttcgataaagggctgctgggcgatggggcgcaaagcgcggatttcatcggcatgcgcttcccgggcaatgtcacccagggcgatgccagcaacgtgaagctgcgctttgacgacagcttcgtgaaaatggccgctgccggcacgctgtga

SEQ ID NO: 122530 - DNA, 816 bp, Enterobacter cloacae
atgcgacaaattaatcgccatcccacgcccggcatgcggctgatgctcgtgatgctgcctttcgtcctgctgttggccgcatactttttcggttccgcggtcaggctggaggctaacccgcaggacaagctgctgcctggcctgcagcagatgctggacgcgctatcacgcatggcgtttaccccggataaacgcagcggtgactatctgttctgggtggacacgctggtgagccttgcccgtctgctgacggggctggtcatcgcctcgatcatcggcctctgtgttggtgtcaccgccggtgttttcccgctgtggcgcgcgtcgctctcgccgctgatgacggtgctgtcgatgatcccgccgctggcgatcctgccagtgctatttatcgttttcgggctggatgaactgtcgaaagtgatgctgattgtcatcggcatcactccgatgctggcgcgcgatctggagcatcgcgcgtgcgaaatcccaccggagattctgatcaaagcccagacgctgggtgccaacagctggacgctggtgttgcgcgtggtacttccgcagctgttatcgcggctgctgacctcgctgcgtctgctactggggtcggcatggttgtttctcatttcggcagaggccatctcctcaaccgccgggctgggctatcgcattttcctcgtgcgccgctatatggcgatggatgtgatcattccgtacgtcctgtggatcacgctgctggcctggctgatggacctggccctgcgccagttacataaaacctggtttccctgggcggaaggagggaaggcatga

SEQ ID NO: 122531 - DNA, 777 bp, Enterobacter cloacae
atgagctttatcaccatcaacaatatctggcaggagtacggcgaccacgtggtgctggagcgcctcaatctgcaggtgaaagagggcgagttctgctcaatggtgggggcctctggctgcggaaaatccacgtttttgcgcctgctgctcggtcaggaagcgcccagccgagggtccattacgctggatggtaaaccgctgcgcgccgagccggacagcagccggggcgtggtgtttcagcgctactccgttttcccgcatctcagcgtgctggataacgtcaccataggtctggaactgccgcaagcgccgctgttcgggcgcctgtttggggcaaagaaacgcgcggcgcgtgagcgggccaccgggatgctggaaaaagtcggtctcgggcatgcgatgcacaaatacccggcccagctttccggcggtatgcagcaacgtttagccattgcgcaggccttcatcatgcaaccgcgcgtgttgctgctggatgagccgtttggcgccctggacccgggtatccgtaaagatatgcacgccttgttgcttcaactgtggggggagacccgcatgactgtctttatggtcacccacgatctttcggaaggctttaacctcggcacccgcttactggtgttcgacaaagtgcgcctcgacccgcaggcgcccaacgcctttggcgcccgtattacctacgacattccgctcaacgagacgcggctctccgcgctgagtggaacggctcccgataacgtttatgcattaaggggttaa

SEQ ID NO: 122532 - DNA, 717 bp, Enterobacter cloacae
gtgaataccatgaccatgttacgtgaagagatcctgcccggcggcggtcacctctcatttgtgcttaagcgcgggcagatcctgcgtatgaccgacattgaaggtggagcaaacgtcagcctgctgatgctgaatccgcacgagaaaagtgaacgtctgaacctgcccgacaccctgaaaggccagcacaccgcgcgtctgaccgccggacattgcttttactccgacatgggacgcgtgctggcaggcatcaccgcagatacctgcggctggcatgacccgtttggcggcgtactgaacgccgccgaggtgactgaaaagtatggccagggacgctatcaggaactgcgcaacgggttttaccgaaacggaacggacaacctgctggtggagatggggaagtgggatctcaatctcgaagatctgctgatggtggtcaacttcttcagcaaagtcaccgtcgatgaccgcggtcagttcaccttccacggcggctattcgcagtcgggcagttacgtggagctgtacgcccccatggacacgcttgtggtgatgaccgcgctgcagcatccgatggatccgtcccgggaatatgcaccacgaccggtcgcgctgagctggcgacaggctgaggatgaagagggggccgttaacgcgcttctgacgcgcccggaaaacgaacgcgccatgaccaatacccggcttttcgccctgtaa

SEQ ID NO: 122533 - DNA, 633 bp, Enterobacter cloacae
atgaccatgatctctgaaaagcatgtgcaagacgcggtatttcgccacgtgatcccggcaggtgaaccgtacctgttcgaggtgaaacaagggcagacgttgcgcctgctcgacctggaaggtaaccaggcggtcgacacgctgttctacaatgcggataacccgcgtgaacgttacgatgcgcagcgcacattgcgccgtcagaacaacgcctatctcacgcggggcagcgtcctgtactccagcctcggtaaccccctgctgaccattatcgacgatacctgcgggcgtcacgataccctcggcggggcctgcgcccaggagagcaacaccgtgcgatacgccctcgataaacgccatatgcacagctgccgcgataacttcctctgcgcctgtctgcacgatggacgtctgcaaaaacgtgacatcacggccaacatcaatttctttatgaacgtgccggtgacgccagagggcgggctgacgtttgaagatggcatctccgcgccggggaaatacgtcgacctgcgcgccgagtgcaacgtcattgtactgatttccaactgtccacagctgaataacccctgcaacggctggaacccaacgcccgctgaggtgctggtatggaactga

SEQ ID NO: 122534 - DNA, 3603 bp, Enterobacter cloacae
atgttgacgacactcctgattgcgaaccgcggggcgatagcctgccgcattttacgcaccctgcgcaccatgaaaatccgtggtgtggcagtctattccgaggcggatatgagcagcctgcatattcgcgaggccgatgaagcgctgagtctgggcgatggcccggcggcgaatacctatctggatagctcgaagatcatcaccgccgcgaaagccagcggcgcacaggccattcatccgggctacggttttctctcggaaaacgccgcgttcgccgaagcgtgtgacgccgcggggattgcctttgtgggccccacgccggaacagctgcgtctgtttgggctaaaacataccgctcgcgcgctggcgaaaacgcacggtgttccgatgctggagggcaccgacctgctggccgatgttaaccaggccgtcaacgctgccgccggggtgggatatccggtgatgctgaaaagcacagcgggaggcggcggcatcggtatgcgcgtctgctatgacgcagaagagctgcgtgacgcgttcgatgcggtagtgcgtctggggaaaaataacttcagcgacgcgggtgtctttatcgaaaagtacattgagcgggcgcgtcatctggaagtacagctgtttggcgacggcaagggcgaggtaattgccctcggcgtgcgcgactgctctgtgcagcggcgtaaccagaaagtgctggaggagacgcccgcgccaaacctgccggcgggcatggcgcaggcactgtgcgaggcggcgataacgctgggtaaagcggtcaactaccgcagcgcgggcaccgttgaattcgtctatgacagcgacgccgcccgcttttacttccttgaggtgaatacccgtttgcaggtggagcacggcgtgaccgaacaggtgtggggcgtggatctggtgcgctggatgatcgaacttgccgccggaacgttgccgccactggcgacactgcgtgacaccctgaaaccgaaggggcatgccattcaggccaggatctatgccgagaacccgggccgccagttccagccttcaccgggactgctcaccgacgtggctttcccgcccgatgaccgcgttacgctacgcatcgacagttgggttgaggccggatgcgaagtcccgccgttttttgaccccatgttagccaaaatgatcgcctggcagccgacacgcgaagccgccatcggcgtgctgcattccgcgctgggggagacccgtctttatggcgttgaaaccaaccgcagttatctgcagcagatcctgaccttcgcgccgtttgccgcaggtgagccctggacccgctgtcttgagcacctgatgtaccaggcgtccacgctggaggtgctcagcgccggtacgcagaccacggtacaggattacccgggacgcacaggctactgggcggttggcgttccgccatccgggccaatggacagcctggcgctgcgtctgggtaaccgcctgctgggcaataaagacgatgccgccgcgcttgagatcaccctcagcggcccgacgctgaaattcaactgcgatgcgcagctggtggtgacgggcgctgaaattgcgctcacgctggacggtgaaccgctggccaataatcacgtttttcgcgtacgtgcgggcatgacgctgcgtatgggagagatccgcggtgcgggcgtgcgcagctatctttgcctgcgcggcgggtttaacgtgccggaatatctgggcagtaaaagcaccttcacgctggggcagttcggggggcacgccggacgggcgctccgcacaggtgacattttgcacctggcgccgttaatcgagccggttgcggacgcgccgctgccgcaggcgctgcacacgaggctggacgcggtgcgcgaactgcgggtgatttacggcccgcacggtgcgccggagtatttcacgccggattacatcgcgacgtttttcgccaccgaatgggaagtgcatttcaactccagccggacgggggtacgcctgattggcccgaaaccggaatgggttcgcgacagcggcggcgaggcgggcctgcatccgtcgaacattcatgacaatccgtatgccatcggcgcggtggattttaccggcgatatgccggtgatcctcggcccggatggcccaagcctgggcgggtttgtctgtccggttaccatcatcgaggccgatctgcacgcggtaggacaactgaaggcgggagattacgttcgctttgtgccggtggatattgccaccgcgcgacggctggcgcaggcgcaggagcgccaaatcgccagcctgaccccgcaacctgtcacgtggcaacctgccggtctggactcaccgattgtgctgacgcaggggacggacgataaacgtctggtggcgagagtgtcgggtgatacccatctgctgctggagattggcgagcctgagctggatctggtgctgcgttttcgcggccacgcgctgatgcaggcgctggagggccgggcgctgaaaggcgttatcgatctcacgccggggatccgctccctgcaaattcattatcagccggaaacgctgcgcctggatagcctgctggaggtgatcgccgggctgtggcagggcgtttgtgaccaggactcgctggacgtgccgtcgcgcatcgtctggctgccgctctcctgggacgatccggcgtgtcagaaagccatcgacaaatacatgaccaccgtgcgccgcgatgcgccgtggtgcccgagcaacctggagtttatccgtcgcataaacgatctggctaacattgatgaagtgtataaaacggtgttcgacgcccgttatctggtgatggggctgggggatgtctacctcggcgcgccggtagccacgccgctcgacccgcggcaccgtctggttaccaccaaatacaatccggcgcgcacctggacggcggagaactcggtgggtattggcggggcatacctctgcatctacggtatggaagggccgggcgggtatcagtttgtggggcgaaccctgcagatgtggaatcgctatcgcacggtagaggatttcggcggcaagccctggctgctgcgtttcttcgatcaaattcgcttttatccggtctcagccggggaattgcaaaccatccgccgggatttcccgctggggcgttatccgctgcgtattgaacacaccacgctgaaactggcggagtatcagcagtttctggcggacgaagcacctgagattgaggcattccgtgcgcatcagcaggcggcgtttaacgccgagcgtgagcgctggatagcgggcgggcaggcgcattttgacagcagcgacgaaacgacggatgacggtgacgacgtgccgttacggtcgggagaatccggtgttgaaagcccggttgccggcaacctgtggcaggtgaacgttgaggtcggcaacaccgtgcgcgaaggtgatgtgctggtggtgctggagtcgatgaaaatggaaatcccgttagttgccactcaggacggtgtggtcagtcaggtccgtgtccagccggggtcgtcggtgcgggcgggccagtgcgtggtcgttctggagaaaacagcatga

SEQ ID NO: 122535 - DNA, 1800 bp, Enterobacter cloacae
atgaagcctctttatgatttacgtctctctgtgctggcagaggcataccgtgaaggccagatcgccccgcgtgaggtgataacggcattacgcgagcgcgcgctggcgctgaacccgtcatttaacgcttttatttatctgctcacccctgaagagctggagccgtaccttgccgcgctggagggcgtagcgccggacacgctgccgctgttcggcgtgccctttgccatcaaagacaatatcgatctggcaggtatcgacaccaccgccgcctgtccggcatttgcgtatcgggcagagcaggatgcaacgatagtttcgcagctgattgcgctgggggcgattcctctggggaaaactaacctcgatcagttcgctaccggcttaaacggtacgcgttcgccgtatggcccatgtcgtaacagcgttcatccggattacccgtccggtggctccagcgcggggtcgtcgctggcggtagccctgggtctggcgagcttcgcgctgggaacggacacggccggcagcgggcgcgtaccggcctcgctgaataatctggtcggcctcaaggcaaccaaaggactcatctccacggcaggggttgtgcctgcctgccgcacgctggactgcgtcacgtttttcaccgcgacagcagcagaggccagccagctgctggcactcacggcgcgacaggatccgcgtgacgaatacagccggtcaaacccggcgtggaacggtccgcaggcttttggtgtccctgctgcgggctttcgctttggcgtgccggagacgctggagtttctcggctgtgcagaaagcgaggcgctgtatcaccgcgcgaagacggggcttatcgcgctgggtggcgtgcccgtgactctcgactttgcaccgtttctggcggccgcgaaactgctctatgacggcccgtgggttgccgagcgttatcacctcgcgggtgcgctgattgaacgccagcccgacgcggtgttgccggttatccgtgatgtcctgcaaaacgcgcctgcagccactgcggtggcggcgtttgacgcgcaatacaaactccagcggtataaagccgagtgcgatgccatgatggccgacctggagtgcgtattaattccgacgtatccccgcccggtgagtctggctgagctggccgatgagccggttaaaagcaactcggcgctgggcatctataccaactttatgaacctgctcgactatgccgccgtagcggtcccggtcggtgaaatgaacaatgggctgccatccggcgtcacgctgtttggccgcgcgtttaccgatcagtatctgctcagtctggctgatgcgttacaacgtcacacaaaattaacgttaccgggcaatcgtgccatgctggacgacgcgccgacctgcaccgcaacccatgaccgcctgcggatagtggtctgcggtgcgcatatggacggtctggcgctcaatgttcagttacgagagcgcggagcacgccttgtcgacgcgaccaccagcgcaccttattaccgtctgtatgcgctggcggacggtaaacgtcccggaatggttcgggtggcagaccagggggccgggattgcggtcgaagtctgggagctaccgcacagcgaagtggggtcgtttctcgccgggatccccgcacctctggggctgggaaaaatcgagctgcaggacggacggtggttgaccgggtttatctgcgaggcgtatggcctggagggggcacgggatatcaccgaatttggtggctggagagcctggcttgcccggaagcggtga

SEQ ID NO: 122536 - DNA, 615 bp, Enterobacter cloacae
atgaaagaagtgtcacagcgtgattcgttcgcgttcagcgcccgggtactgggcgcgctgttttattttgctccagatagcgagcagactgcgccgctggtgcaggcgctcaccgcaggcgactggattcaggactggccgctggcgccggaaacgctgcagcccgttgcagatgcgttcaaaacgccagcagatgaagcattgaaagatgcctggcaacgtctgtttattggcccttacgccctgccgtcaccgccgtggggttccgtctggctggatcgggaatccgtgctcttcggcgactccaccctcgcgctgcgccagtggatgcgtgaaaacaacattgccttcgagatgaagcagaacgaaccggaagatcacatcggtaccctgctgttactggccgcgtggctggcagaaaatggccgcgacgctgaacgcgaccagcttctggcgtggcacctgctgccgtggagtacccgcttcctgtccgtgtttgttgaaaacgccgggcatccgttctacaccgcactgggcaaactcgcacagctgacgctcgcggactggcaggacacgttaattattccggtcgcggaaaaaacgctgtaccgctaa

SEQ ID NO: 122537 - DNA, 855 bp, Enterobacter cloacae
atgggaagtggatggcatgaatggccgctggtgatcttcaccgtcttcggacagtgcgtcgccggggcattgatcgttatggggctcgtctggcttactgaaaaagacgacgcggtgaaaacacgccttgtccgcagtatgttctttctgtggctggtgatgggcatcggatttttggcgtccgtgctgcaccttggctccccgctccgggcctttaactcactcaaccgcgtgggtgcttcggcgctcagtaacgaaattgccgcgggatccattttctttgccgttggcggtttctggtggctggtatccgttatcggtaaaatgcccccggcactgggtaaaatctggctggtcgttagccagatcctgggcgttgtctttgtctgggcgatgacccgggtttatcaaattgataccgtaccgacctggtacacgggttacaccacgctggcctttttcctgacgctggtattgggagggccgctgtttgcagccctgttgctgcgcgtggcaaacacgacatataaaagcacattcgcggcctctgtcagcgtgctggcactcctggcctgcgtggcggtcatcgtgctgcagagcaatgacctggcgacaatccacagttccgttcaacaggcgagtgccctgctgcctgactatggcgcactgcaaatctggcgtatcgtactgcttgccgccggactcggctgctggttgtgcccgctgatgcgtcggcaggagcctaaagccctcgctctttttgcaggcgtgatactggtcgtcgtgggtgaactgattggccgtggtcttttctatggtctgcacatgaccgcaggtatggcgattgcgggttaa

SEQ ID NO: 122538 - DNA, 906 bp, Enterobacter cloacae
atgaaagcaacgtcggaagagctgacaatttttgtcgccgtcgtcgaaagcggcagttttagccgtgcggccgagcagctggggcaggctaattcagccatcagccgctcggtgaaaaaactggagatgaagctcggcgtcagtcttctcaaccgaacgacgcgtcagctgagcctgacggaggaaggcgagcgttacttccgccgtgtgcagtccgtcctgcaggagatggcggcggcagaaacagagattatggaaacccgtagtacgccacgcggattgctgcgcattgatgcggcaacaccggttgttcttcattttctgatgccgctgatcaagcctttccgcgaacgctatccggagatgacgctctcgttagtttcctcagagacgtttatcaatctcatcgagcggaaagtggatgtggcgatccgggccggcaccctgaccgactcgagcttgcgggcccgccctctttttgccagctaccgcaagatagtcgcgtcaccgcaatacatcgcagagcatggcaaaccagagacggttgaagaactgaagcagcacctgtgcctgggcttcacggagcccgtatcgctgaacacctggcctgtggcctgtcatgatggtcaactgcatgaaatcaccagtgggttatcgtccaacagtggagaaacgctgaagcagctttgcctcgaagggaatgggctcgcctgtttgtcggactatatgattgataaagaaattgcacgcggtgagcttgtagagctgatggcagataaacgtctgcctgtggagatgccttttagtgcagtttattacagtgacagagcggtaagtacgcgcatacgcgcctttatcgatttcctgagcgaacatataaaaacagctcccgggggagctgtgtga

SEQ ID NO: 122539 - DNA, 759 bp, Enterobacter cloacae
atgaatcttatcagtattcccgcctttcaggacaattacatctgggttttagtcgatgacgagcgtcggtgcgtcattgtcgatcctggagaatcggctcctgtatcagacgcgataaaagagaacggctggcaaccagaggccatccttctgacccatcatcataacgatcacaccggcggcgttgctgaccttcgtgcccaattcccgcatctggtggtttacggaccggcagagacacaagataagggaacaacgcaggtagtcgaagaaggtgaaaatatcctcatacgcgagtgggagttttctgtatttgctacaccaggtcacactttgggacatctttgtttctacagcaaaccttatcttttttgcggcgacacgctgttctccggcggctgtggaagactttttgagggcaccccagcccagatgtaccagtcattacagaagattagcgcattacctgacgatacccttatttgttgcgcacatgagtatacattaggaaatatgaagtttgcggcgagcatcttgccagaggatcgggcgattcaagattattatcacaaagtgaaggagttacgtgcaaaaaaccaaaaaacactccccgtaattctgaaaaatgagcgtaaaactaatttatttttacgaacagatgatattgatttaattgatgaaattaacaaagaaacaaatttgtcacaaccagaacaacgatttgcatggttaaggtcaaagaaagataacttcagataa

SEQ ID NO: 122540 - DNA, 552 bp, Enterobacter cloacae
atgaattggaaagtattatacgacttgtataatggtttgttagggaagtgtcttatatttattgcgttaagcacaccggtttctatcttagtgagaaatacgggggtatatccaaagtcatttataataagtctaattggcgcaatcgttattctttttggatatgtgatttgccaggttttcactcctgcaataataagaaagtttgctgactcacatgcatatagcgaatatcttatagaaatagagaaaaacgtcacgttgagcatagagttttcggtgttggatgatgtcaaaaataaactcccaacttgtcatgataatatttctcttgaaaaatttaaatttgtctctgttgaggatacaaaagatagatgtgattctgagaaatcaataaggattttgtcttttataaagtatgcatatttcttacaagtgaataatgggcttagattatttctaacaataattttggctattggttcagttataattttttttccaaccttatataatatttatacaatcctcgaggctgccagtaatgtttaa

SEQ ID NO: 122541 - DNA, 1428 bp, Enterobacter cloacae
atgtttaatacaagatcaccttcagtaagagattggttcaaagttttgaactggtcaaaactacctaactttgggaattgccactctaccaatgactatgatcattttcagcagaattattattgcaatgaagatatagatactctatatatcaatctaataactacattgtcatctggactgagctctcaaaatatcaggattgctggcgaacctggggcggggaaaacttcatttttatatgctttcaaatacatgtgtgaaaatgccgacgctggaagcgaacttgataattatgtcatgtacataattcacatcaacagaacctatgatgtaaataaccaattttttatcgatgaagcaaatcaacatataatagatgcatggaaatacttttataaaaaatgttcacgtgatgatgtctttgcatcgatgcaggaaagttcagataaccccaagaatttacttaataaactttctgattattataagaaaaataaaaaagcatttaataaaatgttaatacttgcaatagatgacgttgatcttctgtctggagagcaagtcaatcacgctgttgagcacctattacgtagtatagagattaactcagtaaaaaaatggctgagtatccgcagagtcactctagaaaattataacggcacaacaaaaaagaaaattgaagaatttttccctgacccttatgagtttccaagtattcctatttatgatttaatagattatagaataaaacaaacatgtggaaatcctgcaggatttaaaaatccattcaataaaatattatgtaatgaagtaatatcttctatatgcgaaaaaaatctaagagagtcactagggctttgcaaaacaatattggaagataatttgcctggtaagtttaatagttcaaccgacgaattggtaatatctaactatatacagacatcagcaataaaatcgctttgctcatcacaaaagcttattgatttgcattcagatgcgtataggttgacaatatttcctcttgctgtagatattcttgcatgcgctcaattccatacagatgaaaatattatttttggagccgttaatgattgctgtacgaaacgggcttttttagcagacatttcggaagaagggcatatatacaaaatacgatcgtcagaattcaatgatgtaatcaaaacgcttatttcccatggttgcatagcacaaaaaaacacaaaagaaaggatatttttaactgaaaaaggaaaggtgacaataactttcgcccttagggaatattattacgagtactgcaggagagttaataacgtattattatcagctaatcattattgggctatgagttcaaaaaaaattgaccataaaagcatagttgacgtgtttgtaacttggcgagatagaaatcgctcatcaaactaa

SEQ ID NO: 122542 - DNA, 3630 bp, Enterobacter cloacae
atgaagacacggcagtatgcgcaaaaatctatcttcgatctggaagcaatcttcgaacagtcccgcaacaatgtaagtgaacttgaacagctgttgagcgagctgacctttcgcaacactgccagggcgcggacgctgacgtctaaaatcgagcaatctctaactgcacttagcgaccgcagcgaggtcgccatgtcggcttccaacccatcaacatgtaatcccgattcggcgtccatacaattttctcaatctgtaccccacagtgcacctgcagctgtagagcaactgcaaccgaaggctatcccagacactgccatgcgacagcaattcgacaaaggccaaattgatctaggtccactcccgtctttctctccgtcagataaggcgaatgatgcgcgagcaatactggcagcatggacagccctcgaagcactgtcgcctcaaggttataaacgcccagaggatatggcaaccggcgaccgctccagggttgctctattggagcgaggtgttccatggggaccaaatgcccgcagcaagcccagttataagctttatttcgaggtcgtcctcggctccatcgctctcgacaaggcgacggacgagctggtcaaagtttttggcgaggatgaggagcgttcacgcccggacggtaagaaagcggccatcggctcgatcctgatcgacaaagaaggctatgtgcttgaggaaaaaggcgttgccgtttccagttttgcttgggcactcaagccggctctcgatctgaagcttggaagcttagggaattggccgaatattgagccgcgcattatcgagcatctggatcgaatagttcgccgccacaacgaggatggagaacccataccgatcgatctgaatgttgttcataacgcttataaatggcttgtatcgcagttcagtgtacctgagcatttggttgagccacccacattcgcaattaaggtatttcatcatttcaaggccaaggcgctgcctgaaccttcgttactgaattccttctatcttgaagatctcggtgaagcaaccaaattgatcgagacgggcaaagccggagcaggtttgcgccgctacatgggaattggcagacctgaccagaaaatcgacgttctatcgcccatttccgcaattgagccgttcatcgcaccgtcgctcatgccgcaggctcgttggccttcgaaaggcggccatccattggtgctacttcaacaggctgccgtgaatgcagcacgtgctgagctgaataatgctccaggtatcatcggcgtcaatgggccaccgggtaccggaaagaccactcttctgcgggatatcgtcgttgggtgcattcttgatcgagccacggcgatgtccggcttcaacaaaccgctggatgccttttccacaacaggtgagaagctggcattcggttccaatgccttcctgcacttctacaagttgcatgcatccttgaagggtcatgagatcgtcgtagcctcctccaataacaaagcggtcgagaacgtcagtaaagaacttcctctcaaggaagccaatggtcgccatgaacagatcgcctacttccggtccatcagtgacctgattgcgaaccccaaacgcgccggctatttcgaagccgagggcgagggggacatcccctccgaccctgtcgaaacctgggggctgatcgcagctgctctcggcaagagcagcaaccgaggcgcgttccagcaaggtttctggtggaatgaagacggtggtttccttacctacctgaaagcagctcgcggcataaatgtcatgcgtgaaatcaaggacgaacgaacaggcgaaatcatcgaccgcgtaatgcccagcgtggttgtcaatgagcggcccagcaccaacgaagcggatgctgctgcggcctggcagaaagcgcgaaccgcatttcttaaactcaaggaaacggtagacgccgaaatcgccagcatcgaagagatgcgacgggatatccaggcgctcaagggagcaatcaccgaacttcaaagggctgaacagcgtcgactgagtctgaatgaagccgtcgaagaggcacaccagattgctgaatcctgccaacgggagcatgagaaggcaaaatcgcagatcgagcaggataagatcatgctcgacagccatcttgctggccgtccaggtttcttctctcgtttgttcgcgactgtagcctggaagtcgtggagatcgacactgcagaagctctcggcgaccttgcagcaatcagtcttacgggcgcaggagacagacggtgccctggagcttgcaagggctgagtggagcaatactgagtcccagttacagcaactcgaccaggaaatttccagcaagtgtcaggctgtctcgaaattgaaagcaaccgaggcagaggcacgaaatcgcatgggagacagggtcgttgatgagagattcttcgagcgcgagcacaaggctatccacctgactgcgccatggcttcccgataaggttcatcgcctgcgggaggatctgttcgccgctgccctaactgtgcataaaacgttcatcgatgcttcggccagccgcttgcaacacaaccttgggctattgatgtcgggcatggtggctggtgccttccagtcttccgctcaccgtgaacttctccccgacctttggtcgagccttttcatggttgtgccgaccgtgtccacgacattcgcctctgttcggacgatgttcggggatctgccaccagagagcattggctggcttctggtagatgaagcgggccaggccgttcctcaggcagcagttggagctatcatgcgagcaaagcgctccatcgtggtaggtgacccgttgcaaatcccacctgtagtttcacttcctgaaaagctgaacgccgaaatctgcaagttctttgacattgaccaagtcgaatggtctgcccccgcagcatctacgcagacccttgctgatcaggcatcgcgcttcaaatccaccttcgtcatggatgtgggtgatcgagaagtagggttgccactcctcgttcacaggcgttgccagaacccaatgttcgatgtttctaactccatcgcctatgccgggcagatggtccatgctgtcgggcctaaaagaccaggatccatcggctcggctttagggagatcttactgggtggatatcaatggcgatgctgagacgaagtggtgccctgacgagggtgaagcggttgtacgaatgctcaaagagctagcagcatcgggcgttacaaatccggacgtatttatcattacaccattcaagatcgtagagcagaacatgcgtcggcgtctcgacagtgaaactgatctgctgcgggcgttcggcgtaaagttggatgagtggtgccgtgatcgtgttggcacgatccacacgttccagggccgagaggcagacacggtcatcctgttgctgggtgcgccgaaagctagccagcaaagggcgcgtcagtgggcagcgagcccaccaaatataatcaatgtagcggtctcgcgcgccaagcaaaacctgtatattgtcggctcggctgctgcatggacaggggcgggaactagcctgcaggtcctgcatcggcaattggcgcaatcagcctga

SEQ ID NO: 122543 - DNA, 255 bp, Enterobacter cloacae
atgggggccagggcaatatgctgcatatcattaatgtgcagggacgaagtcaatgtgctcatagacacgcgaataaaaatctatctaaatatcgaaaacttattaccgtacctcaagctcacgggtaatagcctttggctggctctcaaccatcaagtcataccaacgaacctgcattctattgatttgcacagagtgcgtcttcgccgtaagcatcctaccgagatttggatctacgtcatgagcgcacgttaa

SEQ ID NO: 122544 - DNA, 630 bp, Enterobacter cloacae
atgatccgcagaaacaaaccatttaatactctttcccgccgtcggcgtcgtgcccggacacaacacgtcaagaatctgatccaccgcgagcttcaccgctgcggagggctgcattatgatgattgtgattctgaaaatgcagaggccattgctgcgggttggatgtggacctggagcgatgttttattcttgggtaattcgccagatgtgtattggaatgcggagatcattaccattgacgtagcgcgtgcggatattgtggaaaatctggtgtttgaagaagctcatgccatgttgagccaaaaccagcaggaagatgaagcccgcatggatacaacaccaaactacaatgcgaaagggaaggtggttagccacacggtggtagaacgtacccgagtttcttatcctcaattcggtggattaacctatttcgactacattgataaacgcttggccgaagtcatgcgcgacaatccgcctgtagttactcttggctatcgcattcaatctgactatcgtagcggcattggtttacaaatcatcgtggaagagccggtgctcactcgcgagataatcgacagtgcgatccgctcatttttggctggggatatgccccaggtccctaagtaa

SEQ ID NO: 122545 - DNA, 303 bp, Enterobacter cloacae
atgggcacaccacgatttacacctgaatttaaggaagaagccgtccgtcagataacggaacgcggttattccgttgccgaagtatccgaccgtctgggcgtttctgcacacagcctctacaagtggctacgggctatcaaaccggataacagcgagcagcattcccggtatttactggaagccaaaagcgagatcctgaaactacgggcgcagctgaaacgtaccgaagaagaatgggatatcctgaaaaaggccgcgcggtactttgtaagggagccgactgaagtgccgctttatcaatga

SEQ ID NO: 122546 - DNA, 231 bp, Enterobacter cloacae
atggggtgtgatgacgatgtgtcgggtactgaatgtccccagtccgggttttattcgtggctgcttaatgcggtctctgcgcgtgataaagataaccagcgtctgctgacgcttatccgtgattcctattcactgagcggtggcgtatatggttaccggcgggttcatggcgatctgaatgaaatcggtgaaacctgcggtaaaaacagggtggccgtattatgcaactga

SEQ ID NO: 122547 - DNA, 1326 bp, Enterobacter cloacae
ttgtcagcgatcgtaccaaaactaccagagccgatacttccggcattaccaacaactgttctgccagctatttccgcactcactgcatcattggggataccccgccatgtactggcaagcgatgaggaaattcagtatgcatggcgcgatcttccccgtgaattgcgtgaaattccaccagatctacgtggtgaattggtagccagaatgtgcgttgctgttagcactggcctatttgatggggcaatgaattacgcatggaacgccgccatcctccaattgagaacaaaagtaaggaactttggcctacctattgtcgcgcagatcttgcaagcagacttcgaagaaaggcatctattggaacttcaagatagccgactccttgaacttgcactcaaattaaacttagttaacgaagatgggttctttttcctcgatcaatgtcgagaagttcgcaataacttttcagccgcccacccgacaatgggcagcgttaatgaccgagagttcacaacgtttctaaaccgatgtgttcgttatgccttggctgatgcatcgtctccgaaaggagtcgacattggtgcattcatctccgctgttaaaggtgcaagatttaatgctaaccagcatgatatatgggtgcaaagacttacagagacacacgatgctcagcgtcagatgttggttggaatggtacatggcatctattgtgacccaaatacatcagaaccgtcgcggttgaacgcattggatataggtggttcactaaaagaaatttttactgcatctcttcgctcagatctcgttaacaagcatagcgagtacgcagcaaaaggagatgagccacgtcatgctgcatctctccagttcttcgagaagcttggtcttttgactctgctaaatgagtctgagcaacatgccgtcttctaccgagccattgagcgcctttggaatgtacataacggaacaaataatttctacaatgagccgccatttgcagagcggctattagaattgtcgctgcacggagctgtaccggaaacggcacaagagcaattcgtacaagtagttgtctgctgctacattggcaatggttacggtgtttgctgggctgctgctacaagctatgaacaattaattcgtaacttttccccaagggaaatagcaacgatgattcgtttggcaagcaacaatgacaatagcctcggacgccgtgtaaacacattacagccctgtcgtgccagatttaaagccacccttgctttgattgatcccgcgagcgttcctagtggagttaaagcggcttacgatcattacttaaagtag

SEQ ID NO: 122548 - DNA, 642 bp, Enterobacter cloacae
atgacctcaccaaccaaaccacgcggacgtccctcagtccctgaggaagaggtgaagaaacaaatcattggtagcgcgatggccttgctctttgacaaaggctatgacgccacaacaattgaggcggttgcatcgcatgcaggcgttgccaaaaagaccgtctatcgctttgcgaaaaacagggaggaattgcttggcctttcggttcgaaactggacggataactacgccccactcctgcagagcgatccgacagataagaatgacgttttaccggcgctaagaaaattactggctgcgatttgtggtcaggcgctatcagtagccgccgtgaaaatgtttcgccttctcaatactgaatttcctggtaaagatgatcttctcaagaaatataatgaaaatggcatagcgcgcggccaacaattactcactgagtggattacacgacagcaaaaacaaggctggttgccgatgttacctgcagataccagtgccaaagtcatactcgccatgtgtgtcgccgaacctcttcggcaggcggcgattggtttaattgatcccgttgagaaaaccgatattgaggcacatttggattcttgtatgccttttattttacttatattcaggcaaggtgctgaatga

SEQ ID NO: 122549 - DNA, 693 bp, Enterobacter cloacae
atgcgacaacacgatattgccaggccctggctggattattcggcattgcttgatccttctcccatgtcgctggagacaggtattaaacgtctggatgacgggagtctgctggtcgccgtacgcaccgatttacatggctgcaaaggacgtatgattaactggtggtttaccttctttgaaacgacgcagcatataaaatggtggcatcccgttgatcatgttgagcatcgtggatgggacgccaactggaagcgtggggaaagtttttacggcgcaagcatccatgcagttgaatcattagctgaaatccctcccattcccgcgcgtcttaaattccatcaccctgcatcagtatttggcgaaatggctgtcgacaaggcaatggcggatgggagtgtctcggcaatcattgccgcaaggataggcttcggtgaaaaaactgaactggatagccagggcgacccgctggacggacaaatgctacatgttgtccgggatacgccttttggttgtgtgctgcgtagccggtttattctgggtatgagtaatgacgaccacgctgaacctgccgatgacgttggattagcgcttatgcgacactgttatacagagttcacgttcttgtctcgtttcctgccttctctgtattacggcgagaaagcgaatgatgagaaaattgcgcttccctggtaa

SEQ ID NO: 122550 - DNA, 1383 bp, Enterobacter cloacae
atgagcattatggacaataaaaaagttgatttggttttcatcatcgacagcagtctttcaatgaaggatgaagcggaagcgctctgtgcaaaacttgagagcgccattgaggaggccagaaaagcctgcccttcggatttacgaacggattttctgggtatcgaaggcgtttttgccggcaccaaatttaataaaacggtccgtcagttcctgacgagcgaggccggagctaacccgtccgccctgaaaggcagagagtatgtcaaagaggggaaccccgctcaggaagatgtggcgcctgctgcggaggacgttatccgtcattacaactggcgtgacggcgctgaaaagaatgtttttgtgctgggagacgaaagtctgaaaggcggagagatgaccctggatgcggcccgcatcaaagcctgcgatgatgccattgccaccgccctggagtacggtgtcaaaatccactcctatctgggcacgcctcatgtctcattaccttatcccaccccggatgatgagaaagccatggttcgggaatacaagcgcctggcgcttcgtacgggtggtgagcattatatctacacctccggcattgccgattttgcctcggttttaaaaagcaccatttgcgccagtaaggccacgcaacacgacagcgtggcgaacaaaaaagaagaagcagatgcgctggaaggtaaaacgccagcgaagacgcctggtaatggcagcgatctgtgcgcacaggcccctgagattgtccgggcggtgaatacgcttgctgatgtgcttaagaacctgattgacgcttgcgccagcgactgtcgttgcaaagaaaatacgcccccttgcccgtgtcaggaacatcacaacaaaccggtgcccccctcctcaccccccgctgcgccggacactgcccctgtcagtcccgaaccaacacctttcctggatgagagtaagtttacgaataatcatctgaataactggcaatttggaccggcaacgcctgagcatgagttttactcagaaggtggcgcgaccatgattcgttttccgaccaccaatgttaaaggccggacacacaatggtgtgctgctttataaacattattcggaactccagccggggaaacgctatcgcttcagccttcaggctcgcagggacaatgactacaaggtgatacccgaactgtcactgcgggtggcaggccaggatattacctcggttacagcacttgccgtgaaaggcgagtgggtcacgctgtcaggagagtttacggcggcacagggcgataatgtgctggaaattttcagccataaagccagcggtgacggtaacgatttcagcataactggaatcacagtaaaatcagtcgattga

SEQ ID NO: 122551 - DNA, 765 bp, Enterobacter cloacae
atgactgtttcacctgcatggtcgggcaatattgatgcaactgctgacacgggtattaataccggacttaaactaaaaaccgggcaaaaaatcagtattattgcggaaggatggattaaatacggtaaggaagactacgccctggcatcgccatacggcaggctaaaagagggctttgtcttacggaacgataaggtgctgaaagcccgattcagtgcatccggaaaaagctatgacattggcagtggtgtttaccagtggtcggtaccggaagacggcgagctgattctcgtggtcagtgactcttcacatcgcgacaacagcggcgctttcagcgcggttgtgtatatcgctgaagacgaaaagaaagcggcggctcaaaaggcggactggaaaggtcatgttcccgcaacgcgcagtgactggacccacaccggcgtatccgtgagcaaaggggataaggtgatgctgattgcagccggtaccgctcagtacgacagccgcggtcgcagctttggacctgacggcgacagccagcatccgtcagcgcaaaaaccggatcccacttttgtcctgccagaagcactggcggggaaattactgatcaaagcgggtgagcatatttacggtatcggaagcggcggtagcgactgggaagtcccggctgatggcgaaatttcattcatttttaatgatacaaatgttgcgtctgaatacgccaataatacgggaggctatgacgtcaggtttgttgtgctcggttga

SEQ ID NO: 122552 - DNA, 360 bp, Enterobacter cloacae
atgacgtctaagccagaatggtccggagaagttcctgcaaatattccttccggtattaatacaggcctgcaactgaatgccggtgatgagataacgataatggcctctggctggattaaatacggtaaagaagaatttgcgctggcggtgccggatggcagggtgaaagaaggactcattacctgcaatgataaggtgctgaaggcgagatttgatacctctggcaaaggttatgatataggcggtggaatatataaatgggtggctccccagagcggtaccctgcatctgtatattgccgatacagaggctggatactctgataataccggcagtttcagcgtcaatgtataccggtaa

SEQ ID NO: 122553 - DNA, 1215 bp, Enterobacter cloacae
atgttcaaacgtccccgtagtatgtccgccatcgcgatggcaatgttgttctcttttgcgagcgtagccagcgcagcgaaccaggcccctcttgagcgctggcgcagctataccggcgtaacctggaatacgcctgagaagggggaaacgccgacgccgttttccggctcggttaacgcgcccatcgcaggcatccactttgatgcaaagggaagagcctttgtcagcacccctcgactggtttcagccggtgcacccgcgacgttaagtattcttgatacgaccgtgcagaccggaccggcgcgcctcacggcatttccgtcccgcgaggggaatgcggtggaaaccgctcccgatcagaacctgcgtaacgtgcttggcttctatattgaccgtaagaatggctggctgtgggccctggatatggggttcgtcgcgggagaagcggaatcccccatgggttcgcagaaactgatggtgctggatctgaataccggccgcacaatcaaacgcattccactggatggcgtggcagaccgcaaggcgagcttcctcaatgatgtggttgttgatgaaacgcgccgtgtcgcttacatctccgacagcggctcgcgcagtgcgcctgagaaccgcgtcggtcttatcatcgccgatttcgcaaccggcactgcccgacgcgtgctcgaccgtcatccagacctgcagattgagccgggtgtgaaggtggtctcgcacggggctgaagtctggcctggtcatccattactgattggcatcaacggtattgcgctgtctccggataccggcacgctctactggacggtgacgacagggacccatgcgtttgcggtaccgactgacattctgcgaaagcctggtgctgacgatacgcagattgcggcgcagatccgggatcttggatcggtgggaggcaataccgacggtatcgtgaccgatgccaaaggcaacctctatatcaccgatgtgacacacaacggtattgtcagatatgaaccggagagcggctcaatgaccctgatggcgtcaaacgacggcgtacactggccggacacgccggccatcaatccggacggggatctgatctttacctccagcagcctgaacgaccattttgctggcgcggtcaaacctggccaggagcgctatgacgtatggcgtttacccctgaaggcgttgcaggataagcgccagtaa

SEQ ID NO: 122554 - DNA, 795 bp, Enterobacter cloacae
atggatcttcaactcaccggtaagacagcactcgttactggcgcaaccgcggggattggtctggccatcgcccgcacgctggcgcgcgaaggcgtggccgtcaccattactggtcgtgaccacgcaaaattgcaaaacgccgtggcagacattaccgccgctcagcctcaggcgcaggtcaccgccatcgttgccgacctgggaaacgctgagggggcaaaagccctgatcgcggcctgccctgacaccgatattctcatcaacaacctgggcttttacgaagcccgagacttcgtcgacatcaccgatgatgagtggctgaacatgttcaacatcaatgtcatgtccggcgttcgcctgtcacggcattacttcccgcgcatgctggaacgcaactggggccgggtgatttttatgtcgagcgaagtcggcgcattcacgccgccagacatggtgcattacggcgtcagtaagtcggcgcaactcgccgtttcgcgcggtatggccgaactcacgaaggggacaggcgttacggtcaacagcgtactgccttcagcgacccgctccgacggcattatcgaataccttcgccagaccgcacctgcaccgggtatgaccgaccaggagatcgaagcgaatttcttccaggcctaccgccccagctctcttatcgcacgaatgatcgatgctgatgagatagccgcgatggtcgcgctgctggcgagcccgctgggcgctgcctctaacggtgccgcggtgcgcgtcgaaggcggcaccttccgctccattctttaa

SEQ ID NO: 122555 - DNA, 897 bp, Enterobacter cloacae
atgagcagaaaattcgattatcttggcgatgttgaggtcttcatcgctgtcgttgaacacggctcatttactgctgctgccgtcgccctgtccaccacgccctcggtgttgagtcgtgcggtttctcgccttgagacgcgtctgggacgacagcttttacagcgaaccacccgtcgggtaggcctgaccgaggcagggcgagtctatctggagcaggcgcgctctgctttttccctgctggatgaagccgaacgtgatgggcagggtcaggaaggcgacctgaccggacgcgtgcgcatgagtgtaccgacgacctacgggcactatcgtctgccgcccttgctggcgcaattctcccaacactacccgcgcgttcaggtggatctgaacatcaccaaccgcaacgtcgacctgattgctgaagggttcgatctggcgattcgtttgggtcagatgcccgacagtggtttagtcgcgcgtaaactggaggatgccgctttgctgctggtcgcatcacccgcgtaccttgacaggatggggactccgcaaacgctggatgatttgcaccgacacatgtgtctgccgtttattttgccgcgcaccggtcgcatcgctccgtgggtgtttcgggaagacgaacgcgatgtggactggctacccgtttcacctatcgaaacatcggatgatgtgcttggcgttgtctccctggctgaacacggtatggggatttgccagagctatgagtttatcgttcgggacaggatacagcgcggtcagctggtggaggtgcttcctcaccttcgcgggcgctcgcggccgttctcggtgatcttcgcgccacaccggcgccagtccgctgccacccgcgcgatgattgatctcctgaccacgcaataa

SEQ ID NO: 122556 - DNA, 510 bp, Enterobacter cloacae
atgaaaaaaacgtcttattcgtttttgattccagcgattgttggggtattgacgctggtaatttgttttattacctggcgcgtagaaatttaccgtgtgacatttattaacgctctcgcaatgcaatacatcgcgaccggctcattgctcttgtcgctggctttgatggtcatttttatctggaagggacggttgaaaggctggccattttctgagcgtctaaaagtgttcattggcaccttttttatcagcatgcctctcgccattttcgtcgtctttacggcggtttatttactggatgggaaagtgtcgtcctggagtgctccttacaaatataaatctgtaggcagatataattgtgaaggggctgaagtatatgaacctgaactgaaagagaagatacgtatttgtcacccaatgggcgactatcaactcgataacaccttatatgttgaaaaacgcagtaatgcgctgggtatcgtggtgctttgggctatcacgcgctcatga

SEQ ID NO: 122557 - DNA, 1785 bp, Enterobacter cloacae
gtgcgaatcgcaacgataactaactgggcctatggtgccacggtctgcctgacccttgtctcaggcatcatcatgctgatggcatccaatgccgacaccgtggaacgtcatgccgtggaacagcggcagcgctttgatgagctgacggaggatattgaaaccgacgcctgggcgcagtccgatttagcccgcctgtacgtaataaaaaaagatccgcaaaccctcagacaatacagccagtcagagaacaacctgaaaaatgtcgagctgaggctggataaactgcgcgataacggcgcgtccgatgaggagctgtccctgctgcgggaaggtctcaagattattgatgcgctacaggatgaacagcagacggccctcaccagtacagagcggggagaagatgctcaggccattgccctgctttatggtgccccctatgagcaggcactggaacgcgcgcaaaaccagattgatcactttcgccagatcctcgacaagcgggtgattgcgtccgtgcaggatgccaccaaaaaatcgaaagcgctgcgtacggcctctgaactgatggttggcctgaccgccctgctgtttctgtttgtcctgggctttatcctgaaacgccgcgtgctgcgccccgtggtgcgtctcagcgacgtggtacaccgtctggcgtcgcaggattacgccgtcgaaacgccgaattttaatcagattgatgagattggcgatatggcgcaggcgatccgtatttttcgtgaaaacggccttgcccggcaacggctggaaaaagagcgcgacgccgactgggctgtccgcgaactgctggcccgcatgacgcagcggctgcaagggtgtgagaactttaccgatgttatcaacgtggcggagctgtttgcccccaatatcgccccgggggtccctggccggctctatgtccttgaccgcgatccctggcagatgcgctgcgttgcccagtggctctcccccacgggagaggagatgacgtttcatcctgacgaatgctgggcagtaaggcgtggtcagagccatcccccgttcagcggtaagccggatatcgcctgctatcatctgccggaatcactggcgtatcgttcgctgtgcgtgccgcttattgcccagggcgaggccattggtctgctctcattccagaatatcaccgcggaaaatgcccctgcccgtgcttatctcgaactgatggccgaagcgctcggtctggcgctggcaaaccagcggctacgcgatgcgttgctggaaaaagcattgttcgacccgctgaccggcttgcgtaatcgccatcatctggaagatacgcttcatacccaaatgacacaggccattcgtaacggcgaacccctgagttgcatgatgatcgatatcgatcacttcaagagcattaatgaccggtttggccatgaagcgggtgatcaggttattaaaagcgtagcgacgattgttcagcgggctacccatgacaacggaatggctttccgctacggcggggaggagtttttagtactgctttccggtgctgatgaagaagaagcgcatgactgtgctcaacagatttacaacggcgtacaagggttgtcgctacgttatggactcacggagattgggccagtcgatgtttcgattggtatcgccagctatccgcagcacgcccagagtgacaacctgctgcgtgcagccgatgtggctttgtaccgggctaaagaactgggtcgatcgcggattgtaagttttgggatgctggaggcgggctag

SEQ ID NO: 122558 - DNA, 684 bp, Enterobacter cloacae
gtgaaaggaaaaactctgctgaccgttttcattattgtgggtgtcgcaacggtggggtatcgctggttgccgtcttactacaaccctttcacgccgctacatctcgacgacccgccaggccgcattacccagtataagcttcggaacttaacgccccaggcgtgcacgagcctgttatcacaggccaatcaacgcgcgcttatccgcacacaaccggtcgcagacagcggtggggagtgtccactccgtaacgtcgtccgggtacgtaacttcggtccggtcagcctgaacagcagtttccttgcgagctgcccgctggcgctcagttctgccttgtttatcagccagcaggcccggccactcaccagacgctatacgggaagtgagctgacgcgtattgagcatctcggcagctttgcctgccgcaacatttaccatcgccccgacgcgcgacgcagtgaacatgctacggcagaggcgctggatatcacggcgtttgggctggcaaacggtgagagggtcacggtacaaaacggctggaaggcgacaaaaatgcagccatggctgaaaggcatgctggcggcgagctgcagctattacggtaacagcctggggccagagtataacgctgcccatgccagccactttcacctggggatgcgcggtttcggtctctgccgctga

SEQ ID NO: 122559 - DNA, 1359 bp, Enterobacter cloacae
atgatttgtgacttatttcacaaatatgatgactgggaagataaaacaccaaagtcggcaagggcgcatctctggtgcgacgtcattacgcgtaacttgctaatctgtcggcgaattcgcctaaaaatgaagactatttcttttatggaatcctggaaagttaatctcatctcggtctggttcgggtgcttctttaccgggctggccatcagccagatattgcccttcctgccactgtacgtgtcgcagctgggagttacctcccatgaagcgctctccatgtggtcaggtctgacgttcagcgtcacgtttctggtctctgccatcgtctcgccgatgtgggggagtctggccgaccgcaaagggcgcaagctgatgctgctgcgcgcatcgctggggatggcgatagccattctgctgcaggcctttgccactaacgtatggcagctctttttcctgcgagcggtgatggggctgacgtccgggtatattccgaatgccatggcgctggtggcctcgcaggtgccccgtgaacgcagcggctgggcgctgagtacgctctctactgctcagataagcggggtcattggcggcccgctgctagggggcttcctcgccgatcatgtggggttgcgcgcggtgtttatcattacggccatcctgctggtggtcagttttctggtcacgctcttcctcattaaagagggaggacgccccgtcatcagcaaagctgaacgcctgagcggcaaggccgttttcgcctcgctgccctatccgggcctgatgatcagcctgtttgtgaccaccatggtgatccagctttgcaacggttcggtcggcccgattctggcgctgtttattaagtcgatggagccagacagcaataatattgctttcctcagcgggatgattgccgccgtcccgggcgtatcagccctcatttcggcgccacgccttggaaaactgggcgacaggatcggcacggcgcgtatcctgatggccacgctgatttttgcggtggtgctctttttcgcaatgtcgtttgtcacttctccgtttcagcttggcgtgctgcggtttctgctgggctttgcagatggtgcgatgttacccgcggtgcaaacattgctggtgaaatattccagtgaccaggtaacgggccgtatttttggctataaccagtcgtttatgtatttaggtaacgttgccggtccgcttatgggagccgctgtttcggcaatggccggtttccgttgggtatttgctgctaccgctattgtggtgctgataaatataattcaactggctattgcactgcgtcgccgcagacaaatggcagaggcgaagtcggcgcgatag

SEQ ID NO: 122560 - DNA, 1416 bp, Enterobacter cloacae
ttgaaacagagcgcacttttcatcgcattacttcccctgttaatgtcacccgctatttatgccgacaatcacaatactagcgtgctgcataatcgtgcggccaaaggggatatcacccagccaggcggcgcgcgtcggttgactgaagatcaaaccgccgccattcgcgcttcgctgaatgagaaacccgctaaaaacattattctgctgattggcgacgggatgggcgattccgaaataacggcagcacgaaattatgccgaaggcgcgggcggcttttttaaaggtatcgacgcactgcctctcaccggacaatatacccattacgcgctggataaaaaaaccggtaaacccgattacgtgacggattctgctgcctctgccactgcgtggtccaccggtgtgaaaacctataatggtgcgctgggtgtggatattcacgaaaaagatcaccagaccattctggagatggctaaagcggcgggactggctaccggcaacgtctctacggctgaacttcaggatgcaacgccagcggcgctggtagcgcatgtcacctcgcgtaaatgctacggcccgtcggtgaccagcgaaaaatgccccactaacgcgctggaaaagggcggtaaaggctcgattacggaacaactgttgaacgcacgtcctgacgtgacgctgggcggcggggcgaaaaccttcgcggaaaccgcaacggcgggcgaatggcagggcaaaacgctgcgtgagcaggcgcaggctcgcggctatcagctggtgagtgatgcatcttctctggcggcgattaccgaagcaagccaggataaaccgctgctgggtcttttctctgatggcaatatgccggtgcgctgggaagggccaaaagcgtcctaccacggcaacattgataaacctgccgtaacctgtacgccaaacccaaaacgtaccgacagcatcccgacgctggcagcgatgaccgataaagcgatctcactgctgagcaagagtgaaaagggcttcttcctgcaggtggaaggcgcgtcgatcgataaacaggatcatgcggctaacccgtgcggtcagattggcgagacggtcgatctggacgaagcagtgcagaaggcacttgagttcgcgaagaaagacggcaataccctggtggtcgttaccgcagaccatgcgcacgccagccagatcatcccagcggataccaaagcaccgggcctgacgcaggcgctgaacaccaaagatggcgcggtgatggtgttgagctatggcaactctgaagaagagtccatggagcataccggaacccagctgcgcatcgcagcatacggtccgcatgcggcaaacgtggtagggctgaccgatcaaacggatctgttctacaccatgaaagcggctttggggctgaaataa

SEQ ID NO: 122561 - DNA, 321 bp, Enterobacter cloacae
atgaaaacaacattactggttactctgctctcgggtctgttcctgatctcatcggcgaacgcggaagagaaaacattaacgccgcagcagcaacgcatgaccacctgtaatcaacaggcgaccgcacagagcctgaagggcgatgcccgtaagacctacatgagcggttgcctcaaaaacggtgccgcgaaaccgggtgagaaaagcctgacgccgcagcagcaaaaaatgcgcgagtgtaatgcgaaagcgaccgaacagtccctgaaaggcgacgatcgcagcaagttcatgagtgcctgtctgaagaaaaacgtgtag

SEQ ID NO: 122562 - DNA, 1104 bp, Enterobacter cloacae
atgatgaatgatgaatcttattacaatataaagcgcattcgggaagagtggaatatgaccctttctcaggatgacccccaccgtaccgggatcccgtttgcccggcgagcccggctggcgcgtgttgtcggactggcagcgatgttcttccccctctctggcgtgctggtcaccttttctgtatccggcgtctggtggttgttcctggtggggtgggcatttatctggccccatttcgcctggcagtggtcctgccgcgctgcttctcctcatcagcaggaacattttaatctgaagattgatgccattattgccgggctttggatcggcatgatggggatcaatgcgctacctacggcagcgctgctgatgatggtgggaatgaacatgatgggggccggcggctgtcggctgttttttaccggcatcatgttaacccttctgtcttccctggtgacgctccccgtcgtgggccgggtggctgtctttaatccggagcctctggcatggggcctaacgcttcccgtgctggtgttgtatccgatgctttttgcctggctcagccatcgtactgccatcaggcttgctgagcataaacggcggctggagctgatgagtacccgcgacggcatgaccggcgtctttaatcgccggcactgggaagtgctgctgagaaatgaatttgaacactgtcgccgcaaccactgcaccgccacgattttgcttatcgatatcgatcattttaagaatatcaatgacacctggggccacgatgtgggtgatgaagcgatcattgccctgacgcggcaactgcagctaacggtgcgttccggggatgcgataggccgttttggcggggatgagtttgcggtgatcatgtcccggacggcggctgacagtgccatcgccgtgatgtcacgcgtgcatgagaggctggaaacgctgtcgttaccgtgtgcgcccaaggaatctctgcgtattagcgtcggtgtcgcgccctggggaccgcagttcgggcactatcgggagtggttaaaagcggccgatgtggcgctgtataaggccaaaaatgccggacgcggccgcaccgaggtggccgcctga

SEQ ID NO: 122563 - DNA, 132 bp, Enterobacter cloacae
atgccaaacggcgctacgaagatcctgataagtcgtgaattaattcctaaagggctaaataccgtgcctgaatcacactttttactcatcgcaaatgttaagcaggagttaatatttagttattacaggtaa

SEQ ID NO: 122564 - DNA, 1818 bp, Enterobacter cloacae
atgttaaacgcctggcaccttccggttgccccatttgttaagcaaaacaaagacaaccttgtgattacgctctggctggcgggggaaaatcagcctgaacgcgtgacgctacgcgccgaaattgataacgaagagaccgcgctgaaaatgcataagcagcgcagccagccgcagcccgggatcacggcgtggcgggcaaacatcgatttaacccgtggacagccgcgtcgtcgctacagttttaaactgctgtggaataaccgccagctgtggtttaccccgcaggggtttagccgttttccgccggcccggctggagcaatttgccgtcgattacccggacaatggcccgcaatgggttaacgatcaggtgttttaccagattttcccggaccgctttgcccgcagcgaaaagcgcactgcagaccaggacaaggtttattaccaccacgcagcaggtcacgacattatcctcaaagcatgggatgaaccgctgaccgcgcaggcgggtggctcgacgttttacggtggcgatctcgacgggatcagcgaaaaactcccgtacctgaaaaaactgggcgtgacggcgctgtaccttaacccggtgtttaaagccccgagcgtgcataaatacgacaccgaagattatcgtcatgttgatgagcagtttggcggcgatgcggcgctgctgcgcctgcgacagaacactaaaaacgaagggatgcgcctgattctggacggcgtgttcaaccacagcggggattcgcacgcgtggtttgaccgtcataaccagtcgatgagcggggcatgccataacccggattcgccgcagcgtaactggtacagctttaatgaagagggctacgcgctggactggctgggctacccaagcctgccgaagctggatttccagtcgtcttctctggtcaacgaaatctacggcggtgaagacagcgttgtccgccactggcttaaggcgccatggaacatggacggctggcgtcttgacgtggtgcatatgctgggtgaagcgggcggagcgcgtaataaccttcagcacgttgcaggtatcacccgctcagcgaaagccgcgcagccggaggcctttgtctttggcgagcattttggcgatgcacgccagtggctgcaagccgatgcagaagattcggccatgaactaccgcggttttaccttcccgctatggggatttctggcgaacaccgatatctcctacgatccgcagcatatcgacgccgaaacctgtatggcatggatggataactaccgcgccagcctgtcgcatcagcagcagttgcggatgtttaaccagctggacagccacgataccgcacgttttaaatccctgcttggcagggatgtggcgcgcctgccgctggccgttacctggctcttcacctggcctggcgtgccgtgcatttactacggtgatgaggtggggctggaggggaacaacgatcccttctgccgcaaaaccttcccctgggatccggcgaagcaggacaatgcgctgctcagcctgtaccagcgtctggctaagcttcgtaaacagaaccaggcgctgcgttacggtggctgtcaggtggtgtatgcccacgataacgtggtggtgtttgcccgcgtctacaaccagcaacgcgtgctggtcgccatcaaccgcggagaagcctgtgaagtggtgctggatgactctccgttgctgcacgtgaaggcgtggcaacgcaaagagggtaaaggcacgattcaggaaggcattctctccttaccggccatttccgcctccgtctggttcggaaattaa

SEQ ID NO: 122565 - DNA, 642 bp, Enterobacter cloacae
atgtctattcgtgaactgattgacccgtccaattccgtactgatttttatcgatcaccaaccgcaaatgtcttttggcgtggcaaatattgaccgtcagttattaaagaataatacggtggctctggcaaaagcaggcaaaatttttgatgttccggttatctacacctctgtcgaaacaaaaagctttagcggatacatctggccagaattgctggcggttcacccggcggttaaaccgattgaacgtacctctatgaactcctgggaagacgatgcgtttgttgcggcagtgaaagcaacgggccgcaagaaacttatcatctcagccctgtggaccgaagtttgcctgaccttcccggcgctgatggctctggatgaagggtttgaagtttatgtagtgaccgatacttccggcggtacctccgtagatgcccatgaacgtgcgattgaccgtatggttcaagcgggggcggttcctgtgacctggcagcaggtgctgcttgagtatcagcgcgactggtctcgcaaaggcacttacgacgcggtcatggacctggtccgtgagcacagcggtgcttatggcatgggcgttgactatgcctacaccctcgttcacggtgcgccagaacgcaaagcgtaa

SEQ ID NO: 122566 - DNA, 546 bp, Enterobacter cloacae
atggcgcacacatcgcatgtcacgctggtgatcacccacaccttgctgccgggtcaggctgagcgatacgaacagtggctgggtaagatcatgcccatcgcggcggaatttccggggcatcttggcgcgaacgtcatccgcccgaccgacggacaacatctgtggacggtgataatccgtttcgacaccctcgaacacctctctgcgtggacccagtccgatacccgtaatgcgctggtaaaagagattgaaccgctgctggcggaaggcgataaaaccgaagtgcgtaccgaggcggcgttctggtttactccaccggagcctcatgtgcgtaagcctaaacagtggaaacagtttctcattaccctgctggttatcttccccagtaccaacctggtgccgctggtgaccggtgcgttgcttcctggcctgaaaggtacgttgttgctgcatctgattaacgatgcctgtgtggtcgcgctggtggtctggctgtggatgcccatcgtgacccgtctgtttgccggatggctcaaaaaagcctga

SEQ ID NO: 122567 - DNA, 1869 bp, Enterobacter cloacae
atgtctcaaactgccacactgatcttaaccaaaggtaagatccataccctcgatcgcgaaaacccgctcacggaagcggtggctattgctaacggcaagattctggcgacgggcaaccacgatcgcattatgagctatgcgacgcagggaacgcagattgtcgatctgaagggaagtacggtgatccccgggcttaacgattcgcacctgcacctgatccgcggcgggctgaactacaacctcgagctgcgctgggaaggcgtaccgtcgctggcggatgcgctaaggatgttgaaagatcaggccgatcgtacaccttcacctcagtgggttcgggtggtgggcggctggagcgagtttcagttcgccgaacgccggatgccgaccatcgaagagcttaacgaggcggcaccggatacgccggtgtttgtcctgcacctctacgatcgcgccctgcttaaccgcgccgcgttgaaagctgtcggctacaccaaagagacgccaaacccgccgggcggggagattgtgcgtgataaccacggcaacccgaccgggctgctgatcgctaaacctaacgcgatgatcctctacgccacgctggcaaaaggaccgaaactccccattgagcagcaggttaactccacgcgccagtttatgcgtgagcttaaccgtctggggctgaccagcgccattgatgccggcggcggcttccagaactacccggaagattacgaggtgattgccgaactgcacgccaaagagcagatgacggtgcgtattgcctacaacctcttcacccagcgccctaaacaggagctggaggattttgagcgctggaccgatatgctcaaaccggggcagggcacagacttttatcgtgcgaacggggcaggagagatgctggtcttctcggcggcggattttgaagatttcctccagccgcgcccggatctgccgcaagggatggaagacgagctggaacgcgtggtgcgccacctggtggaaaaccgctggccgttccggctgcatgccacctatgacgaatccattagccggatgctggatgtctttgagaaggtgaaccgtgagattccgtttaacgggctgcactggttctttgaccatgcggagaccattaccgagcgtaatatcgagcgcgtcaaagcgttggggggcggtattgcggtgcagcaccgtatggcgttccagggcgaatatttcgtcgaccgctacggcaaagaggcggtaaaacacacgccgccggtggcgaaaatgctggaactggacgtgccggttgggctaggtaccgacgcaacccgtgtggcgagctataacccgtggacggcgctctactggctggtctccgggcgaaccgtcggcggcctggcgatgtatgacgacaataaccgcctgccgcgtgaggtagcgctggagctgtggaccgcaggcagcgcgtggttttccagcgagcagggtaaaaaaggccgtctggttgaagggcagcttgcggatctggtggtgctgtcgaaagattacttcagcgtgacggaagaggagatcaagggcattgaatcggtgctgaccgttgtggatggcaaggtcgtgtatgccgccggtcatttcagtccgctgtcagcgccgccgatcccggttgtgccgtcgtggtcaccggtcgtgaaagtcccggggcattaccgctctgcgccgcctgcagccagtaaagtgggggcggtggtacagatgcaccagtgtattggtagctgcggggtgcatggccatgcgcacggcattgcgcggcaatcggatatcccggtatctgatgaccaggcattctggggcgtgctggggtgttcgtgcttcgcgttttaa

SEQ ID NO: 122568 - DNA, 912 bp, Enterobacter cloacae
atgaaaattacagtgctcggatgcggagcccttggacagctatggctgaccgcgctttgcaagcacggacatgaggtacagggctggctgcgcgtgccccagccctattgcagtgtgaacctgattgacgaagacggaagtatattcaacgaatcactcaccgcgaacgatccggattttctggcgcaaagcgatctgctgctggtcacgctcaaagcatggcaggtttcagatgcggtaaagacgctggccgcgcaacttcccccagactcccccattctgctgctgcataacggcatgggaaccattgatgagctgaaaagcatcccgcatcccttgttgatggcgaccaccacgcacgctgcacgccgcgatggcaacattatcgtacatgtcgccagcggcgtaacgcacatgggccccgcccgtacgcaggatggtgactacagctatctggcggatgttctgcagaaggtgctgccggacgtggcctggcatgacactatccgcccgcagctgtggcgcaagctggcggttaactgcgtgatcaatccgctgacggcgctgtggaactgcccgaacggggagctgaaaaatcatccgcaggaaattgccaccctgtgcgcggaggtcgcctcggttatcgaacgtgaaggcctgcatacctcggcggaggatttacgctattatgttgagcaggtaattgaaagtactgcagaaaacatctcctcgatgttgcaggacattcgggcgttacgccacacagagattgattacatcacgggctatttgcttaaacgcgcccgcgcccacggcattgccgtgccggaaaatgcccgtctgtatgacctggttaaacgtaaggagagtgaatatgagcgcgtcagcactgatctgcctcgcccctggtag

SEQ ID NO: 122569 - DNA, 381 bp, Enterobacter cloacae
atgaaatgtggaatcaaggctctgttcattactctggcgattgccaccaccgggatgagcgcaggtgcgctggcgacgacacccgcggcgaaaacaccggcggtgcaaagcaggtctgacgcagcggcacccgcagctggccagacgaaagccacggatgccggaaaaagcgcggatgatgacggtacgcgagtcagtatcaattcggcatcggcagaggatctcgcccgggtgatgaatggcgtagggctaaaaaaagcgcaggcgatagtcagctatcgcgaagagtacggtcctttcaaaacggttgacgatcttaagcaagtacccggtatgggcggagcgctggttgagcgcaacctctcacacctgacgttgtaa

SEQ ID NO: 122570 - DNA, 612 bp, Enterobacter cloacae
atggtacgtcgtctgctacaactgtatgtcggtttagggctgtatgggctttcaaccacgatgtttattcgttcggatctggggctcgatccgtgggacgtcttccaccttggcgtggcaatccagctggggttgagcattgggatggtgattattttaaccggtgcggcggtactgctgctgtggatcccgctgcgtcagatgcctggtctgggaaccctcagtaacgtgattattattggcctggcggcagatgcctccatggccctgatccccgaggtgacctcgctgcccctgcgtatcgcgctgctggtggccggaattgtcgtgaacgcgatagccaccggtatgtatatcggtgccggtttcggggcgggcccgcgcgacggtctcatgaccgggatccatgcccgtatgggatggtccatccgcagtgtacgtacctcgattgaagtgtccgtgctgctgattgggtgcatgctgggcggaacgttcgggataggcaccgtcgcgtatgcgctgaccattggcccgcttatccagatctgcttgcctctgttccgttataagcctcgcgttgagaagactccccagccggagcgggttgtttaa

SEQ ID NO: 122571 - DNA, 1071 bp, Enterobacter cloacae
atgaaagcaatcactctttatgatgttgccctccttgcgggggtttcttatcagaccgtttcccgtgtgattaacgacgcggagcatgtctctgcccgcacgcgggaaaaggtgcagcaggcgatggcggaactgcactacgtccccaatctcagggcacaacaactggcgggtaaacgtacccgtacgcttggtcttattactaccgatctggcgctgcacgccccttcgcaaattgtttcggcggtaaaatcccgggcggttgagcagggggcgagcgtgcttatctcaatggtggaacatccacagcagtgccagtctgcccttcaggcgttgctggcgcagcgtgtggaagctctgctggtgaatgtgccgctggaggatcctcatgctgaagcgctgaaagccctcgcatcgcccattccggtgctgtttctggatgtctcgccctcggctcaggtaaacagtcttgtgtttaatgcagagcagggtgctcgtctcgggattgagcatctgctttcgctggggcatgagcgtatagcgctgctgagtggaccggagagctctgtctctgcccgggcacgtctcgcaggctggaatgccacgctggcacaggccgggcttgaggctgtcgcggtggcgcacggcgactggagtgcggcaagcggctatgagaaaggacatttgctgttatctgccgcgcaactcccggatgcgatagtggtcgcgaacgaccaaatggcgctgggggtgatgcgcgcctgtgcggaaaaagggaccgcgatcccgggccagatgtcggttgtcgggttcgacgatacggcagacagcgcctggttttctcccccactgaccactattcgccaggcttttcgcgaggccggcgagcgaagcgtggagtggctgctggcaccagttgagggtgatgcatactggcaggttcagcttccggtgacgctggtgacccgccattctaccgctcgccacgatccgcagcagatcgaacgcgaggatctggcacagcagctcaggagcctggcgttagcggctgagcaacttgcccgccggtaa

SEQ ID NO: 122572 - DNA, 3093 bp, Enterobacter cloacae
atgtccaacactccatcgctgaccctcagcgcacttctggctcgtcgggactgggaaaatcccggagtcacccagtggaatcgcctggcagcacatgctcccttgcacagctggcgtgacgaacactccgccagagaagacgggggaaccgtcagccgacgcctccttaacggggagtggcgttttagcttctttcctgcaccagagcaggttccttcggtatgggtcagtgaagattgcgccgatgcggtgctgatgcccgtgccctctaactggcagatgcaggggttcgacacgcccatctacaccaacgtaacctatccgatccccgtaaacccaccgtttgtgccgcaagaaaacccaacaggttgttactcgctcacatttgagatggatgatgcctggctgcagaacggtcaaacccgcattatcttcgatggcgtgaattcggcgtttcatctgtggtgtaacggccggtggatcggttattcacaggacagccgactgcccgccgaattcgatctctcagcggtgctgcgtcctggcgagaaccgcattgcggtcatggtgttgcgctggtgcgacgggagctatctggaagatcaggacatgtggcgcatgagcgggattttccgcgatgtgtcgctactgcataagccagagacgcacattgccgattatcaggttgtgactgacctgaatgcggagcgggatcgcgcggtgctgaaggtggatctcgcgctcgcaggcgcacagtttgcggagtgtgaggtggcgtttaccctgtggcgcaacggcgaaaaatgcgccagtgccaccgggcggccgggcactgccgttgtcgatgagcgcggcggctgggccgagcggctaacggtggcgctccccgttgaggcgcccgccttgtggagtgcggaaacgccggaactttatcgcctgacgatgacccttctgaacgcgcagggtgaggtgctggaaacggaggcctgcgatgtggggttccgccgcatagagatcagcaatggcctgctgaagctcaacggtaaacccctgctgatccgcggcgttaaccggcatgagcatcacccggaaaacggccaggtgatggatgaagcgacgatgcgccgcgatatcgaactcatgaagcagcataacttcaacgccgtgcgctgctcgcactatccgaaccatccgctgtggtacacgctttgcgaccgctatggtttgtatgtcgtcgacgaagccaatattgaaacccacggcatggtgccgatgagtcgccttgctgacgatccgcgctggctccctgccatgagcgaacgcgtcacccgcatggtgcagcgcgaccgcaatcatccttcgattatcatctggtcgctggggaatgagtccggccatggcgcgaaccatgacgcactgtatcgctggctgaaaaccaccgatccgacgcgtccggtgcagtacgaaggcggtggggcgaatacggcagcgaccgatatcgtgtgcccgatgtatgcccgggtcgatcaggatcagcccttcccggcggtaccgaaatggtctgttaaaaaatggatcggcatgccggatgaaacgcgtccgcttattctctgtgaatacgcccacgcgatggggaacagcttcggtggttttgccaaatactggcaggcgtttcgccgccatcctcgcctgcaggggggatttgtctgggactgggttgaccaggcgctgaccagaaaagatgacaatggcacaccgttctgggcctacgggggagactttggcgacacgcccaatgaccgccagttctgccttaacgggctggtttttcccgatcgcacaccgcatccggcgctgtatgaagcccagcgcgctcagcagtttttcacctttacgcggataagtacgtctccgctggtgattgaagtccacagcgattacctgttccgtcataccgataacgaggtgctgcgctggacccttgtccgcgacggcaacgtgctggccagaggggacgtgacgctctccattgctccccagggcacacagcgtctggacatcaacctgccagcgctggcgcctgaaccgggtgacgtctggctgaacgttgaagtgcaccagccgcgggcgacgccgtggtcaccggcaaaccatcgctgcgcgtgggagcagtggccggttccaactcccctgtatatcgccccgccagcaccaggaggtgtaccgccggtgttaacgcaaactggcgacgtgcttgagctggtgcatcagcagcaacgctggcagttcaaccgcgcatcaggacacctgacgcaatggtggcgcaatggcgttgaaacgctgctctcaccgctgacggataacgttagccgcgcaccgctggacaatgatattggcgtgagcgaggccacgcgaatcgatccgaatgcgtgggtggagcgctggaaagcggcaggcatgtacgagctcaccccgcgattactgcactgtgaaggagagcagcatgcagccgaggcggtggtgaaaaccctgcatgtctgggagtatcgcggtaaagcgctcttcctgagccgtaaagtctggcgggtggacgatcggggcgttttgcatggcgatattcaggtcgatattgcgtctgatatcccggaaccggcacgcgtaggcctgagtgttcaccttgccgcaacgccggaaacggttcagtggctggggcttgggccacatgaaaattacccggacagaacgctggcggctcagcaggggcgctggacattaccgctggaagccatgcacacgccttacatcttcccgacagaaaatggtctgcgctgtgatacccgtgaactgctgctgggcgcgcatcggctgaatggcctgttccatttctccgtcagccgctacagccagcagcagttgcatgagacaactcaccatcatctgttgcgcgaggagccggggtgttggcttaacctggacgtgttccatatgggcgtgggcggtgatgactcgtggagccccagcgtctcgccggaatttattctgcagaaacgccagcttcgctataccttcagctggcagcagaaccctgactga

SEQ ID NO: 122573 - DNA, 840 bp, Enterobacter cloacae
atgaacgattttgcttcactcctgcagcagggcaatgcctggctgtttgtacccagcgctatcctcctcggcgcgctgcatggcctggagccgggccactccaaaacgatgatggccgcgtttattgtggctattcgcggtacgctgaaacaggcggtgttgcttggtctggcggcaacgctttcccatacggcggtggtctggatcattgccatggcaggattatggtttggccggggctgggatgcgcatacgtctgagccctggttccagctggtctcggggatactgatcgtgctgatcgccctgtggatggcctggcgaacctggaaggagagtcagccacacgatcaccaccatcatcacgatcaccatgaccatcatcacgatcaccatgacgatcaccatgaccatcatcatgatcatcacgaccatggacatccactggttgaagaagagtggcaggacgcccaccagcgcgcgcatgcgcaggatattaaccgccgcttcaacggccagaacgttaccaccggacaaattgcactgtttggcctgaccggagggcttatcccctgcccggcctcaatcacggtcctgctcatctgcctgcagctgaagcattttgccctcggcgcaacgctggtattcagcttcagtattggtctggcgttaacgctggtcgcttccggtgcaattgccgccctgagccttaagcatgcgacaaaacgctggccgggtttcagcgagttttcacgaaaagcaccgtggatctccgctgccctgattactgtggtcgggatttacatgagcctgcacggcctgagcggtatcctggcgtaa

SEQ ID NO: 122574 - DNA, 1566 bp, Enterobacter cloacae
atgaaaacccgacatctggtcagtctggtgaccggcgtacttatcattgcggtgctggttccgattagcctgagcatctggctggcacatcgccaggcggaagataagtttgtcgatgcgttggatagctatgcctcacgcgtgctgatacgtaccgccagggtagtggatgatgcaaaggaagcgctcaatagcctgcagacctttaaagggatcccctgtagcgttatgcatttaagggagatgcggcgggtcgctttttcatggcgttatgttcaggaagttatttatatcaacaatcttgaacccctttgctcgtccctggaacaaaccagtcagtcggcccctttccccccgcccatgcgaatcacggaagatggttatggcgcatggctcaccacgcaaaacgatctcggttttagccgctacatggcggtcctgggtcggggccactatctggtgctggtggatcctgcctcgcttgtcgatgtgatccctttcggtgagatcgccacagatgccgccctggtgggcagcaaatcacatctcatttttgccagcagcagcaagctcgatccgcatatccgcaatctggttaaggatcagggcgtcacccgcattcagtacaacggctcgatatacattatgaagcctgttcctgaactggggtttacggtggtcgcctgggcggcgttaaaaccgctggctgaaacctggcaccagcaacttcttatctggctgccgttcggcatactgataagcctgcttgccgcactctttgttttacgattgctgcgtcgcatccagtcgccacgcaaccgcctgcttgacgccatcaacaaccgggaatttgtggtgcattaccagcccattattgaactctctagcgggaagattgtgggcgcagaggcgctaacccgctggccccagcctgacgggagcagcctttcaccggatatttttgtgccgcttgctgagcaaacggggctcatctcgcagctgacgcatttggtcattgaaaaggtgtttgaggatatgggctactggctgcaccttcacgccggtcagcatatttccattaacctcgcgccggccgatttgacctcgggaaaactcccgccactgttgagtcacttaatgaataagtggaaagtccatccgcaacagatcgcccttgagttaaccgagcgcggctttgccgatcctaaaatcagcgcaccggccatcgccgcctttcgtcattcaggccacgcaatctatattgatgatttcggtacgggctattccagcctgagctacctgcaggatctggatgtcgacacgctaaaaatcgataaagcgtttgtggatgcactggaatataaaaacgtgacgccacacattattgaaatggcaaaatcgctgaagctggcgatggttgcggaaggcgtggagaccgaagggcaactcgcctggctacgtcgtcacggcgtgcagtatgggcagggttggtactacagcaaggcgttgccgaaagcggactttattctttgggcggaagataacctcaaaacacatcctacttaa

SEQ ID NO: 122575 - DNA, 552 bp, Enterobacter cloacae
atgagcatagaaaagcagaagatgattgcaggtgaacattaccgccctggtgatgaaacattacgggccgaccgattacgcgcccgacacctggttcaccgttataaccacactgcacctgatgagaaactcgaacgccagaacattctggcggaactcctcgggcaaagcgaaggggcctatattgagccgagcttccgctgtgactatggatataacatttatctgggcaaagaattttacgccaatttcgattgcgtgatgctggatgtctgcccgatacatattggcgacaactgcatgctcgcgccaggggtgcatatttacacggcaacccatccgctggacgccgacgcgcgtaatagcggcgtggagtttggcaagccggtgaccatcggcaataacgtctggattggcggacgggcggttattaacccgggcgttacgctgggtgataatgtggtggtggcctccggcgctatcgtaacgaaagacgtcccggcgaatgtcgtcgttggcggcaatccggcaacaatcattaaacggctgtaa

SEQ ID NO: 122576 - DNA, 594 bp, Enterobacter cloacae
atgcgtttgttttctcagcagggtgtttcgtcaacctcgctggcgcagattgctcaggccgcgggcgtcacgcggggagcgatttactggcattttaaagacaagacagatctgttcagtgaaatctggcaactctcagagtccagcattagcgatcttgagactgagtatcgggcaaaattccccgaggatccactctcagtattaagagaaatattagtatatatccttgaagcaacggtagttgaagaacgtcgcaggttaatgatggaaatcatctaccataaatgcgagttggtcggagagatggcggtcgtccagcaggcgcagcgcagcctgtgtctggaaagctacgatcgcattgaacaggtcctgacccagtgcatgcaggcgaaccagctgccggcgacgttaatgacccgacgggcggcagtcctgatgcgcagttatatttccggcctgatggaaaactggcttttcgccccggactcctttgacctgaagaacgaagcccgcagctatgtcgctattttcctggagatgtgccagctctccccgacgctgcatggcaagtcaggctcgctaacagcctga

SEQ ID NO: 122577 - DNA, 186 bp, Enterobacter cloacae
atgtcactggaaaatgcacccgatgaggtcaaactggccgtcgatttgattatgctgctggagaatcatgacatccctgcccagacggtgctcaaagcacttgagatagtgaagacggattttgaaggcaaggtgaaggccagtcgccttcaccctgaccccctcccaccgggagagggaatctga

SEQ ID NO: 122578 - DNA, 672 bp, Enterobacter cloacae
atgaacaataaaaatacgctcttgcaggtcagggatgtcggttttcgtgtggcaaataccacgatccttcagcatgtcgatttttgtctttccccgggtgagttcaaactgataacagggccgtcaggctgtggtaaaagcacgttattaaagattgtcgcttcactgctcagccccactgagggcgctattctgtttgaagggcaggatatcgcgacactgtcgccagaaagctatcgccagcaggtctcttactgcgtgcaaaccccttcgctgtttggggacacggtttatgacaacctggtctttccgtggcaaatccgtcttaaaacgccggagccagaaaaatttatcaccgatctggcccgctttggcctgtcgaaagagacgctgactaaatccatcaatgaattatcgggcggcgaaaagcagcgtgtttcgctgattcgcaatctgcagtttttgccgaagatattgttactggacgagatcaccagcgcgctggatgaggtgaacaaacgcaacgttaacgagattattcatcgttacgcaagcgagcagaatattgccgtgctgtgggttacgcacgattcaaacgaaattacccatgcggatgatgtcattacgcttgagccgcagggcgggaaaatgcaggagtcaaaccgtgggtga

SEQ ID NO: 122579 - DNA, 1146 bp, Enterobacter cloacae
atgactataaaaaaatcagcgctggcagtaacaattggcgcagcagtggcattgacctccttcgcatctcaggcggaaatcacggttcttaaacaagaccctcaggcaggtaacccgctgagccgtcttaactttaccgttggcggcagtattcgtcctcagttcaacatgatgtcgggcgacggcgataaaggctcctacaaacgtaatggcttcgacggcggcacccgtttccgtttcgcagcagattactatctgtttgatgacatcagctggatcagctactacgaactgggtgtgaacattccggcgctgttcaactgggataaccactacgctgaaggtgctaacgacacctctcgccgtatgctttacaccggtctgaagagcgacacctggggtacgctgaccttcggtcaacagaacagcgtttactatgatgtggttggcgtgaaaaccgatatctgggactacgacatgattggtcaggctccaggtaacgggatcaacggtgactacgacggctcttatcgttcacgcaaaatgctgaaatataagaaaaccgtaggtgatgcggatatttatgcatcctacctgtttgaagacagcgaatacctgccgggcaatggcctgcgttacaaacgtaaaggcggcggttcactgggtctggattaccacctgaccaccgatctgacctggggcgcagcgtggaactacacccgcgcggacatgcgtaacccggacaacggcgacagcaaatcttacgaccagaatatcctcggtaccgcgctgagctggacgccggataactggaccttctcggctggcggcggctggtaccagaacttcctgaccaccaaaaaagtgtctactgacaactactttgccggtgatgcatggggtattgaatacttcgcagggtacaaattcccaatcgatcagtatgcggtgaaatccatccagccttacttcatgggtgaccgtattgagtacgtgaatggtcgtaactaccagcgtatcgataacggcgtgggtgttagcgtccagctggactacggtttccgtgttgattacgaacacgtgttcacctccagcacggataacctgggcgacatgaacctggtgcgtctgcgttacgacttctaa

SEQ ID NO: 122580 - DNA, 1071 bp, Enterobacter cloacae
atgaacgatggaacggactatcgcgcgatcctcgcatccgatacccctttaatcgacgttcgcgcgccgatcgaattcgcccagggcgcgatgcctgcggcaatcaacctgcctctgatgaacgatgatgaacgcgccgccgtcggtacctgctataaacgccaggggccggacgctgcgcttgctctcggccatagcctggtcgcaggcagtacccgtgagatgcgcattaacgcctggcgcgaagcctgtctctcccaccccaccggctacctctgctgcgcgcgtggcggtcaacgctcgcatatcactcaggcctggttgaaagcgcgcggcgtggattacccgctgatcgcaggcggctataaagcgctgcgtcagaccgcgattgaggtaaccgctgagcaggtgcaaaaaccgatggtgctgatcggcggctgtaccgggagcggcaaaacgttgctggtgaaacagcacgcgcagggtgtggatctggaagggctggcacaccatcgcggctcgtcgtttggccgcacgcttacaccacagctttcgcaggcgagcttcgaaaaccagctcgccgtcgtgctgttgaaaaaagaggccgcacgctgggtgctggaggatgaagggcggatgattggctccaaccacctgccggaatgcctgcgagaccgcatggttcaggcacctgttgtggtggtagaagacccgtttgatgtccgtcttgaacgcctgcgtgaagagtatttcgaccatatgtgggcggatttttctgctgcctttggcgaagaggcgggctggaacgcgtacagcgaatacctgcaccacggcctgtttgccattcgccgccgtctggggctgcagcgctttgcagactttacggcgctgctggattccgccctgcaggagcaacaacgttctggcagcaccgacgcgcatttgcgctggcttgccccgctgctgaacgactattacgacccgatgtacacctggcagctggcaaaaaaggcggagaagattgtgtatcgcggaacgtttgaggacgtggctgactggctcaatcgctga

SEQ ID NO: 122581 - DNA, 210 bp, Enterobacter cloacae
atgaaatccatcaaaactttcgttgcagttgccgcactctctctgatctctttcggttctttcgcccagagcgtcagcgccacggcctctacccttgaccgcgcagaagcgaaaattgccgctcaggctgctgaacagggcgcgtcttacaaaatcaccagcgctcagtttaacaaccgcgttcacatgacggcagaactgaccaaataa

SEQ ID NO: 122582 - DNA, 711 bp, Enterobacter cloacae
atgacagtgcgccgttaccggcggcggcgtacaggaagtgatgcactgggatttacgcgctcgccttttgctccccccttcttcgaccggctcgaatttttgagccagtccatcagccagccccgcaaaacagacgctccgtttatcattctggtgacggaggatcattttctgcgcaccggttttctcaacggccaatttcccctgagcagctgttgcgactatcctacgctggaggatgcgtttagcgccctggcccagtggccatccgcccgtctggtggtggatattgaaagccgctccactgcgctgatcgacaagctggatcagctcagaaggcatagcctctatcccccttttctgacgccctatctgttagtcagggcggataattacgatactcgcctgttctgcaaagcggcgggcccttttcacgtactcgaacgtcaactgacgccgtctgctttccagcacagcctgatggataccagccctccccagggctgcgataaagactggttctcccgcaccgaatggcctattttgcaggagttatcgcgggggaagacccttcgccagatagcgttgatgcagaatcgcccctatagccgcattatctatcgtctcagctgcattctgttgaaactgggtctgacccatcgccaggaactgctgcaccttctcaataacctctcagactgcaccttctaa

SEQ ID NO: 122583 - DNA, 699 bp, Enterobacter cloacae
gtgacagcgcaaaacctgacctatacgcccccccggttacagtacctttctcaggacatcgtcggcatcaaacttgagcccatcgtcgccctctcctctttacgcagggtcggcgtggaggtccttagcgtcctgtctgaaacgcagcatagcgaaacctttttccgccatcagtctgcagactggtcgataacgctgcttgaagcacagctcaccgcgttaaaaaataccccgcactgtaataattttttcattaatctgccgataacagtcctgacagagcccgacgcttttcagcggcttagccggataaaatgtccgccgctgaatattgaacttgtcgaccccagtgcttttttaacgctgtcagccgcgcagaggcaggccgttacccggagcctgttgcagctcataagacaaggtcacggtatctggctggatgacattgatgaaacactcatcccgccctttttatcctgccagttaccgttaagcggcgtaaaaatcgataaggatgcattctggcgtttacgcgccacgcccgcgctacggcaactggtgtcccggtgctttcagcttgccgggaaagtgcttattgaaggtattgagactgagcaggattgtacctgggcactgcaggcaggcgcagaactcggccagggctattactggccgtcctggacatggccggaggattaa

SEQ ID NO: 122584 - DNA, 132 bp, Enterobacter cloacae
atgataaaaatccagattataaaaatggatgaaataaagattaagaaagccttaggctggaaaaataacaaatattcattagcgttctatttatttcccgattatttaatcgacagaatgagatcggcataa

SEQ ID NO: 122585 - DNA, 1017 bp, Enterobacter cloacae
atgaattctcgtctgttgtcatgcttctcgcttgccttgttgtcttcatctcttttcctttccacacaagcacttgccgctgataacaacgaaggtatcgttgtttataacgcgcagcatgaaaatctggtgaaggcgtgggttgacggttttaccaaagaaacaggtattaaggtgacgctgcgtaatggcgatgacagcgagctgggtaaccagctggttcaggaaagcacggcatcacctgcagacgtgtttctgacggaaaactcgccatcaatggttctggtggataatgccaaactgttcgcgccactggatgcagagaccctgaagcaggtgcctgcggaatttcgtcctgcgcacggccgctggatcgggattgctgcgcgtagcacggtgtttgtctataacccggaaaaattgagcgaacagcaattgccaacatcgctgatggatctggcgaaacctgagtggaaaggccgctgggcggcatcgccatcaggcgcggatttccaggcgatcgtaagtgcgatgctggccctgaaaggcgaacaggccacccttgagtggctgaaggcgatgaaaaccaattttgtggcctacaaaggtaacagcaccgtgatgaaagccgttaacgccggccagattgatggcggtgtgatttatcactactaccgttttgtcgatcagtccaaaacgggtgaaaacagcaaaaatacccaactctactacttcaaacatcaggatccgggtgcctttgtcagcctttccggcggtggcgtactggcgtccagcaaacacaaagaacaggctcaggcattcatcaagtggatcaccggtaaagaaggtcaggagagcctgcgcaccaacaacgcgtttgaatatgcggttggcgtgaacgcggcctctaacccgaaactggttccgctgaaagatctggatgcgccgaaagtggaaccttcaacgcttaacagcaaaaaagttatcgagctgatgacgcaagccggcctgctgtga

SEQ ID NO: 122586 - DNA, 1539 bp, Enterobacter cloacae
atgcaggagcctgcccgcaggcgacctgcgctgccgatggttgcgttagctgtcttattttcattaatggcgcttctgcctctgggttttatcattgccattggcattgagacgggctgggagaccattaagacgctggtgttccgcccgcgtgttgctgagctactcagcaacacgctgtggctgacggccttagcggttccgctttgtattgtgaccggcgtggcgatagcctggctcacggagcgtacccggctggccgggcggggaatatggtctgcgctggcggtcgccccgctggcaatccccgcgtttgtacaaagctatgcctgggtgagcgtcgtcccctccctgcacggtctctccgcgggagtattcctctctgttttagcctactacccgtttatctacatgccggttgccgcggtactgcgccgcctcgacccgacgcttgaagatgtggccgcgtcgctcggcacgccgccgtggcgggtctttttccgcgtggtgttgccgcagctcaagcttgctatctgcggcggggcgctgctggtcgcgctgcacctgctggcggaatacggcctgtacgtgatgatccgctttgatacgttcaccaccgcgatttatgaccagtttcagtctaccttcagcggcccggcagccaatatgctggcgggcgtgctggccttatgctgtctggccatcttaatgctggaaggggtgacgcgcggaaaagcacgctatgcgcgcatcggcggcggggccgcacgtgaacagaaacgctggccgctgaagccggtcgcggccacgctgggccagctgtttttcctcacgctgatcgtgctggcgctgggcgtaccgttaattgtgctctgtcgctgggtctggctgggcggtattgagaactggatgagcgcggacctctggcactccctgcgccagacgctcatgctcggcgtgggtggggcactgctgaccacggcctgcgtgatccccattgcgtggcttggtatccgttatccgcaccgcgtcttccggatgctggaagggtgtatctacatcaccagctcgctgccggggattgtgaccgctctcgcgctggtaacggtgacgattcattacgcccgccccatttatcagacggaaattacgctcttcctcgcctatctgctgatgtttatgccccgcgcgctcatcaacctgcgggccgggattgcacaggcgccggtagagctggaaaacgtggcgcgtagccttggcagcacgcctgcgaaggcgctgtggagcgtcaccatgcggctggccgcgccgggtgccgccgcgggggctgcgcttgttttcctcggcgtcagcaacgaactgaccgccacgctgctgctctccccgctgggaacacgcacgctttccaccggtttctgggcgctgaccagtgagatcgattatgttgccgccgcgccgtacgcgatgctgatgatcctgatttcactcccgctgaccgccatcctctacgtgcagtcgaaaaaaattgcaggactatga

SEQ ID NO: 122587 - DNA, 1041 bp, Enterobacter cloacae
atgcttgaattaacgtccatttctaaatccttttccggtgtgcaggtgctcgacagcttaaacctgagcgttgcgcctgggagccggacggcgatagtcgggccgtccgggtcagggaaaacgacgctgctgcgcattcttgccggctttgaaacgccggacgccgggcggatagtgatgcagggccgaacgctgtttgacgaaaacagcttcgttcccgcccatctgcgcggcattggctttgttccccaggagggggcgttattcccgcatctcagcgttgcagacaacattgcctgggggctggacggcacgcgccacgaaaagcgccagcgcgtagaggcactgatggagatggtgtcgctggacaggcagctcgccacccactggccacatgagatttctggcggacagcagcagcgtgtggcgctcgcccgcgcgctggctcagcgtccttcattgatgctgctggatgagccgttctcggcgctcgataccggtcttcgcgccatgacccgcaaagcgaccgctgacctgctggcggaagcgggcgttgcctcgattctggtgacgcacgatcaaaacgaagcgttatcttttgccacccaggtggcagtaatgcgttccgggcgctttacccaggtgggtaccccgtatgacgtctacactcagcccgttgatgaagagaccgcgctgtttctgggcgacgcagtgatcctgcccgctcagcttaccgccggccatgcggtgtgcgcgctgggtgagatacccaccaacaatacgcatgccaccgggcagggccgggtcatgatgcgccctgaacaactgcgcgtgacggcgtgcgcgccgcatgaaagcccggtgtcgataattgatgtcgattttaccggtcatttgtccacgctcaccctggcgtttgccgggcatcaggagcctgttgttctgaagaccgtaagccagcctggctggaatccgggtacggctgtgcgtattgatgttgcgggaaccgcccgcgttttatcgttctcccgccgcgcctga

SEQ ID NO: 122588 - DNA, 2184 bp, Enterobacter cloacae
atgaacaacacgaaaaggcataaaacgctgctggctctcgccattggcgcggtcacgcactccgccctggcggcggatgaaaagaaagaagacaccctgattgtccagtctgcgcctgccagcgattttaaacccggcggcgaccagcttgtgccggcgttccttgacgggcaggtggcgaacggtggacgcatggggatgctggggcagcagaacgccatggacgtgccgtttaatatcatcagctacacctcgaagctggtagaagatcagcaggcgaaaaccattgctgatgtggtcgctaacgacgcgggggtgcagtacgttcagggttacggcaacagcgccgaaaccttccgtatccgtggcctgaagtttgacggggatgacatgaccttcggcggcctgtccggcgttctgccgcgtcaggtggtggatgcgcagatggtcgaccgaattgagatttttaaaggggcaaacgccctgatgaacggcgcggcaagttcaggcgtggggggaatgattaaccttgagccgaaacacgcggatgaaacgccgcaggcaaaagtgggcgtcgattacacctccgattcccagtttggcactacgctggatgcgggccgtcgctatggcgacaacgaccagtttggcgcgcgcgtgaacctcgtccatcgcgaaggggaaagcggggtgcccaacgatcgccgccgcactacgctgctctccaccggcctcgactacaaaggcgacaatttccgcacctctctggatgtggggtatcagaagaaaaccttccatggcagcccgaccagcgtcaatatctccgccgtggatttcgtgcctgaaccgccgaaaaacgatcgcaacttctcgcagaaatgggcctacagtaacatcgaaaatgaattcgggatgtggcgcagcgagtacgacattaccgataactggacggcctataccggcctcggcgcacagcacgctcacgaagaagggatttatagcgcgccgaagctgctggataaaagcggtaaggcgacggtcagccgtcttgataccaaccgcatcagcgattccgtcagtgggatggcgggtattcgcggtaactttgctaccggcttcgtaacgcataaagtcaacgtcggttactccgcgatgaccaaaaacgaaaaaatcggctggaaaatgtcgtcggcggcggataacccaaccaccaatatctaccacaataccggtgtggatatgccggatagctccagtttcaacggcttaggcggaaattacagcgatccgctcaccagcgggcgtacccggacgcagggctggctgttgagtgatacgctgggcgtgctggacgacaaactgctgtttaccgccggggcgcgtcatcagaaggtggtcattcgcggatacaacaaaattaccgggcaggaaaataaagcagacggtttcgacggcagccgctggatgcctacctacggcgtggtttacaagccgtgggaggcgatctccctgtatgccaaccacaccgaagcgctgcagccgggtcaggcagcccccaacaccgccaccaactacgggcagagcaccggcatcgttcactctaagcagaacgaagtgggcgtgaaggcggattttggtcgcgtgggcggctccctggcgctatttgagatcaaaatgccgtcggcgatcctcaacagcaacggtcattatggtcttgatgccgagcagcgtaaccgcggcgtggagctgaatgtgttcggtgagcccctgctgggcgtccgtctgaacgccagcgctacctggctgcaggcggagctgaccaaaaccaacaacggcctcaaccagggtaacgatgcgattggcgttccgaatttctatgccgttctgggcgcagagtatgacatcaaaccgattgatggcctgaccgctaccgcgcgcgtgaaccactccggcacgcaatatgcggacctggcgaacaccaaaaagctggacagctacactacgctggatctgggtatgcgttatcgcttcgccgttaaccacaatcaaaatcagatgacggtgcgtgcgggtatcgacaacgtgaccaatgaaaactactggtccagcgtggatgattcaggtacctacatcacccagggcgaaccgcgtacctttaaagtctcggtgggctacgcattctga

SEQ ID NO: 122589 - DNA, 1143 bp, Enterobacter cloacae
atgattaacgtcgggattgtcggcagtggctttatcggcccggcgcacattgaggcgctgcggcgtctcggcagtgtgcaggtggtcgccctgtgcgacagctcgctttcacaagcgcaggaaaaggcgcgccagctgaatgtgccccatgcttacgggaacgttgaggcgctgctcgcccatccggatctgcacgtggtgcataactgcacgccaaaccatctgcacgcagagattaaccgacagattttgcgggcgggtaagcatgttttttccgaaaagccgctgtgtatgaccccggaggaggcccgcgagctggtggcactggctgagcaggcgggcgtggtacacggcgtcagctttgtctatcgccagtttgcgatggtgcgccaggcggccagcatgaggcgcgagggcagtctcggtcggctgtttgccacgcatggcagctacctgcaggactggatgctgctggaaaccgactacaactggcgggtggatgccacgcggggcggtgcatcgcgcgcggtggcggatatcggctcccactggtgcgacacggtgcagtttgtgaccgggcggcggatcaccgacgtgatggccgacctcgccatcgtctggccaacgcgcaaggccagtgcggcgggaaaccggaccttcacggatgatcgcagcgcgaacgatgaagacagaccggtcaccaccgaagattttggctcggtgctggtgcgcttcgacgatggcagcaaaggcagttttaacgtctcgcaggtcagcgccggacgcaaaaatcggctgacgtttgaaattaacggcagcgaacggtccgtggcgtgggatcaggaggtgccgcagcaactctggatcggccatcgcgcgcaggcaaaccagaccctctccgacgatccaaacctgatgaaccgtgacgtggccgaaagcgcccattttcctggcggacatatcgaaggctggcctgatgcctttaaaaatatgatggtgcagttttaccgcgccgtgatgcagggggagatgccggcacagccgctgtttgcgacgttccatgacggcgcgaacgtcatgtatatcattgatgcgatagtgaaaagccatcagcaacagcgctgggtgcgcgttgcgtattga

SEQ ID NO: 122590 - DNA, 1035 bp, Enterobacter cloacae
atgaaggttaccggcaaacaggagcggctgctacgccgcgcactcaacgagtggcaacaggaaggcacattaaccgctgatgaccatcagcggctggccggtacgcttcaacgcgtgaccatggactggcagcggctgagccgctatgccttctggacggcactcgcctgcgtcattatcgccatcggcagcctgttttcggacagcgaactgatggcgcgcattatcgaattcttcgctttttcctcccttgcccgcatcggactgccggcactgctggccgtgctgttttatttgtggggcttcagccgccagcggcgggagacgcagtggcattacagtaccgaagcgattttgttcctcggagtcttgtttaccgccatcgcgctctggcaactgggtgaacggctggataatggcagcgaccacatcgcacccctgttcctggccggctgtgccgtctatggcctggtaggctttttcggccgctccgggctggtctggctgttcttcttgctctcgcttggcaactggtttggcgcggagacgggctatatgtccggctggggcgcttactggctggggatgaactatccggtgcgctttatctttttcggcggcgcgctgctggccctgtgctggatcctgcgcgctctgctgcagtcccgtcatctctacaccaccagtaaagcgatggggctgacgtatctctttgtcgccatgtggatcatgtcgatatttggtaattacgatatcgataactggtacagcgtgacccaggcctcgttgctgccgtgggcgctgctgtttgcggtggcggcggttctctgtatttacatcagtctgaaaaccgacgatggcatgctgcgcgggtttggcctgacgttcctcgccattaacctctatacccgctacttcgaatacttctgggatgggatgaacaaggtggtgttcttcctgattctggcggcgtcgctggcggtgatagggcggtatgcggagcggatctggcatgccgggcgtgcggagaagtaa

SEQ ID NO: 122591 - DNA, 591 bp, Enterobacter cloacae
gtggcacgtccgaagagtgaagataaaaaacaggccttactggacgcagcaaccgctgcatttgcacagtcaggtattgccgcctcaacggccttaattgcccggaacgcgggcgtcgctgaaggcacactgttccgctactttgctaccaaagacgatctgctgaatgccctctatctgcacctgaagcaggatctctgccagacgatgctggcggagcttgatcgcacgctcacccttcccaaagaacatacccgcaatatctggaacagctacgtggactggggcatccgtaatcctgtcgctcacgccgccattcgccagcttggcgtcagcgagaagatcagcgccgaaacggagcaggccgtgcaggagatgttcccggagctgcatgaactgtgccgtcgtgcagtgcgtccggtatttatgtccgatgagtttcgtacctttggtgatgccatgttcttatcgcttgccgaaaccaccatggaatttgccacccgcgatccgtcccgcgccgtcgattttaaagcgctgggctttgaagccatgtggcgtggactcgcctccgaggatattgatggacagtaa

SEQ ID NO: 122592 - DNA, 1068 bp, Enterobacter cloacae
atgattattgcttcagctgcgagtttaccttttgtcctgaatcctggatttggccagccaccgcagggtgcgcagcttaccgaagtggaggcctccccgcagtatcgcgacgggaaattccacaatacgttgccgacaccgggcttcaccggcgagcaaaatatgctggtggcgtggtggcaatttctgacccgaaaaaccgaaaatgcccgtcccgcgcagccgctgccgctggtgaaaaccgatctcgccagtctgccgctggagcaggacacgctggtctggctcggtcactcgtcgtggtatatgcagctggcgggtaaacgtattctgatcgatccggtactcagcaactatgccgcgccgttctcgttcctcaataaagcttttgcgggcgagtatccctggcatgcgcagaacatgccggagatcgacctgctgatcatctcccacgatcactacgatcatctggattacgccaccatcagggcgttactgccgaaggtgaaacgtgtggttactccgctgggcgttggatctcatctgcgctactggggcatgaagccggaaattatcgacgagcgcgactggaaccagtcggtgcgcatcagtgatgaattaacggtgcacgtcctgccggcacgtcacttctccggccgcgggattaaacgcgatcaaaccctgtgggggagctttatgttcgtcacgccggcgcagaaagtttattacagcggagactccggttacggcccgcacttcagggccatcggtgagcagttcggcgaggtggatttagccatcatggaaaacggccagtacgatcgggactggaagtacattcacatgatgccggcggaaacggcacaggcgtcggctgaccttaacgcgaaagctgtcgtgcctggtcataacggacgctttgtgctggcgaaacacacctggaacgatccgctgatccagctggcgcaggccagcaaagataaaaattatcggctactgacgccggagctgggtgaacctgttcacgtgagtgataccacgcaaacctttcgtgagtggtgggaataa

SEQ ID NO: 122593 - DNA, 2709 bp, Enterobacter cloacae
atgaccaaaaaaaatctctctcagaacatgccacctgctggtgggcaggcgtatcagcagaccgttgagcaagtgcttgctaacaagcagagccaggcaagcggcctcgaccgtgctgaagcgcaggcacgtctgcatcagtatggccctaacgcgttgccggagaaaaaaggcaagcccgcctggctacgttttctcgcccattttaatgatgtactgatttacgttctgcttgccgcggcggtattaactgcggttatgggccactgggtcgatacgctggttatcctcggtgtggcggtaatcaacgcgttaattggccatattcaggaaagcaatgcggaaaaatccctgaagagtattcgcaatatgctctccagcgaagcgcgcgtcattcgcaatggcaatcatgaaacgctaccgacaactgaaatagtcccgggcgatattattgtattacgcgcgggcgatcgtattccggcggatatgcgtttaatcgaagcgcataatttacgcgtggaagaggctattctgaccggcgaatctaccgtggtggataaacacattaatccgctgaccggtgaattaccgctgggcgaccgcactaacctggtcttttccggtacgaccgtgagtgcagggggcggcattggcgtggtcattgccaccgggcaagagactgaacttggccacattaaccagatgatggcgggtattgaaaagcatcgtacgccgctgctggtgcagatggacaagctggggaaagcgatcttcgccattattctggcgatgatggcggcactgtttgtcttcagcctggtgttccgcgaaatccccatgggcgagctgctgctctctctgattagcctggcggtcgcctccgtgccggaaggtctgccagccattatttctatcatcctttctcttggcgtgcaggcgatggcacgcaagcgggcgattatccgcaagctgccaacggttgaaaccctgggggcgatgaccgtggtctgctcggataaaaccggcactctgaccatgaacgagatgacggtgaaagccatcattactgccgacagttgctaccgcgtggacggtaacagctacgagccggtggggaacatttacctggaaggcagcgacgagccgatgcagatccagccgggcaccgtgctggagcagtacctgcgcactgtcgatctctgtaatgacagccaactgattcaggacgaacgcggtctgtggggcatcaccggtgggccgaccgaaggggcgctgaaggtgctggcggcgaaggcgcatcttgagccggtgatgaccaccctgattaacaagatcccgttcgattcgcagtacaagtacatgagcacccactatcagattggtcacgaggagcacatcctgattaccggcgcgccggacgtgattttcgcgctgtgtaaacagcagcaggcccgtaacggcgctgaagcgttcgaccgcgcttactgggaaaccgagatggagcgctatgcacgtcaggggctgcgtatggttgccgcagcgttcaaaccggcgaacggtgagcaggcgctgacgcatgacgatctgaatcacgggctgatcttcctcggtattgccgcaatgatggatccaccgcgtcctgaagcgattgatgcgattcatgcctgccagcaggccgggatccgcgtgaagatgatcaccggggatcacccgcagacggcaatgagcatcggccagatgctcgggatcaccaacagcgagcaggcggtgacgggctaccagctggagaaaatggacgacgctgagcttgcagacgccgcggtgaaatatgacattttcgcccgtaccagcccggagcataagctgcgcctggtgaaagccctgcaggacaagggtgagatcgtgggcatgaccggcgacggtgtgaatgacgctccggcgttgcgccaggcggacgtgggcatcgcaatgggcatcaaaggcaccgaagtgaccaaagaggcggcggacatggtcctgaccgacgataacttcgcgaccatcgccagcgcggtaaaagaggggcgtcgcgtttacgacaacctgaagaaaaccattctgttcattatgccgaccaacctggcgcaggggttgctgattgttattgcgctgctggcagggaacattatcccgctgacgccggtactgattttgtggatgaacatggcaacctccgccacgctctcctttggcctggcctttgaagccgctgagcgcaacatcatgaagcgtccgccgcgtcagaccggacagcacgtgatggatgcgtacgccgtatggcgcgtggccttcgtcgggaccatgattgccatcgccgcctttgcgctggaagcctggctggcaccgcgcggccacagcgcggagttcatccgtaccgtgctgctgcagatgctggtctgcgcccagtgggtatacatgattaactgccgcaacactgaagggttctccctgaaccgtggcctgctggcgaacaaagggatttggctggtcacaggcgtgttgttcctgctccaggcggcaatcatctacctgccgtttatgcagatgcttttcggcacggaagcgctgcctctgcgctactggttcgtcacgctggcggtagccgcggtgatgttcttcgttgttgaaatcgagaagcgactgacccgcaggttccgtaaggctgcataa

SEQ ID NO: 122594 - DNA, 795 bp, Enterobacter cloacae
gtgaaacctcaacttgccaatacgctcttcgaccctgacgccaccgcatgcccggccgtagcccgacatctggatttcgtggagtacgccgcggaagtgccggtgcacacccaccgtaaggggcagctgattattgccctgtatggcgcggtgatttgtcatgcggaaaatgatatctggatcgtgccgccagactgtgccgtctggatccctggcgggatcgcacacagcgccaaagcgacctggaatgctcatctcaactatctgtttattgagcccggtgccgccgcgctgccggagaaatgctgcacgctggccatttccccgttaatcaaagcgctggttgaccgtttgacgcatgaacgcgttgattatccgccagagagccatgccgcgcggctgaccagagtgacgcttgatgagctcgccagcatgccgcagcagaagctgagcctgcccgtttcagcccatcccaaaattcgcgccatggccgacgcgctggtcagccatcctgacgacagaagcaccctgaaagcgtgggcgaaacggctggcgctgagcgagcgctcctttgcgcgtttgatggcgcgcgagaccgggctgagctttggccgctggcgtcagcagctgcagttgattattgccctgcaggagctggcaagcggtgtcccggtccagaacgtggcgacaacgcttgggtatgaatccgtgaatgcgtttatcaccatgttcaggaaagccatgggcaccacgcccgcgcactattttgccgaacgaaaagtcagcggccgttaa
